United States Patent Application Publication US 2024/0301345 A1 - sequence listing, part 14

SEQ ID NO: 2295 - DNA, 29680 bp, Unknown
  R119_18m  MAG No. k141_18673
ccaaaaaagtagtacaaacacactcttgagttctcaaaccaccaccactcggccagctcagcaaccccagtgaagaagtccatcgctaaccggcagcgagtagataacttacacgagttggccgaccaacgcaaatcgacaagccccaagacacccaaaaacgttgaaacaacaacattccatcggcgtgtcgaaaatcatcaaaatacgccttcaataccaacttcagaccgtctttcgtttccaaatcgttaggaaaatggtccttgtacggcgtgttgtgcaatgttccccacacggacggcggccattcacccaccgttcaacgccggaaggcagacacattcctgtggtaagcctgtaatcatgaaacacatcgcagtattgacgggcgccggcatctccacgtcggcgggcatccccgacttccgcggcccggacggcgtctggaccaaacaccccgagcagatgagcgtctatgacatcgacgccttcctgtccgataaggaggagcgcgaatactcctggcgctggcagaaggaatcaccggtatggaacgcgcagcccggagccgcgcacaaagcactggtcaaactggagaaagccggcatgctcacgctgctcgccacgcagaacttcgacgcgctgcacgagaaggcgggcaacagcccggacgtcatcgtcaacctgcacggcaccatcggcacctcacactgtatgaaatgccatgcgaaatacgacaccgccgacatcatggcccgcctggacgaagagcccgacccgcattgccaccgcacgcttccctatagtggcggtatgccctgcaacggcctgatcaaaaccgatgtcgtctatttcggagaggccctgccggacggcgcaatggagaaatcctataagctggcctcgcgcgcggacgagctgtgggtcatcggttcgacgctggaagtatatccggcggcgagcatcgtgcccgtggccgcacaggcgggagtgccgatcaccatcatgaacatggggcgcacgcaatgcgaccgtctcgcgtcgcgtctgattcgcgacgacatcgcagttgcgctgccgaagctggtggacgagaccatctccgcggcacagtaacggcacagtaacggcgcagtagcggcacggctatgcaacggccagccatgacggccggcttatacgcagcgggggcgcccggacgagatggtccgggcgcccccgcatgtcatcggcgtcaaagccgcaccgcttcatttcgcatctgcgaaagccggcggaaacccacggcgtcagtaaatgcgcttgggctggaagcctgcctccttcagcgccatgagaatatggtcgatgtgatccggaccattggtctcgacggtcacaccgagtgaaaccgcattcgtatagtggccggacgccttgaactggtcgtgatccagagcgataacgttcgcgcgttcacgagcaagcagctgcgccaccttgaccagctggccaggggtgtcaggcagctccacctcgaagttcatgatgcggccgcgggcgatcatacccttctgaatcaccgcacccatcgtcaccgtatcgatgttgccgcccgacatgatcggcacgaccacgtgcgggccggtcgcggaggcgaacttgcgcgaacgcaggttcaggtgttccaaagccgccagagataccgcgcccgcagcctcgatgaccagcttgtgcttctccagcatcagcaggatcatctcgttgatatcgcgttcggtgacggtgaccagatcgtccatgaactcgttgagcagggcgaacggcaggtcgccggggtgcttgaccgcaacgccctcggcggacgtgacgacctgatcggcctcggtcacccgtccggcggcgaacgagttcttccatgccgggctgccttcggggatcgcgccaatcacgcgaacctcgggcttgaacgtcttgatggcgagcgccacgccggcgcccaggccaccgccgcccaacggcaccaccacgtcggtgacgttcggcacatcctccagaatctccaggccaatggtgccctgaccgcagatgacctcgtaatcgtcaaagggcggcacatagatcatgccttgcgtggaggccagttcggcggcatgggcggccgcctcgtcgaacacgtcgccgtacagcaccacatcggcgccgtacgccttggtggcgtccactttcagcgggggcgtaatctgcggcatgcagatcgtcgccttggcatgacgctcgcgcgccgcatacgcgacgccctgcgcatggttgccggcggacgcggtgacgatgccgcgggcgatctgctcctcggaaagcgacgcgatcttgttgtacgcgccacgaatcttgaacgaaccggtcacctgcaggttctccggcttgagcagaatctcatgcccggtcagctcagacagggtgcgagagggaatgatctcagtgtgacgcgcggtgcctttcaaacgcttggcggcgagcttcagctcggccgcgtggtcacgctgcaatgccttaaggacgtctttctgttccatactgcgtattgtatgcgtcgccctgccgaacggacgcggccgtctcacctgcgattgccgcagtcgcggcgacccgtcggaggactggccggaaaacagttgcacgtattcataagtcggcctcgttgcgaggctcccttcgtcgccgggcgtctgatgtatgacggtctcgatggtagacgaaacgtaatttattgccacggtatcgcgtgtttcttgcgcaaggaaagaaataacccgcataccggtccggcaattatcgtcgtgaggcgaagaagccggtgagcagacgggcgcatgccgcttcgcgaacgccgccgacgacctgcggcacatgcccgacatgcggatcgcggggaatgtcccaaatcgaaccgcacgcccccagcttcgcgtcccaggccccgaagacgatgcgtccgatgtgcgtctggatgcacgccccggcgcacatcgggcatggctccaatgtcaccaccagcgtgcagtcggccagattccagtcgccgcgggcctgcgcggcctcacgcatcgcctcgatctcggcatgcgccaacggatcgtgccccgcctcgcgacggttgcgcccccggccgatcaccgtgcctcgctcgtcgagcaccacggcaccgaccggcacgtcaccctgcttcccggcgcgctctcccagcgcaatcgcctcgcacatcgcctcgtcaagttcgcccatgcgcccagtttatcgaaatcgcgctctcaaaacttgcagatacaaaatcagaaccgccattttccaatacatcgacttttgtatctgcgagttttgagagcgcgattcatgaacaaccaccaatcaggcaccatgccgatgccgtatattgaggcttatgggcgaagaagcagcacacgatacgacacgacgtctttccgacgtgattcccggacgattcggcgatccggtctcggtgcagtatgcctggatgtcacccgaaaacgccgaagcgatgccgacacggccgttgttcctcgcgctgcatggatggggatccaatgaacgcgacatcgccggaatcatgcagtacatcgccccctacaacgatgtggtgtcgctgcgagcgcctctggtcctgcacgcgccggaaggcgtatcggccggcgcatacagctggttccatgacgctgtgccttccggagacgacctggatcacgacatcgcggccgccgcacgcgcggtcgaccagtgggtcgacggccacatccccgcgacgcgcgacgtcgtgccgatcgggttttcgcaaggcggggccgtcgcggtccatctgctgcgcatgcacccggaacgctatcgcgccgtcatcaacctgtcgggattcctcgcgcccgcaggcgtgcccggcaccgcgccggcggatgaccggctgaccgacttcgagataccggtatatttcggatacggcaagaacgatgcggtcattcccaaatatgagctgttcgccgcggccgcgtggctggaagagcacacgtggctgacgacgaaaagctaccgcgggctggaccatgcggtgagcctggacgagttttcggatatccggcaatggcttgtattgcacgacatcgcgtccggcgtgctgtgacccgcgcgaccccatcggccgcgcccaccccgttcagatgctgctgtcggcgtccacactcatgacgaacacgttgcggcgcagggccttcgcctgggcgcgtgtgatgtcgcccgcctcgagcatgtcctggatgatgcccagctcgatgccgtagctctcacgcttgatctcttccgcctgagcgatcgccttcgcgctgccgcccatgttcggccgtgacttcaacgcgccctcggcccggcgataatcgaggatcagcgccgagcagtgctccgtacggtaggtgccgcgtcccatctcctcatacagccgatccaccacgtgctccatcacgtcgagctgcagcagccgggagtgcgcgaacatctcgtcctcgctgatcagtggcgtggtacgccggatcttgctgctgatgcgccgtccgagattctccgcacgacgttcgaacgcgcgcatgcgcccgcgaatctgagacaccgcatggcccgaggaggagaccgtggacgtgtgccgcaacgtgttcatgatgtcatccatcatgcgttcgcatgcctccacgcgcatgtcctgctccgccgcatcatccagcgggtgcattttcaattcggcgagcagactcttgagatagtccttctcccagtgcagcgcctcgatctgcagccgctccaatccctgggggtcggattccccgacgcgctgcttcaatctcgtgatgcgcttcgtatacgactcgatgaccatgagcaccgcgcggcggttctcatcgtcgactcgccccgtcagctcctcgacggtcttgcgtaggatctctatggtgatctccgtcatttcgggtgccatgcggtcacggttcggagcgagcagaggcagcatgaaattcgccaatagtagcgtgacgacgatgacgccggatgcgatgaaaatcaactcgtcgcgcatggggaacggcacgccccaagtgacggtgaacgggatggtgaacatcagcgacagggtgatcgtgcccttggcgcctccgaaggtcatcaccgcggcgctgcgccaacgggccggcgtcatcttgcgccgtttgccagtgttgacgtcgcgcgccaaacgcagcatcccggccacccacaggaaccgcatcgtcaccacgaccagcgacaccagcagaatcacgatgctcaggcgcacgttgctcacgccgggatcgtcccaactggcgctcatcgccttcggcagctgcatgccgagcaggatgaacacggcaccgttgaggctgaacgacagcacaccccatacgctggacgacacgatgttggtgcgggcgacgttcggcccgatgccggtccggtcgaaccgcacgaacaggccggacgcgaccaccgcgagaatgccggacacgtgcagttcctctgcggtcaggtacagcatgaacggcaggaacagctccatcaatatgcgggtggtggtggtctcccaacccagcgagcgcacggtttcgaacagccagttcgcgagcaggccaatcgtcagaccgtatacggcaccgccgatgaacgagagcgcgaactcgccggcagcccggccgatcgcgaactcgccggtgatggcggcggcgatggcgaactggaagccgacgatgccggacgcgtcattgaacaacgactcgcctttgagcacgcccaactggcgcaggctcagcgacgcctccttgcccagcgagctgaccgccaccgcgtcggtcggccccagcgccgcgccaagcgccagcgcggcggcgagcgtcacggacggccagacggcatggacgatgacgccgaccgccaccatggtggcgatggccagtccgattgccaatgacaatgacagtttcagcgatttcagcaattcggatttgtcgatctcgtgcgcttccagatacagcagcggcgcgatgaacagcaccatgaacagttcgggattcagggaggcgttggggaatcccggcacctgcgtgatgatcgcgcccatcgcgatctgaaccagcggagtcgacaccttggggatgaaccggctggcgaacgacgagaatacgacgacgccgataatgcacagtatcagctgaaagacttccaaggctcgctccggctctccgtcggttgtgtgggattacttcacaatataaaccgactccgcacccgacacgttaacttcggcgtccggcttaacggctgcgcgcgggcaaaaagaaaccccggcggtgttgcccgccggggagagaaaggagagagaagaagaaaggggttcagttattgagaatcgtgctgccgattcccggtcggcttgtgctgacaattaatagtaaaacacccgtttcttggtgcaatgctgagattgtctgaaagcttcctgtgagttgatgtcgcgggctgaatcccatcacatggtaatggctgtagactgtagtgtggcgccgtgcgccatacacgtgagcgcgaaaaggagaatcctcatgctgctgtccgaccgcgacattctcgccgcccagaaggacggtcatatttctcttgacccatggactccggaaatggtgcagcccgcgtcgattgacgtgcgcctcgaccgtttcttccgcctgttcaacaatcatgcctacacatacgtggatccggccgagaaccagggggcgctgaccgagcagttcgacgtcgctccggacgagccgtggatcctgcatccgggcgagttcgcgctcggctcgacgtgggagtacgtcaagctcgacgcgacggtggcggcacgcttggaaggcaaaagctcgctgggccgtctgggcatcctcacacattcgacggccggcttcatcgaccccggtttcgaggggcatatcacgctggagttgagcaacgtgtcgacgcttccggtcaagctctggcccggcatgaagatcgggcagatgtgcttcttccagctcagctctccggccgagcacccttacggctccaagggcaccggctcccattatcagggccagcgcggcccgacccccagccgttcctacgtgaacttctacaaggccgacgtcaacgactagagccgatacccaagttctttgacgcaatgtgccggcgactccatgactgggccgccggcatattgttatgctccgttcgatgccgtctggcttattggcgaatggcggtgaacagcaccgactgggccggatgcagcgatggagggcgcaacccgtaggtcatcagcgcccggcccgtcatcagcacgccgtctttggtccaccagcccaacggcgactggccgctgccaagaccaagcccgtcgagatcgagatccagccacagcggctgtatgcggtacgtgccatcggggtcaagaccgggcacgcgaatcggcgccgcagggagagtctgggacgttgtcagttgcgtgaaccggtagaacgccgcggaacgatccggcttgaccatgccgtcgacccggacggccggatcggcgatatcggcgtgcacgcacgtgtcgatcgcgaaccatgcgcggtgcctcttgtattcggcgacccattcgccgagcttgttcaacgcctcgtccgactccttgagcagattccattcgacgcccatgtgcccgaagaacgccatcgccatgcgcatctcctggctcgtggcgcgatgcgtggaatgtgcaggactcgcccccacatgctcgcccatcatgcagggcggcacgagcagcgacgcgtaccgctgaatatcggcccgctcgaccgggtccacgcagtcggacgtccacacgcggctggcgaattcgagtatgcccaggtcgatacggccgccgcccgatgcgcaactctcaatctccagtcccggatgcgcgacttcgaggtcacggaacatccggtacacggcgagcgtctgcccgtgaaccgccggcctgccggtacgtggcgagaccgcctcggtgacgaatttgttgtggtcccatttgatgtagtcgatgcccaactcgccgaccagcgtatcaatggaatcatggatgtatcggtaggcgtcgggattggtcaggtcgagcacttgctgcgagcgtccctgcatcggcagacggttcgccgtcgggcgcagcacccagtcagggtgggcgcgggccacgtcggaatccgggttgaccatctccggttcgaaccacaggccgaactccatgccttttccgtgcacgtaatcggcgagcgccttgaggctcttcggcccgtccggccacacatcctgcgctatttgccagtcgccgagcccggatgtggagtctcggcgggagccgaaccagccgtcatccaccacgaaccgttcgacgccggaatccccggccttatcggccagagccttcaacgtgtcgtagtcatggtcgaaatacacggcctcccacgtgttgagaatcaccggacgtggcttgacggcgagatccgggtgacaggagcgcacgtaatcatggaatctcgcagccacctcgttgagcccgtcaccgtacgacccgtacagccacggggtggtgtacgtttcgccgcgggcgagcgtggcctcgccgccgagcagcacctcgccgccgccaatcagaccggtcgtatacggctgacgctctgccgacagcacggaattgccgctccagcccacatgcaccgaatagacctcgccatgctcgaacccgaagccgggctcgcccgcggaaagcaacagagaggcgtcaaaacctgggcgccccgccatcgagaccttctcgaagcgtccttcggtcagcggctgccgctgcgggctgcgttcgcgcagatgatggccggtggtggtgagtatctccgtggcaagtgccgggagcgggaagccgagttcgactttaccgacttccaagtcaccggtcggaagattaccggctggaagattacgcagcgtggtgcgctgtctgatcagtccgccgggcaacagttcgaccgtccatgacagttccacgccctgctcggtatccgacgcggtcacggtgacgaccggcacctgttgcgtgacggtatgcgcggcaccgtccacgccgtcggacacgtcaacgccttggcgttcgtcctgacggattgcgatgccggtcaccgtgaatgcacagaacggcgttacgccggcgcgccggatatccagtcgcggtgcccctatccacgactcgctttgcgtgggcatgatgcttggccaggcggtctcatccagcgcgccggacacgcgctgcggccgcagggcgtcgtatgcggcgagtacggttcccggcgccgcgagcgggcggccccagtgcacgaagcgcggaagaccgtgaccggcgaagatcagcgcgaacgccacatcagcagccggctgctcagcataaatagcggtgagttccgttccatcggcggcggcgccatggaattgttcgatgagtgacattgcgaatcccttcggaacgtgccattgatatatggttcgcctccgatgctacgacatcgttccgtcatgtcaccgcatattcagcgattccggggtatgagaagggctcccgttttccgatgtggagagcgggagccctgactgccggtggaggcttatggcattgttatgccataatgccgcgcttgcggtcgatggcgcgcatgatcgccttgtagatttccgaggcgatcagcacgaccgcggcgaggcagatgcactcgacccatgcccacggtccgagcggcgtggtgccgaacgcggagttgaggaacggcacgtagatcaccacgagctgcagcacgacagacaggccgatcgccccccacagccacttgttggagaacaggccgacgaacgcggactgacgtgcggaacgcgatgcgatcgcgttgaacagctgcgcgaacacgagaatcgtaaagcccatcgtacgggcctcgatcatctggaattcgtgggtgccgccgatggagcggtcggtgaacaggccaccttcaaggtgcatgtccatgccgatcaaggtgacggccgccatgatgatgccgatgaacgcgatatcgatccacatgtccctgtcgatcacgcggtcggtgagcttgcgcgggctgcgtgccatcacgtcatcggtctgcaggtcgacacccatcgcgagcgccggggcggcgtcggtcagcaggttgatccacagcagctgcgtggcgagcagcggcacggcgacaccggtggttcccggctgcgtgatgccaagcacgccggcgagcatgacgccgccgaacacggtgaacacctcgcccacgttggagctcagcaggtagcgcaggaacttgcggatgttgtcgaagatcacacggccttcgcgcacggcggcgacgatggtggagaagttgtcgtccgcgagaatcatcttcgcggattccttggtcacctcggtgccggtaatgcccatcgccacaccgatgtcggcggacttgacggccggggcgtcgttgacgccgtcaccggtcatggcggcgatgttgccctggcgctgcagcgactccacgatcttgagcttgtgctcgggggccacgcgggcgtacacggagacctcagaagtcgccttgtcgaacgccgcctcgtcgggcatcgcgtcgagctgatcgccggtgagggccttgccgcccttttcgatgatgcccagatcggaagcgatgcgggccgcggtgagcgggtggtcgccggtgatcatcaccgtgcggatgccggcgcgatgcgcttcggccacggaatcacgcacttcggtgcgcggcgggtcgatgatgccgaccatgccggcccagatcaggtcacgctcgatgacgtcgctctgctcggagatgtcggtcacctggccggctgcattggtcttgatgccggggatatcggccagggatgtggtgccgagcgggcggtacgcctcacccagcgtgcggtatgcctcgccggacagacgctcgacggtcgcgagaatttcctggcggtcgccttcggtcatcgggcggacggcgtcgccaaccgcgatgcgcgtgcagtagccgagcagcacatcgggcgcgccctttgcatagacgctcaggttgccgttgtcgctgctgtccttgccgatcacggccatacgcttgcgctcggacgtgaacggaacctcggccacacggtcgagcttgccgagggcgcggtcggccttgatcttgcgggaggcgacgacgagcgacacctcggtcgggtcgccgacgatctcccactggccggcatcgttctgacgcaagtcaccgtcgttggcaaacgctccgacggcgatggtgcgcagagcttcggcgttgaccggagcgctctcctcgatggcgtcgccacccatgcccagcatcttgcccttgggctcgtaaccggtgccggtgagctgcacttcaccgctcggggtgacgatgcgctcgacggtcatctcgttacgcgtgagcgtaccggtcttgtcggagcagatcactgaagcggatcccagcgtctccacggagctcagcttcttgacgatggcgttgtgcttggccatgcgctgcacgccgagcgcgagaacaaccgtcagaatcgtcgcaagaccttccggcactgcggcgacggccagcgaaacggccagcagcagcgagtcgatgagatcgtcgggcatcttgtggaagccttgcgtgatgaacagcgcgacgagcacgacggccgcgatgatgcacacggcaatgcccaggatcttggagacgtgggtcatctccttctgcagcggggtatcctcgtcatcggtctgcgacagcatgtcggcgatcttgccgacctgcgtgttcatgccggttccggtcacgatcgcgcggccggtgccctgagtgacggacgtgccgttgaaaatcatattggtgcggtcgcccagcgccttggcggagtcgagcgtgtcgggcttcttgcccaccggcacggattcgccggtcaggctcgcctcggcgatgcgcagcgacgcggcggcgaacagacgcccgtcggcggagacggtatcgccttcgccaagcaccacgatgtcgccgggaaccacgtcggcggtgttgatgtgcacgattttgccgtcacgcagcacggaggtctgcggtgccgtcatttgggcgagcgcctccaccgcctgctcggcacgggcctcctgaatatagcccagcaccgcgttgacgatcaggatcaggatgatgacgatggcgtcgaacggcagcacttcgccggccgttccgtgcgagcgctcgatgaaccatgcgatcagtgagatgacagtggcggcaagcagcaggtacaccagcggatcctggaactgcgccaggaacttcttccacttgggtacgggcggcgcgctggccaactggttcgggccgaatttctccaaccggcgctgcgcctcggcggaactcaggccggtattggtatccacatccagcgccttggcgacttcgttcgcctcggtcaagctgggatcgacgtcgtgaagcaggccttcctgcgactgcacgcctgtggattgatcatttgtgtgatcaaccataatggtctccttgatatagccgcggagtagtcagccctcacaatcaccgggatcgtcccctcccccggtcatctcgataaagctgcgcggttatgggcaccggcgcaactgctgccgatgcatactgttgccattattccacaaacccgtcatcgcttggcgaaacagccctttacgtgttgtccaaatatccgcattccgcgaacgatttcaggcaacacgctcacacagtgcgagcagccagcggagcgtcgtcatggtgtaatcgaacagttcgtcgtccatgccgaaataccgctcgcggcactccccgctcacatcgaccatcgcaagaccttctggctctccgggtgtgaatgacaccgcccgatcctgcattcatcatacgtgccaaggcaaggaactccggcggcttcggaaccggacgagctgcgttccgttcctaagtgcgcgccgaaacgacaactctgcgcacttaggaacgcaaactatgcgatctgcgttcctatgttcgcgcactcggcgttccggcgcgcacttaggaacgcaaaccgagtctctcaggggattggggcgattcgcgcgccgcgaatggctgtttggcgtgggggtctgggacaatggcacgtatggcaatcaagaaaggtccgaccaaggggtcgggaggaaaacaccgcaatgcgctacgcggcaaagggccgacgcccaaagccgaggatcgcgtgtatcacaaggcatacaaggccaagcaggcgacgaaccgtcgcaagatggcagatccacgactggcagcccgccgtcgcgccgcgaagttcgcgtccgattcggacgatctggtcatcggccgcaatgccgtgctggaggcgctgcgcgtcggcgtccccagcatgcagctgtatatcgcgacacgtatcgagcatgatgaccgtacacgcgagatcatcaagctcgccggcgcacaaagcctgcacctgctggaggccgaccgtctggaaatggatcgcatcgcccggtcgtcgaaccatcagggcgtcgtgctcaaagtgcagccgtaccagtattcgtctctcgccgagctggcggatatcgccgagcgcaaggccaaggccatggacgtggtgaattcgccgagtgcgcgcatcaacgcgcgcccgctgttcatcgcgctcgacggcgtgaccgacccgcagaacctgggtgcggtgattcgttcggccgccgccttcggtgccaacggcgtgattctgccggagcgtcgttccgcttcggtcaccgctgccgcgtggaaggtatcggccggtgccgcggcgcatatcccggtggctcgcgtggtgaacctcaccaaggccatcgaaagcatgcgcgaacgtggatattacacggtcggcctagacggcggcggcgataagctggtcggcgaaaccggtttcgagaccgatccgctgatcgtcgtgctcggttcggaaggcaagggactgagccgactcgtgcgcgagtcgtgcgacgcgatcgccggcattccgatcacgtccatggtggagtctctgaacgcctcggtcgcagccggtatcagcctgtacgcggtcgcccgcgcccgtcgcgaagcagcggcagccgccacgaagtaatacccatatctcccccccctgctgccggcggggtcatcgagcggaacgaaaatcggggtggccgccgcaatcggcgcaccaccccgtccggtttcgctcagcagctccacatatcagtggctccacaccgcggcatcaggatcgtcgtcgggattgtaatcatcatcgtcgatgggcttttcgtaattcgcctcatcgtcgaccacgccggaatccgcttcagcgttgagctcgttcacggctttgtcatccagcttgtagttcggcagcacggattggatgtagctttccacagcctcgcccatcggcacgtcgtggccggccttctcagcaaggaaccagcggtgatccagcacctcatggaagaactgtgccggctcgatctgcgaacgatattcacgtggaatcatacgcacggtcggctcatacacctcacgcatccaatcggtggcgacgatctccaactcctcgccttcacgccacgtggaggcacggtacgcatccagatcgttgagcaggcgccgcgcctgattctcctgcacatctaaaccggtcagtcgcagaagcttgcgcgacgcatagccggcatcgaccacgcgcgggcggaccagcacgcgcttgccgtcctcggcggtcttcatctccagctcgtccacgtcgaagcccaggtcgttgagcttgttgacgcgctgctcgatcttccacatctcatccgggccgaacttgtcggtgtcggtcagcgtgctccacaacgagtggtagcggtcgaccagacggttgcccacctcgatctcgtccacgtcgctcggcagcagacggccagaagccaaatccatcaattcaccgatgatgttggtgcgggccaagtcgatatcgtattcacgctggccatcggtaagctgcacctgcaaatcaccggtttcggcgtccaccaggaaggcggaaaacgcgtcggcatcacgcaggaacaggacgttcgacagcgacacatcgccccagtagaagccggccaagtgcaggcgaaccagcagcacggcaagggcgtcgatcaaacgctcggcagtatccggctgaagattgcgggcgaacagcgcgcggtacggcagtgagaacttcaggtgacgggtgaccagaatcgcttccagcggttcgccgttgcggtcatgacgaccggtgaccacggcaatcgggatgacggtcggcaactcgagcttctgcagtcggcgcagaatctcatactcgcgctcggccacctgacgggtgatctctttcatggcgtagacctcgtcgcccacgtgcacaaaacgcaccacgtggcgggagatgcctcgcggcaggttggccagcaggtcctcgggccaggtggccaggggcttatgccagggcagcgtgaacatcttcgggttcgagctggcggcggtgatcttcaatgcttgcggctcagctgaactggcatgttcgtcttcggctttgacggacgtggccttcagcgcgcgcggatccatctgaggcaaatcgttcaactccatgtgttcgattctacgtggtgcttgggaagtgcagcgagtagcggcgacttcggcgcgttattctcgcatacgaataaatcatctgtatgggatttgccggccgaattgacgtcccgtatgcgacgcctcatgcgcaatctgaacaaaatgaacgcaacaagtaacatgagccccgctgccgcggcaatgctgcctacggcggcacccgtacgaccgataaggccaggattgcccggctcctcgctcgggttattttcgggcgggacaacaggagttccagtgctaaatttcggctctactgtgatgttgagatcagcggatgtgcctccactgccaggaatcgagatgaggaacggatcacagtcgtatgctttgttggctttcgccgagctcgtgcgggagaccagatataggccgagcggcagattctggaaagtgagctgaccagctacgttagtggtgccggaatgctggtacagcttgtttttcgccgcgtgcgcagcgagcttcttggcagcatcgtgatagtcacttgatgtcagtcgttcccaatcggcagtgaggtcggaaaaatcgccgacggttttatatgaggagacgctaccatcattgttcgttgtgacggtggcgacgcgcacgatggaataggtatcgccggcaagcaatttgggcgaagccgtgtctcggccccatacggcattgatggtgagagcgccgaaagaatcagcttgcgcatatggcaccatagagccgagggctgcaagaacagtgaggacgatagtaacggcggcggcaatcatggcagcaatgcgcgccgcaccatactcgcttccgctatgcaggtctaacatgtctgcccggtcctttccgccatgatgaatgtgattggttatttgtactgtctggctgaggaggcaagtcaccgtccggctcgatatccgcagagtcagaatcaccagatgcgaccttggcgctcccactctgccggcgtcgccgctcatggcgctgccataaatgccatgcgatgagcaaggcaatcagtgcaagagacggcaacaagtactgcagcgggatgtccacgtggaacgtggatttggcgtcatcctgctgctgcggcgtgtatgggatgcgatggccacgcaccagcagccgatgcgtattgaccgcatacggcgtacaagtgatgagcgtgaccaaatccttgccgggctcaattgccagttgtttggtatcggtcggcagaacggtagtgatcttatcgacctgatacgcatacgtgtctttaagtattgtgatgtagaacttgtcgccttttttcataaggttcaagtccgtgaacagttttgccgtgggcaagccccggtggccagacagcgccgcatgagtggacgcgccaccaactggcagtgaggtctgttcgagatgtccgatgccggattgcaacactttctcggaagtgccgtgataaatcggcaaggtctcctcgagcttaggcacagtgatgtatcccatcatgccgtcaccgtcaatattgagcagactgttgtattcctcgtccgtggatgcggaattgacggcactggcaagagcgtcggtctctcccgcatcgttctgggcgagcttttcgttataggcgtgcgcagcatccagcaccttctggtactgttcctggctcaatgcttcaacgctggcgtcgtagttatttacggcgcggctggcgttgcgcataatgaggaagttgctgatcgtcggatagaacagaatgagcattccaccgagaatgaccagtacgggcaggatgttgcgcagtcgtttcatcgagcgttcttttcgcgaggaaaccgtgttgtgggcgtagcgggtgtgtgcccttcacgcccaaaacacggccatgctcgtcaggcgttcttgcgcttgagagtccaggcaacgccgagcgcgatgaccagcacaccaatcaccgtgaaggcgatggtacccatgccaccagtgccaggcaggacaacaccgggcttgttctggaccgggatgacaccgttcgatgcggtctggtcgtagacgctgccattgttgttgtcgtatttgatgacgacggtggcatgcgtggtgtcagtgccgttgttctggccatcaaccttcacgccgatggcgctggcgagcttgttgtagccggccggcgctttggtctcggtgagcgtgtactcgccgttctccagtccccggaagtcaaccttaccgtttgcaggagtggtgatagtcgtcgtagcacctgcctcatcagccttagctacacggtatacagcgttctgggtcgcactatcagcgactttcacgaagctaatagcagtgccgcccttatgtgcgagtgtgaactcagcaccagcaagtcgagtagcggtatcatcataatttttaccagtgtacttatcgacggtgaagccataagtgaagacgcgaaccttgctgggttcggactcaccggtgccattggtgctcgggttgttggagtactgaatcgttgcggagttgacgttaccagcaccgcccacaacagcatccttgttcagcgtggccgcgtaggtgacggtgatcttcttgccggcattggcctgctgcttggtcttgaagtccttcatggcgacagtaagaagcgttttgccggagtccgcaggagcagtggtgacggtgtagtcagtgtccttggtcagtgtcgtatctccgaccttaacggaagtgacttgtccaaaggtgagacccttagacaacgtatccttgaagttgaaggtgtaggtgctataggcggacatgtccggaatggtggaagtcagggtgaaggtcagggtatcaccgatcttcgcgtcggtggcgtccttaccagtgccgtttacctgtaccttcttgtcgacggtaggcagggcgcccttaatctcggcatccacactggtgctatgaacgcgaactagcgcggcgtattgactgttggtgtcggccacggtagcacccggcacagcgaccacgtagtagccgtagtcgagattagtgaacgtcgcagtgtacttaccgtccgtggcagcattcttagataccgtagcggtcgcgtcagccgtgatgttgttggtctgcgcccagttcgatgccttggcagcgaaagcactcaagtctttttcttttccagtcagcttggatacgtactcgtttgctttatcgttgacgttcgcgtcggtaacaccagttagtccgtcgagagtagagctcatgaagaacggcttccacccgtcagtcaacgtgtaggagacagccccgccgtcactgctcacggtggcggagaacatcttgtaggcgttcacggtcttaccggcgaacttcgtgtcagtagtgctgaccgtcagcgtggcattatccgctgcgttggccgtggcgactgtcgtcgcagccaatccaaatacggtggcaatcgccgcggcggcagcgaaaacctttttcatcagtgatttcattactgttcctttctctagatggaaatcttttctgtttagcaggtacggtttgtctatgtggtcgtcacgaggcatgggcacctcgctttcgtatacggctggagcccgagcggactgtgccggattgaacgcgttgattacgcacgtaccagaccacgccagctcccataagcagcaagccgaacatcaggaaccacatcgtgcccgcgcctcccgtatccggaagcaacgccgcattggtaacaatggccacgcgttccttggtgttgtaggagaccgatacttggtatccggcctccgcgggcttgatggtcttggtggtatcgccatccttataggtcacggcggtttcttccacggtgtacgtgtagtaacgcacgatgtccttgccgttggcatcctgtccatccacgaatgcgaccggcagtccttgaatcaccttgcgccaggtgttgctccaggaagaggcatcggaggagtccaacgtcaccgtccatggattcttctgcgtcacggttgtgcaatccgcgccgaagcattgaatcgtctgcggcgtcaccgtattgccactgccatcggtatagtgcgcggcgatcttcagttcgaccgactgcggccgttcgaggttgccgtccttccataccttctggacggtcaggtcaatggttcggcaaccgtccttgccgcacgggtcctggccgtcgtccggttcgggggtgagtccgccgttgttgtcggtcacggtcgcgtcgagcatgagcacggccttggccggggactggtaggcatcgagcttcgtcttggtgctgccgtccgtggagtcgaccacggcgtccttgatgccgacccatgtggtgccggcgtcgccggatgcaccactgtgcacagcgccgctgtcgtatgtgttgaccacgtcgaacagcttcacttcccaacgatcgagtccggtgttcagcgcatcgtctgccgtgttcttctgcgagaagatcttgttgccgtcctgtgcggaggtgcgggcctcaccggcgttcgcgaccgccttgcggtagatgcgataggtgttgtatgccttgccgccgttgccgtcatcgaccggtccgaggatgtcgctcatggtgttgaagtcccatacggacttgagtttggtgttcgagaacgggtcgaccagtccgctggcaccgcggatcgtgtcggcgtagaccatgtggtcgtctgccagcacgccctcgtcgttcagtccggcgaagccgcccgtgtagcctgtggaaagatccttcacaccgtcggtatcctgagttgcccctccgccaaacacgtcatagccactggcgatgcccgttacggtggactgttccacgcgagtacggttgcccttgatgagctggacggtcaggttgctgcccgatccatccatatcaatgccgtctttgctgcaaggcagtttgatgacactatcgccgatggtgacaatcgccacgtcggtctgctgctggttttcatcatcagccttggacagagcaacgctcaccttcagtccgaacaggttcacgtacagcacgttgccttccgaaagcaccttgagatcgaataccttgccgaagatggccgggaaccacttgcctaaatcgatgacgccgacctgttccgccttgtcgaggtacaggagcttgaccagcgcgttcaccacatgcagcagcagttccacaagtacagagttgaccttcgcgtcaaccaaataggcacggctggtttcaccgacgaatccgccggcaatctcaccgctagtgaccttcttgagattgtcagacgcgcagcccttcaccctggccagatccgcgtatccaacaaaaccgcctgcgacctcgcgtccggtagccttgtcggtggctttgccgtaattgtcgccatggtgtgtggcggtgacggtataaccgtccgggatgccgatgacgcgcgaatcgccaacgtgcgagccccagatgtcaagtacgccggccgtggcaccaagcagattgagcgcatctgtgccgagttgtgcattgtcggcggcgaccgtgccggatttgccaagatgcccgatgaagccgcccacgtagttcacgccggtcacactgttgaggttggtgaccgcagactgcttcacagagccattgatcagtccaccgccgaagccaccggccgcaccggtgtaacgcttcgagtcaagcatgcccttcgtggtggaatcatgggcgacgacttggatgccgtcgttcacgccgttgacctgaccgtcatagatgaaggtgcggaatgcttcgagcacgcccacgttgccgaccttgagcagtttgagcagcaggttggtattctgcttatcgccggcctcgccgccgccgacggaagcgacgctggacacatcggcaaggccgaagaagccgcccgcgtattgcccgccttcaacggcgcgcagcccggtgactgtaagtgcggctgggtcattgttcggatccgcttcactgccggtgcctttggcggaatccttgtcaccgaggatcgaggcctgcagcgagccggcgaaaccgccggcgttcagggcatacttggttgtggtgttacccttatcgtccttggtctcatatgcgccgtcgaccgtgtatccccatgccgggtcatccgagctcacatgcgcaccgcgaatcgtcgtaaccgtggcctgcaatacgctgaccagacttgccggggtcgagaccagcgagtcgaggattccttgcaggaatccctcggatgcgttggtgtccacatccgcgaccgcgccggcagtggccacgccgatgaatccgccgacattgttgcgcccttccaccttgcgcaggttggaaacattggcaccggcagcggtgacacccttgacaagcttctggccgttctggtcgagatcgccccagatctggccgccgaccgcgagacccacgtagccaccggcgttgccggtgccgtgcgtgatgtcttcgccggtggccacgaccttcatacccttgcggtagccggccacgctcgaggatttgatgactggcacgaatacctgtgccacgtcgagcatctgacccagatcaagtttgatgcctttgtcgccgaatagttggatggagccgaacgaggatgccgagccggattccatcgtgcccgcgtagccacctgccgcacgcatggcggagacggtcttgacgtccatcgactggccatcggtgatcgtgccggtgcgcatcaggccgacgtgtccgccggcgacgccggaatcatgcaggttcgcgccggtccgatactccgcacgtcctgcgacgacgttgaatccgaagatgtaggattcgaggaacttgtccagggaatcctgatcagtaacagagcccgcaccatcgcccgtagctacatcggtgaattccttgccatacgcaccgtacttgccgatgttgtcgacccacgtcttccactggtcgtagctcatattgcgcagcggaccggtgaccttcgtgtgctcctcggtcgggtagaccacggacagcacgccggcgaggttgccggccttgatgagaccgccaagcaaggagagcgaaccgccttcagcggtatcggccgcttccatgaagccggtgtaaccgccggcgatttcggcaccgtatacgctgcggatgcgcgcggcgtaggctacgcgccgcggcccgttgtatttgccgtcggtgttctcctgcttccatgctgctgtgttgttgccccagatatgaccgccacgattacgtcccgcatagccgccggccatgccgcggcgtgtggtcgtatccgatgccgcctgggcacgcaccgcgccgccgcacactgcggcatcggtcgagctgttgcgaatcgtcggtgtgaagtcctgcacgagcgagagcaggttgtcgaggttgacaagcttcttgagcacgctgccgtcgccaagcacgttcgccacggctcccggctgcatggcacccacgtaaccgccggccgaaacctggccgatgatgtatacgaactcatgagagctcgagtcctgaatatggccgccttcgatgtctccggcgaaaccaccagccatacccagtggatcgggctcattgttggcattcctatgatctgcggtgctggccagaacggagtatccgccgatgccgccagtcacatcggagtgttcaatcgtcgagacgacgacatccagcacactgagtacatcgttgagattgacgttctggccgagcagcctcaggccaccgcccacagctgccgccgagccgatgtccattttgccgatgtagccgccggcataccgagcggcggtgactgcatacgagctgtctttgctcagataggtgtcgtcgatggatccggcggtttccagattcttcggtgccttgacatcagtacggcgcagttgggtcacgctggaatgggacacctgcacaccggaaccgtagccgatgtagccgccggcggaaccggattgcgtatcggactgatcaaatcgggtggcggaaacggtgaagccgggatcatccgggtcggaaatcttgttaccgctagtggtctccacggtggtggcatcggaatgcacacccgcgtaggagatgaatggcacatagccctgcaccacctgcaacaggttggcgagatccaccgtaccgaatttgccgagcaaactcaggccgccgttgccagccgaagcgagcgcgccggaaacgaccttgccgccgaaaccacctgcgtatgcgccgccggtcacatggtcaaggttgacaacggccacggggttggtttgcacgcgggactgtacaccggccagcgttgagtcgttcttgagatcggtttcggagaactggttgaccttgccgctttggaagtttcccgcatagccgcccgcgatatcgccttcgacataaccgccgttgacgtatgtcacggtggtatccgtataacttggaatcagatacggtacggcaccgagcaggtcgttcacggacagcaggccgcctttgatcaggccatccaatacgctggaatcttctgcgttgctgagcgcgtcggcgaggccgccggtggtggagaagcccacgaaaccgcctgccacaccatcggacgtgctggtatcggctgtgaccgatttgaggtttgtcacatggctttcccgggtcttggtgctgttggcctgaccatagaaaccgcctgcagcgtaatcggttgtttcgttgttcttgttcttgccggttgccgcaaccgtgaatccgccagagatgccgttcacgttcgatgcagtgactgcaaccgaagaatattgggcaaccgatagcagaccagaaagcttgataagcccaagcacattgagaccgccagcgccgatggcgtcgcctggtccagagaagccaataaaaccgccggcttctcccctggccgagaccgtggccagattggtaaggttcgtgtgggtcacgtcgccgccggtggcgcatccgatggcaccgcctgcataatatgaaccagccgtcactgtcaggccggatgccggagcggtgacagacatgttctccacggtgaacgcggcaaactggtcgaacttcttgagcgtggcaatatcgccaattttcaccacactgttgagcaacccagctaccgttgtcggttgcagattgccggcgatgccacccgcgtaggagcccgtggccgtgaccgattcaaggccttctatggtggtggagcgctgctgagggaagtcacgatgattgttgtacttccagaatgtgagtttttgaaggcggttctgcgaggaatcaccgatcaccgtacccgatccttcgcccacgagaccgcccgcgtaatcgccaccagccttaacggtgagggagcccttcatctgcgtgccgagaatcacggagggattcacaccgacgatggacagcagttctcctgcaccgttattgctgccgctcagcaatttagtcacagccttggtgagctgtttcaacagcgatgccttcgtggtatcgtccgtaccgagttccaggccccatcccacggaggcgaatccggtgaatcctccggcgtgggatccgtcggcagtcacggcgaccgaagccgtaatcgaattattgaccgcataggcattggccatggcaccgttgaagccgccggcgtagtcttcggcctgcacggtgatcttatcgtcaccgtttatcgtcaggccactgttttcgatgaggctctgcggacgcagcgcagacagcaagtcgacgccaagcgagttaatcagaccgcctacgttgccgttgcgacttactccggcaaaaccaccggcatattgcgttgcccgcacggtgaaaccattcgtgctcgtcaccgaagagttctcaatgattgcaccaatctgcgcaccgacaaagccgccggcctgcgggttgtccttgttgccgatcaccacgttctttttgaacccgttcaccgaactattcgagataaccgggttgtagtagccaaccggaatcaaggcattcagcccgagcgtgccggacagcaaccagtccaccaaatcgcccagcccgaggaacgggatgacgttcagaatcttcgagagtacattggtgagcgctcctacgatgccggagactgcatcgtatcgggttgcgccctcaacatatcccacgaaaccaccggtcatacggcttacgctagataccgaaacatctgctacctcgcagtccgtaaccttggtgtccccgtagatacggccggcaaatgcacccgtggcgaggttggaaggatttttttcgtgcagggtgagcagaccttgaagattgaggtcaagatctacttgtccgaatgtcaatagttttaacgccttcaacagtgtgtcgagcagtaatcccactgccgaagtgagcataccgagcaaggtcggcggaatatacgattcactcgtatgattcgtcaccgacacatcctgcagcttgaggttcgacactacggccgtaccggcgctgcccagactgttgctgttcatcacggtcttgttcgtgatcgaggcgaagaagccgatgccctgctgcttgctgacatccagctggtcgcctttgacattagagaccatatctttctgattgacgaccacatggctgatgaccggccgagctgcggtagcgtgaaccacgcttgcgccatcggcaccaacagccttccacaggctggctgcggtgtcgccgtcattggagaccgcaccgagcatagtgccggagaacatgagcggagtccactcggtgttgttggtatctgccgcgttcttggacaggtcgatgtcacggaagatcaggtagttggcgtctgcggaataggtcaggccggtgttggcagcggagtagtccgtttgcgtgccatcagcacccacgccgtaatacttggtgcgggtctttccgacgtctaaccgcgtgctgcacagcagtggactgtcgtggtcggaggcatcagtatcgcgcaaagtatctgaaccggagagatcggcgtcaccggcgtattcggaagacggcgtgccgtcgtccacccactggtacttgccgagtccttgtcgcgtgcaagtctgcttgaccttgttgatgcggccaataaccttcttgccagaaccaatcgcacgcagctgctgctcgttaccaatcaggatgtaggtcttgccgttgatctccttggtgacctgaccctcaaagtcacggccgccaagcgccgtcgcggcgacctgcacattggccttcgccggcgattgatccgtcgcatttgaggaatcgttcttggcgtcttgagaagaagcatcgtttggagcctgcgtttgggctccatcattagcggaattgccagcggtagcttctgctgagtcgtccgccttattgtctgtcgcaccatttgaggattcggaagaatcaccagtagtagaagatgaaggagatgaatcctgctgtgcgtcttgattcgtttcggaaggtgttggcgcaccgtttgatgtatgggcctcttctgacgtcttattgtcaacgttgacattgcgagcagaaggagcagctacgacagtattacccccccccccggaaattacggcgttaggagagctactcacatcgtctatattctgagcatatgctgcaggcaccatgcacacgatggacaaggaaacagcaataaccgaagcaaggcaacgcttcaaggcatggcgctgccgtccagaattcctgtctgttcctccgttaaacccgcagcggacgaacttcgatttcgagcccattgtttcctctcatagattcgcaatccccttctcgggaggttactgcatacaattatacaagaagttggcctgttgtctaattgaaagtgcaacacccgttagattggagattgtccagataaccagtccgaagggatgttgcacctatggggaaagtatattcgcacctgtcggaagaggaacgccaggtcatccagatcgaggtcggcaacggcacgagtgtcaggaagatagcccgtttgctgggacgcggcccgtccggcatcagcagggagatcaggcgcaacacgtggttcccgtccaacgagagcgagtcctaccggccgtaccggccgaagcgtctgaagacgggcccgtggacgggccgctactacatcgccggccccgcgcagcgcaaggccgaccggcgcagggcgaagccgcgcaagccataccgcctgtcattcggccgcctgtggtcgcgggtggccgaatggccgggtagaggctggtcgccgctgccggtcagcggcatcatccgccgttgcctgcccaaacgcacgatcatcgaacccggtatggcaagagggctccaggagatcgtcgacgagaccgacaaccggcccatgcgcgtgctcggccaccgcacgcccgccgaggcattcgccgacgagctgctaaacttgcaagacaaacaaggatgttgcacttctaaatagacaacggggacaaaagaacaaaaacgttcatctgcgggggccggttagcgtatgtctttctgggcaaaaagaaaagccccgcaactacgcggggcttttccaacgaggccataagagaggaagagaatcgcctcgtttaatggttggcatgaccgaagtcataccaagtatctgctagttcctctactagttcagacgcagctcggtcgacggagcgaacaggtgcatcttggaggggtcgatcttgatcttgacggtctggccgatcttcggcagcgcacgcgggttcacacgaatcgtggtgagcttgttctggtcggacatcatcgtggatgcctcggcagcggagccatcggtgatgatggtgccgtagatgtagccgtcggagcccagatcctcgatgttctgaaccttcagcgagaaggcgttcggatcgtccggggtggccagggtggcatcctcgggacggaagccgacgacaatcttgccgccatcctcagcggtcagcttgttgacggcctcggcgggcaggtcgacggtgtcctcaccgatcttcgccttgccgttgacgaccgggtgagtgttgatgttcatcgacggggagccgatgaagccagcgacgaagacgttggccgggcgatcgtacagctcggtcggagcgccgacctgctgcaggacgccgagcttgatgacggcgatgcggtcgcccatcgtcagagcctcggtctgatcgtgggtcacgtacagggtggtgacgccgagctgacgctgcagggcagcgatctgcgtacgggtctgcacacggagcttggcgtcgaggttcgacagcggctcatccatgaggaagaccttcggctcacgaacgattgcacggcccatggccacgcgctgacgctgaccaccggacagagccttcggcttgcggtcgaggtactcggtcagatccaggatctcagcggccttctcgacgcgcttgcgaatctcttccttcggggtgccggcgatcttcagggcgaagcccatgttgtcggcgacggtcatgtgcgggtacagagcgtagttctggaagaccattgcgatgtcgcggtccttcggctgcatcgtggtgacatcattgccaccgatgaggatgcggcccttgttgacctcttccaggccggccagcatgcgcagagtcgtggacttaccgcagccagacgggccgaccagcaccaggaactcgccgtccttaatgtcaaggttcaaatcatccacagagggcttatcgttgcccgggtagatacgagtgacgtggtcgaa

SEQ ID NO: 2296 - DNA, 11819 bp, Unknown
  R119_18m  MAG No. k141_20084
gaacaatcccaatcccagtacggtgccgatgctcaaggccagccacaggccgtcaatgcctgcctgcagtccctcgcgacgacgacccgctcccagcagatgcgccacctgcgcagtggtcgagtaggccaggaatatgcacagtccgactgccgtgaggatgatggtcgatccgatggacagtccggccaaagcggcatcgccaatgtgaccgacgatggcggtgtcaataaggataaaagtcggttctgcgatgagctgcccaaaagtcggtagcgccaacgcaatgatttggcgatgaatgctggtggagttgctatgcacgctcacacgcatatcatgcttagctacgttgcgcaagcacctagtgcagccgtacaaagttatcctcagcttgtccaccaagttatccccagtatgtggataacttagtggattatccccagaattatccccaaaatgtggataactattttttctatccacatttgacgcttcagcgtgtcgccgcgctgaccgcaaggtgaaccaacgatgaaattggtgcgcgatgattcggcacgacttgcactttcatgcgttcattaggtcgattgtgcattcattaggtcggtggactttgagagatattgatcgagcgcctcagaatgccgccattccaagcgcatggtttgtggtgttaccaagcacagtgacctaatgagtgaggaatcgacctaatgaacgtagtcgtgcgatatcttccgctcgccacgccacctcctatacttgagggctatggcagaaggaagtgaacactcgtatcagaatgggttcggcagtggctcggatcgtggcgatcgtggcgaccgcgcgggccggggcggcgcgcaggcggcggcagctggcgacccgattttcgaccgcgtgcccccgcacgatgacgacgcggaaatggccgtgctcggcggcatgctgatgagtaaggatgccatcggcgaagtttcgcagaccattgacgtcaccgatttctaccagcccaagcaccagacgatctacaacgcaatcattgatctgttttccgccagccagccggtggacgtggtgctcgtggccaaccagctgttggcggacggcaacctcgacaaggtcggcggcgcggactatctgcacagcctcgtcgcatccgtaccgaccgccgccaatgccatgtactacgcggagatcgtccatcagcgggccattttgcgcaatgtgatcgccgccggcaccaaaatcgcccagctcggttattccgccgagggatcgcaggctgaggatgtggttaacctcgcccagtccgagatctacgagatgtcgatgggcaaggtgcgtcaggactatgccgccatcggcccggtggtccacgacgcgctcgaccagctggacaaactgcagcagggtctcgtcaacaagggcgtgccgaccggattccgcgacatcgacgacgtgacccagggcctgcagcccggacagatggtcgtcgtcgcaggacgtccggccatgggtaagtccacgctcggcatcgacttcgcccgcgccgccgcgttgcaccacaacatgacttccgtggtcttcagcttggagatgagcaaggtggagctcgctcagcgtattatctccgccgaaaccaatattccgatggccgccctgcgccgcgccgacgacatcacccccgaacgctggaacaccctgaaccagttctggaccaagatgcagaatgcgccactgttcattgacgacagcccgaacatgagcctcatggagatccgtgcgaaatgccgtcgtctgaagcagaccaacgatctgaaactcgtagtcatcgactacctgcagctgatgacctcgggcaaggccgtggaatcccgtcagcaagaggtgtccgaattctcccgtgccctgaagctcttggccaaggaactcgaagtgccggtcgtggccctttcccagctgaaccgtggcccggaaatgcgtaacgacaagaagccgcagctctccgacctgcgtgaatccggctcaatcgaacaggacgccgacgtggtgttcctggtccaccgccctgacttctacgacaaggaagaccgccccggcgaggccgatatcatcatggccaagcaccgtaacggcccgaccgaaaccttccacctcgccttcctcggtgccacgtccaaattcaaggacatgtcgcaggactacaacagcaatcagggggtgtgatgatggcaagcaacgtttcacgcgatgtttcgcaagaccaatcgtccgtggtgcagacccgcaaaccgtggtatgcgttcgccaccgtggccgcaggccgcttcgtgcggtttgcatcccgcgtcaccaaacatggcggttcggctttgcccggcaaagtcgtagaaaagattgaccccggcttcctgacccgtacgctcgggcagttgccgcttggcgtggtattggtgtccggcacgaacggcaagaccaccaccacccgcatggtcgcctcgatgctctccgatctgggattgaaggtgttcaccaatccgaccggctcgaacttcgtgcgcggcgtggtctccgcactgctcaccgaagtcactttcggcggcaaattggacgcggacatcgccgtactcgagctcgatgaggcgtacgccgtccacttcgtcaagcaggtcaagccccgttatgcgttgctgctgaacgtgatgcgcgatcagcttgaccgattcggtgaaatcgacaccacggccaaactgctcagccatgtggctgcggcgactaccggcactgtggtactgaaccgcgaggacccgcgtatcgccgcgctcgccgcgaaggccccggctggcaccacagtgcgatacttcggcctcgccgacgatttgcgccactatttcccgtccgatgacgacatggccacgaccgtgtcggtggaaggtatggccgggccgctcccttcagtcagtactcccctcagtccgcttcgcggacagctcccctcggagaggggagcttccgcaggcacggcagaactccccgccgacgtgacacttaccgccgtgggcgaccacaaggccaccttccagatggacagccaggactacgccaccgacgtcaaacttgaaggcgtctacaacctgtacaacgcggccgccgcgctcgccgtggtacgtgcggtgatgcaagacaatgccgccgcatccaaggccactgccgcagccaacgcctgcgccgtgtccgccgacgagctcatcgccgccgtttcccgcgtcacgccggctttcggccgtggcgaggtcatcgacgtcaacggttccccggtcgaactgctgctggtcaagaacccgatgggcttccgcctctcgctcgccagcttcgacccggccaacgcggacaccatgatcgccatcaacgacgaatatgccgacggccgcgacatgagctggctatgggacgtggacttcacctctttgcgcgcgtccggtgtcgccatggtctccggcgtgcgcgcctgggacatggcattgcgcttggggtatgaccaagtgccagtcgccgatacgaacaccgacctcgaacaggcggtcaccgcattcgtcaacgccaatcccggcacacgcaagcacatctactgcacctacaccgccatgctcaaaacccgcgccgtactgggccgcatcaccgaagtacgggacgctggcgtgggcaagtaaccaccctctagcgcccgcgcgccacctcccgcctgcaggaggacatggtgaggaataagacttccccttagcgggaagacatcgacaaggagaacgtgacatggccagaacaatcgatgtggtgtccctgtatcccaaagacatgaacatctacggcgattccggcaacgtgctgactatccgccgccggctggaactgtacggttacgaaccggtcgtccaccagtacaatcaaggcgacgactggcccgaccaggtggaccttattctgggaggcggcggccaagacaccggccagaagaaaatcatcgacgacttctaccatcgcgccgacctgctgcgctcgcttgccgcagacggtacgccgatgctgatgatctgcggcctgtaccagctgttcggcgagtactttgaaaccgtggacggcacccgtctggacggcatcggcgttatcggtgcttataccgtgggccagaacgtgcgtatgatcggcaatcttgttgagcattccgaccagttcggcgatgtgattggctacgagaaccactccggccagaccttcctgcgcgaaggcgttcagccactcggcaccgtcgatcaggacagccgaggcaacaatggcgaagatcataccgagggcgcgcgcgtgcacaacgtgatcggcacctacatgcacggctcgttgctgcctaaaaaccccgccatcagcgatttccttatcgaaaccgccgtgactcgtcgttacggtacgttcgatacgtccgatcagacccccgaacaagccaaggagctcgcccggctcgatcaagtagccaccaacgcgcgcaaggctgccgccgaacgtcctcggtgaattctcggtgagtcctcggtaagtaccaatcagcgaaaaatcagtcgaaatcagtctgagggtctagtacattgccctgttgtttgcgctaggcttggtggtacgagacatggcaccaggccatgtcggacctcgaaggaggggtatcatggctgattttgatcttctgggtgatggcctgcgcaaggtcctgctggcgggcatcggagcccttgccaccggatatgagaagagcagcgagctcgtcgacgaactcgtcaagaagggtgagattacggtcgagcagggcaaggcgctgaacaccgagctcaagcgcaaggtgagcgagacggtggatgacgccaagaaggccgccgccgaagccggcgacaaagctgctgccgcagccgacaccagtgccgccgacaagcccgccgacgagggcaaggccgagtgaccaagcccacacgcactacgccggaatcagggtcgaccccgctttccagcagggtcgaccctattctgacgcctgcgaaagccgaacgtgaggcggcggcgaaccggtccgtcgacacgccggacacgctcaagcgggccgttaccaaggcgactccgagcgtatccgacgaaacgctggcactgttcggacgcaggaacgatttcgccacgcgctaccatctgacgcgccgtggcaagatcaaacgattggggcagatcaccagaatcgtcgagcaattcgacgtgctgcacggcctgactccggtcaagatgcgcctcatgttcgaggcgctcggtcccacgttcgtcaaagtgggccagattctgtcgatgcgctccgagattctgccgcaaagcttctgcgacgaactcgccaaactgcgcgccgacgccgacccgatgccgtattccacggtgttggatgtgcttgccgccgaatacgggcgtcccgccgacgaggtgttcgcgcatatcgatcccaagccgttgggctctgcttcactggcgcaagtgcatcgcgccacgctgaaaaccggcgaagatgtggccattaaagtgcagcgcccgggtgtgcgcgaaatcatggcccaggacgtctccatcatgcgctccatagccaaggccgccactaaggtgattcgcacctcgcagatcgtggatctgaagggcgtggtcgaggagctgtgggacaccttcgaatcggagactgactttctgatcgaggcccgcaatctcgccgaattcaagcgtttcgccgcccgattcaaatacatggactgcccgacggtgtacgccgaactgtgcaccgagcatgtggtggtcatggagtacatcgacggcatctccgtctcccacccgggccagctcatcgacgccggttatgacttgaaggagatcggcaccaagctcgtcgacaattacgccacacagattctcgacgacggcttcttccacgccgacccacatcccggcaatatcctcatccggggcggccagatcgtacttatcgacctcggtatgaccggtcggctcgaccagcgcacccgtgcagtcctcaaagaaatgattttcgccgtcgccaaacaggattcgcccgctctggccgaggggctgctgcgatttgccggcaccgaggccgatccggaggactatcccgcgctattggccgatctggacgtgatcgtcaaggaattcggcaccgtggatctggccgaactggacattgccgctttcctgaccgcactgacgcagatggccggccgccacaacatcgaggtgcccagtacggtgaccaccgtcggccgcgcgttggttacgctcgaaggcttgctggacgagttcattcctgatgtgaatatgatcgaaatcatttccgaccatatcgccacgtcgaaatcgctgaagaacgccaccaaagacgagatcaagtcgctgggcgttgaggggcatcaggctttgcatgccacgctcggcaccatgaccgaactcaagaccgtggcccgtatgctgacccgtggtcagttgcgcgtcaacatggaactggtcggctccgaagagccgttccagctgctttcggatatggcgaatcgtctgacgatggccctgattgtggtcggtttgttcgttggctcgtcgattgtctactacgccggcatgaagccgattatctttggcattccggtcatcggcttcatgggctacgtcgtggccttcgcccttggcgtatggatcgtcatcgacatctacttaaagggccgcaaaaccaagaagcgatgaggcgccggcgcgacgccttcccgtatgggtatgatggagtgtcgattcaccggggagaacagcaatgacggcatacatggagcataaagacctcgcaaatgaggttatcgatcagtcgcgcgcgcgtgaaatcactgacggtgtgcatcgggtgcttgaccgcatcgccgaatccgaatcagtcgccgggcgtgaagccgggtcagtgcatctgctggccgccaccaaaacccgtgatgtaggggagattctggctgcaatcgatgctggtgttcatagaatcggcgaaaaccggccgcaggagattgtcgtcaaagcgccgggactggcccggctgctggccgaacgcgggtattcattgggcgtggttgagaccgagggaggtgccgcggccgatgctgcccaccacattcccttccacctcatcggccagttgcaagccaataaaatcggcaaggtgctgccggcggtggacaccatcgaatccgtggattccatcgaactggcggagaagatcgcccgccgtgccaccatgcgcggcatcacggtcggcgtgttgctggaggtgaacgaatccggcgaggaatcgaagtccggctgcgcacccagccacgccatcgacttggctcagcgcatcggtgcgatgggcggactgcacttgcagggattgatgactattggtgcccatgtggatgatgagcgcacgattcgtgcgggcttcgcgcatctgcgccgcacgcgcgaccagattattgcctccggtgccgaaggcacggccgactgcaccgaactgtcaatgggcatgacccacgacatggcctacgccatcgaagaaggctccaccattgtgcgcgtcggcaccgccatcttcggcgagcgcgctttcatctgattggagctatacgaaaaaacgccgcttgatcaatagacgggtgtccgtaaaacagttgatcctccgtatggcttagaccatgcggaggatttgtttatgtctaatcttcaaacttgctggcggcaaacggtttgtcaaaaccgtttgcggacggcaagtccacaggggatagccgctttagcagcgcaagggggtgtagccaccttgacggaaggtcgtgacgcaacattctcggtcatgcagtatcctcctgctgacggagaatgaagcgacccaggacgcacatattcccgataggagagtatagaagtgcgccctttagttcctaaagggatttgctccgcttaacttctcgacaaatcggaattttcaaattagtctttgcaaataacctttgaatcttcaccatcaattacaattccctgacggttgttaattgggtatagattcaaatccgaaaactcagtcattattttctcagtaactttcttaaatggtgctgtaagataatgcggaagaacatagaaatcaatcaaatcaagccctgcatcatcttcttgtgagtagtcctctggcttttcatccatttgctcgatatattggatgcttggagcgcatataattgcgcctgccgactcaccgatcatcaattttccatttgccaattcctttttcagtagtccatcagttcccgttttacggagctggtccataagaaagaaagaatttccgccggtaaaatatatcacatctgcttcttcaaaaacagactgtatcgttgaataagcctccgttgaaatatcaatttcagttacgattgctctcaactttttgaataattttcgagccgagccgacataaccggtgtagccttcacgcagtgaagctgttggaataaatgcgactttcttattttcaatttcttcctttatcagacttcctacacttgaaaagtgtgaacataaaaatagtttcatcaatattcttctttataaattccgatttgtttctcaattttcgtattcaaattataccataaaattgtgaataattctaccgtcattttggactgtatgagaaaagtccggacagttttctgcccggacttttctcactcaatcataaatcaattccgctttcacaatctcctctgcctgtgccttgcaagcgttcatctgccgcacccattccatttggttttcggctttcagttgctcggtcacgccgttttgctctgccagtgaccgcacgatcagctccatgcggtttcgtgccgcttcgtcgatcttggcgcaatactgtcttacgtacacccagctatagtcaagcggcgttttttcgtaaggattttcggcgtatcaatcacgcatagatattgcgcggacgcatgtcctcgggcaggccgtcgagcagaatcgccacggaaccttcctcgaacacggagcgaatacccgcggccagcagcggtgcgcaagacagtacggtcatattcggcaggcgcttctcttcgggaatcggcacggtgtccataaacacgatttcatgcgcgccgcagtgagacaggcgctccacggccgggccggagagcaggccatgggtggcgaccagcgtcaccgacttggcgccggattcgttcagggtgcgcacggcttcgcagatagtaccggcggtatcgaccatgtcgtcgatgaccacgcagtcgcggccgtcgacatcgccgataatgccatgtgcctcggcatggttcggacgagtaatatcacgctgtttgtggatgaatgccagcggcagattgcctagcttggcggcccactgttcggacaccttgatacggccggcatccggggacacgatggtggtgttgcccagatcaagggtggaacgcacgtaatcgagcagcaccggcatggcggttagatgatcgaccggaccatcgaagaaaccctgctcctgagcggcgtgcagatcgaccgtcataatgcggtctgcaccggcggcgtggaacagatcgaaaatcagacgggcggtgatgggctcacgaccgcggtgcttcttatcctggcgcgagtagccgaggaagggcgccaccacggtaatcgacttggcggaggcgcgcttcaaagcgtcgatcatgatgagctgttccatgatccacttgttgatatcgcccgaatgacactgcagcacgaacacgtccgcaccacgcaccggttcggtgaaacgcacgtacatctcgccattggcaaagtcataggacgtggtttcgaggatttcggttcccaagcattcggccaccttctcagctagctcggggtaggcgcggcccgtgaccaatacgagtcgtttatccggagtgccttcaagaatcgccgacatgcgttcgcatcctttgtttgagtcgctgtgtgatttacgccttaaccagtgtacaagcaccccgccgcagcgaacgccacggcggggtgcctatttcgtaagagtgttgagattgccgaaattattcggagaactcgacactgaccttattgtctttgatggtgaaggtgccgtacaccgagaaagtgctggaatcgtcttccggttcccagccatcgctgtaacggtactcgtaattcgccgtcacatcaccttcgtcggtgctgaacgagctatccgacaggctcacgctggtgaccttcggataaccgtcaatcgtccacttgaagttgcggtatcggctggaattggaggtgtagtagccgaacgggcagccctgcggttccgcatcggtggaagccgcgcattcatccagcttgctcttcaccgccgtgtcgatttccgacgtcaacttgtccgtaggctgagcgtcaagagtgccgctatcggagctgttggtgctcagagacacggtcttggcggtgtaatagtcggacttcaccacgccaactttgtagacgccggggtacaccttgagccggtagttgccggtttcgtccgcgtcgttgttcacggcgttcttgggcgttacggtcacgccattgacggtgatgctgcccagcgagcttggcgcatataccgaaatggtcttgaccaacggttcggcgacggtccagttcttgaagatcaggaacttgctgccgttggccaccatcttgatggaatcgccggtgacctccttgccttcaagcgtgtacgtcagctgggcgctcacggtgccatcggcattgttggaagtctgcgagatgcgcgcgttggtgatgtgcgtgttctcgcccgaggatgccttgctggtcagcagtgcgcgctggttcgtatccacgtgaggatcggcgatggtgttggccttgtcgtagtcgccggaggagatggcggccacatagctgttcgccacgctcttcgcgctgaacacggcggaagacagcacgccatacacgataccgaacagtacgaggaagccggccacggcaccaacgatgatgaagatcttcttctgctgctcattcatggtggtggaggtcgcgccaggtgcggctaccggtgccgctccgggagtggtgggagccgcggttgcgaatgtggtgcccggagcaccgggggttgcaggggcggccggagcacccggggcagcgggcgcgggtacaccgacaccagcaacaggaggctggccggcggacgtcggcgtgacgttgacgtgaggctgcgcagcgtttgcgcccgtacccacgccggcgcttggcgtgccccacgtgggccacttgccgaccattgcgccgctggcatagatgtagtcgaccacaggctgaggcgtggcacgcacagtgccgcctacaagtagggcccgcagtcccggcatggaaaccaccatggtcgggccgaacgtcagtgcaacgacctcaaccaggaatgcccacaggcccatgaccaggaagtaccacatggcaggtccggtggtctgaacttgcgtgacggaggtgcggttgcccatagtacccatcagcagcgtggcaatcgcccagaacaccatgatggcgatcggggctttccagcagtgctgccagcccatgtaggcacggtcgtacaggttgcgtgcggagacgcgcaatgccgtgtagaaggtgaggac

SEQ ID NO: 2297 - DNA, 62719 bp, Unknown
  R119_18m  MAG No. k141_20121
acgcaccgcactcgcactgctcacctatatcgaagaggacgccgagggattccaggtgctggcgcgcgactcgcccagcaccgaaccgtccggctcgttcagctcactgctgggagacatcgccgtgcgcgtcgaagacattctttccgaaacattcaaacggcagaaactgtccgccaagggcgtgccgtactacgcgcagatgctggtgggcatgaccgtgttcaccggacagtactgggccgaccgaccaaaggtgagcaaggagcagctggccgcatacattgtggatttggcctggcatggcctgagccggcttgactccaagccccagttgttctttgagggggccaaggcgcggaaggaggccgagcgccgagccaagcgcgagtccgattccggcggtccggattcagaccagacaagttctgcccaatcggattccgatcgagccaccggggaagattcagggttgcagaatacgagttcaggggcacaggttgcgcaacactctgccgagtcgggagacgaagtgctacggtttgaacaggaaactgaacataacgactaaatatgtgaggacgtaagactttcatggccagcacggcaaagacgctcacctttgtgatccccgcatacaatatggagtcctatctcgaccgttgcgtgaactcgctgctttcggcgaacgacacccgcgacctcgaagtgctgattgtggacgacggttcgaaagacggcacgctggagtacgcgcgcaaactggaacgcaccaatccaggtgtcgtgcgcgcgattcaccaggagaacaaaggccacggcggcgcagtgaacaccggtatcacggcggcgaccggcatgtatgtcaaggtggtggatgcggatgattgggtcgacccgcaggccatcgacacggttctggccacgttgcgcgcgcaacgtgaggccagcgagccgatcgacatgctggtgaccaactatgtgtatgacaaagtgaccaagcgccacaagatcgtggtgaacttccgtcatgtgatggaggccggccgcgtgctcggctgggatgacctgggcaagttcggtctggcgcagtacatcatcatgcatgcgctcactttccgcacgcaggtggtgcgcgattccgggctgaagctgccggagcatacgttctacgtcgatttctattactcgtaccagccgttcccgtgggtgaagcgcatccagtatctcgacgtgccgttctaccactacttcatcgggcgcgagggtcagagcgtgcagaccgacgtgatgattaagcgtgtggatcagctgcggctcgtcaatcggctgatgaccgaggccacgcccgaacgtggtacggtgccggaggggctgtaccggtacatgattcacttcctgacgatcgaatcatgcgttacctcggcgttcctgattctctcgcgcgatccggccaactacgttaagaaaaccgagctgtgggatgcgattgacgcctattctccggccatcggcaaggatgtgcgctcgaagctgatgtcccgcgcgctcaatctgcctggtaaaaccggccgctggatcgtgcgcaacggctatctcatcgccgaacacatcgtcggcttcaactgattcggattgcggctttgccctgctgacgcgttatcagcagggcatccctattacctccccagccgaggtcttgctactcggcccaacggtcggacattgcgaagctgttgtgcatcaggttgctggaggtgtatagcacgtcgttcagcagcttggttgtatgctcgcgcaggtagtcggccatctcgtcgttggccgcttcgagcacatccgccacgccctgcacatccttctcatcgccgtggccgccatcgagcggccatgcattcgtacccgtcgattcggcatcgcttcgagcaagcaactgctcatccgtgcgctcgatgagccggtgcccgaacgcgcgcacgccttccgcatagccctcgatgaaccggttcgtctcataccaatgcgcgtcggccacgacggcgatcaggcggttcgtccaatacaggttgccggtggagacttcgggcgtggtgtcgcgcaggtaggcaggcgtgtcgttgacgttcgcgtagaacggcgcggcggcggtgaacggaccggagccgaacgatacccacatcaccgtgcgattggccgccggcacatacgggcggacctgaatcgccaccatatggccggtgcggttcacgccgatcggacggtaacggtggcgcgattccgccgtgccggtcgtgccgtacgggtcgtacggcgtgccttcgaagtgcgaggacagcaggaaatcaacgtcttcgaggctcaccttgtcttccggcacgcggcaccacgggatgtcgtcggattcgggcgtgtagcgggcggccggcgaatcccagtcctcgctggggttgaggcggcgttgcatgtaccaggcacgcggcgtgttgtagatatggtccttcggcgtcgcggcgccgaaggccttgcgcgggttgaagcgggtgggaagggcaacggttgttccgaatccggcgctatgcacgtgacggccgttggaagagaccgacgttcccattgtgcggtcaaggtgatgcgtggccatgaactcgcgcaggtcggcgctgcataggtattcgcgctgctcgccgaacgcatcggcgaggtcgaagtcgtcgatgccgagctggttggggatcgtggcatagcagtcgtcgggcactcggcgggcgatccaatgatggccgccgatggtctcgacgtaccagatctcgtccgcatccgaaataatcacgccgttcgattcgtaggtgccgtaggtttcgagcagttcgcccaaccgcgcgacgccctcgcgcgcggtggtgacgtacggcagcacaagggtgatgatgtcttcctcaccgataccgccgggctgctcggcctgataatcggtgctgtccggcccgccgacagccggccgcaactcgaccatcgggtctgcaccgagcacgcgctcgttgacagcgatggtttcggtggcgctcatcgccacgttgtgttcgttggcaccggcttcggccagaatgccacgattattcagcacgttcggtgcgatggtgtaccggcaaggattgtccggtagttcgatttcgacatggctcagcacgctgcggtagtggcgcggctggtcgtcgggggcgacggcgacgaagcgcttgggatcgtaacggcccgagcccgaatcgtcatcgcgggcgatgatggtggaaccgtcgtaactggcatttttgccgacaagaatcgtggtgcatgacatggggcaccactctaggagctaggctggtcgaaacaaaaaatccttggaaccattgcgattccaaggatttgttgtgccccctgtgggattcgaacccacaacccacgacttaaaaggacgctgctctaaccgttgagctaaaggggcaactcttctaaaatacacaccgttttgggatatttcaactacggcgttgcgtacacgtttgcgtacgcgattggcccaacgcacggcacagcacacgcaatgtggcccaaatcgcagcccaaatcgcatatcgcctctagcgatagatagccgccggcggctacccttgtacattatgagtgaatcccccaattggagcaatcccctgcgcgattcgcgcgacctcagactgccccgtatcgccggcccgtgcagcctcgtcattttcggtgtcacgggcgatctggcacaaaagaaactgctgccggccgtctacgacctggcgaaccgtggcctactgccgccgagcttcggcctgaccggcttcgcccgccgagactggacacaggagcggttcatcgaattcgtcaaggccgccgtccgggcgcattgccgtacgccgttcaaggagtcgacttggcgcaatctggccgccggcatccgcttcgtgcagggtacgttcgacgatccggaggccttcgagcgtctgagcgccaccgtgcaggagcttgaccgcgaccgcggcacgcagggtaaccatgccttctacatgtcggtgccgccgcgcgccttcccgcaggttgccaagcagttggccgcctccggcctgtcgcgctcgtccgagggcgcatggcgccgcgtgatcatcgagaagccgttcggccatgatctggccagcgccaaggaactcgacagcgtggtatccgaagtgttcgacccgagctccgtgttccgcatcgaccactacctcggcaaggaaaccgtgcagaacctgctggccctgcgtttcgccaacgccatgtacgagccgatctggaacgccaactatgtggaccacgtgcagatcacgatggccgaggacatcggcatcggcggccgcgccggctattacgacggcatcggcgccgcacgcgacgtcatccagaaccacctgcttcagctcatggctctgaccgccatggaggagccggtgagcttcaccgccaaggacctgaccgccgaaaagaccaaggtgctttccgccgtgcgcctgcccaaggacctcgccgccaacaccgcgcgcggtcagtacgccaagggctggcagggctcgcacgaagtggtcggctacttggaagaaaaaggcatcgaccccaagagcaccactgaaacgtacgccgccatccgcctcgatatcgacacccgccgctgggctggcgtgccgttctacctgcgttgcggcaagcgcctcggcaagcgtgtaaccgaaatcgccgtggcgttcaagcgcgccccgcatctgccgttcgagcagaccgccgtgcgcgaactcggcaagaacgccatcgtgattcgcgtgcagcccgacgagggcgttaccatgcgcttcggagccaaggtgccgggcggctccaccatggaggtccgtgacgtgaacatggacttcagctacggccgctccttcaccgagaactcgccggaagcctatgagcgactgattctggacgtgctgctcggtgatccgccgttgttcccgaccaccgaagaggtgaacctcagctgggagatcctcgatccgattgaacaattctggtccacgcttggccagccgcaggcctaccgcgccggtacgtggggtccggcacaggccgacgaaatgctggcgcgcgacggccgccactggaggatgccatgatcatcgatatgccgaacacccgcacccgcgagattgcgcacaaaatcgaacagctgcacgaggagcgcggcgaatcggcgaccggccgcgtgctgacgctactcatcgccaccgaggacgcggacctagagcatgcgctggaaatcgcgaactcggccagccgtgagcacccgtgccgcgtgattgccgtagtaccggatgccaatcctgccgatcagtccggcgaaggcgaaccgaacgagaccgaagtggccgccgaggtgagcgcgaatcgcgataatccggccgtcgatttgaccgacggcccgaacgatccgaacgattccaatctgaacgcccaagtgcgattcggcgcggacgccggtgccggtgagattatcatcttgcgtccgcgcggtggccttatcaaccacccggatacgctggttatcccgctgcttgtgccggatgcgcctgtagtggcgtggtggccgaccacaccgccgtcgaacccggccaaggatctgatgggtgcgatggcccgcagtcgcatcaccgacgcgctgcactccaataatccggaggccacgatcgagcgtttgcgccgcaattggacaccggaagacatcgacttgtcctggacacgactgaccgtctggcgcgcaatgctcgcctcgatgctcgatcagccgccgcacctgcccatcaccgccgtgaaggtgaccggcaaggccgacttcctgcctctggaaatgctgtgcgcatggctgcgtctgaaactcggcgtaccagtcgaaactgagttcgtgcccgacgcgcaggccgtgaccggcgtgtacctgacccgtgaggacggtgtgatctcactggaacgcccgtatgaggaccaagcgctgatctcgctgcccggccagactccgcaggaagtgtccgtgccgatgcgcaccatcgaggactgtctgaccgaggaactgcgccgcatcgatcccgatgagatctacgccgaggtcatcaacgaaggctgggatctgattcgtcactgaagtcggtagaaccgttgccacagcggcgttggcatgagttcggcaattgtggtcgagccatgccaacgccgttgctcatcgtttcctacctcatgcgatgccgaagctcatgaccgcggagtaataaagtgacatatgcgatgtcgcacaatgtacattgtgttgtcaactgacaacacatttcattgctgcaaatggctggattcccggcatgccacccgtattatgcgttgtcaactgacaacacaatccacattgcaaagtacgacacataccccatataaggaccatacatggcaactcgaaaactcattgtgtatccgaataaagatctgatgattcaggctggcgcgcaacgttttgtcttggcgctactcgatttgctcgccgaacgattgcctgatggcacgcatcgcacacgtgtggatgtggcgctgtctggcggttcggccgcacagccgttgggtttggcgctgaacgatccactggctgatgcggttgattggtcgcgcgtgcatttctggtggagcgacgaacgttttgtgccggcttacgacaccgatcgcaatgctctggaggcccgtcgcctgctgcttgaccagctggtggcggatggcaagctgcctgaatcgaatattcatgagatggcggccgatacccgttcagccgatgacatcgccgatgtgatggatcaggccgatagtgatgacgcttccgttcgcgccgccgccgatgccgcgaatgatgcgctgctggacgatgccgcgagcgactatgagcgcgagttggtgaatgaattggggccggaaccggtcatcgatctgatgattctcggcatgggaccggacggtcactatgcgtcgctgttcccgggtcatgatgaggtcaaggttaccgataggctcaccgtgggtgtgaaccactcccccaagatgccgccgttgcgcgtctcgttgaccgcgccgctgattgcccgctcgcgccgtacatggttcttcgccgccggtgccggcaaagccgaatcgctggcccatgtcttcgagcggcccaacaacccggattacccgtcctcctacgccaacggagtggacgagttcacctggttctccaccgaagaaaccgtcaccgagttgtgagtgaattaagccccctctgatgagggggcttaattcgtctatggctacgcctcgatctcaggcttgctgttttctcagctcggctatcgccgagcctgaagaaggccggacagcccacagggctgtcctaaacctgaaaccacgaggctacgcctcgatttcaggcttgccttcttcagcccacagcgtgtggaacacgccgggcttgtcgacgcggccgtaggtgtgggcaccgaagaagtcacgctgggactgggtcagggcggtgggcagacgcttggagcgcagaccatcgtagtacgccagggagctggagaacaccggggtcgggataccggcctccacggcacgcacgattacacgacgccatgcatcctgcgattcgccgatgatcttctcgaagtacggatcgaacaacagggaagccggcaaattatcgcccttgaaggcctcggtgatgcggtcgagcaggaactgggcgcgaataatgcagccgccacgccaaatgcgggccacttcggacaggttgatatcccagccgtattccttagcaccgtcctgaatctcgttcaggccctgagcataggccacgaccttggaagcgaacagagccttgcgcacgtcctcgacgaacgcggccttgtcttctccggccagatcgatggtcttgttcgggccagccagaccttctttctgagcgtcttcacgcagctcaccgtgcgaagacagtgcacgagtgaacacggcttcaccgatagcagccacaggagaaccaaattccagaccagcctgcacggtccaagtaccagtacccttcatgccggcatgatccacgaccacgtccacgaacggcttgccggtctcggcatccttgtggtgcagaatctcagcggtgatctcgatcaggtaggagtcaaggtcgcccttgttccattcagcgaacacgtcgccaatctcctcggtatccatgccgagtccacggcgcagaatgtcatacgcctcaccaatcacctgcatatcggcatactcgatgccgttgtgcaccatcttgacaaagtgaccggcaccatcggtgccgatgtgggtcacgcacggttcgccgttcaccttggcggcgatggactgaagaatcgggcccaaggtcttccaggattccgcagtgccaccaggcatcagagacgggccgttgagcgcgccttcctcaccaccggacacgccgcaacccacgaagtggaagcccttggcacgtacttccttctcacgcttgatggtgtccttgaagaaggagttgccaccgtcgacgatgatgtcgcccggttcgaacacctcttccagctgcgcgatagttgcgtcggtcggagcaccggccttgaccatgatgatggcggtacgcggacgcttcagggacgcggcgaattcctcgagcgtttcggccggcacgaagttgccttcggcgccatgctcgttcatgagcttctcggtacgcgagtagtgacggttgaacaacgccaccgtgttgccatggtgcgccagattacgcgccagattggagcccatcgtggccagtccaatcacaccaatgtttgctgtagcttcggccatgtgccttgcctttcgtttgattgtcccatcgtcatcacgcgcgtcacaaaacagcgcatcagcggagggaatcattccttcaacgctcgaaagtgtatcccacttaccacccacacgcgaaggctgtcttaggttctacgcaccttctgcccgcgaagcgtaattacttgccagccattcacatacgcccggccttggaagggtcgatatgcatggtctggaagcgattggccatgtaagcgtcgctgtagcgttcgctgaaccacatcgcgaccggtgaatcctgcggctggccggccatgcgcccataccagcaatccaaggccatcagcgtgaaggcaatgtcgatcaccatcagcaccgtgcataccgcagtcagcgaataccgtactttccatggaatgcgattaatcagagccagcagtcgcggcaacagccacttgacccacaccacaccaatcagtccccagaagaacatgaattggcccgaagtacgtccgtcgatggacagccaacggccggtgtaatcccacgcggtaataccgaacgccacttccatgaaccagctggtgcagtattcgaacgcgccgccgatcaccgccgaagcgcagaagatcaagaacggattcgccttccacaggcgattcaggcacacggttaccaataccgcaccacagccgtaaatcggcgagaacgggccccacagcaaacccgcgcggtcctgaagttcaccgttatacagcgccatatggtagatcgtctccataatcaggccacccaccgaagcgatggtaaacagccagaagatattgaagaagtccagtgcaatatagcccttgccagattggtcgcggcccagcatgccggccgccaccgccgattcataatcatcgcgatcgtccatgcgtttgagcgcgcgctgcaaacggcgttcctcgctcagggagggatcggcggtcaccgaaatcacgacgagaataatcatctgaatcagcggcagcagcaggttgaagccaaggccggtcagggccagcgacagcatgccgtcggccaacgtcaacggcatcagcacgtaggtccagcgcgcggcataccggcgatgattgcgcagcagcatcacgccgaacacaatcaggcatgcggcactgactaccagcacaaccgcatgaatcgcggacaggatgaaagtcaggctcatcgcatcgacgtgcacatgaccatccagaatctcgcgcacggcatagaggatggaaatcaccataatcggcaatgtggcgagtccgtccagcagcacgaccgcgccatagatgcgcgccagaatcggtaatcgcttggcgttcaggttcaagccggcgtcgtccagttcgacggccaccagatcagccacgactgcggactcggcgtcacggttctcccgcggcttgccaggggtagtggccgtgccatcgtccttgaattcaaccatggtttcctccccacatagcgtccccttacactatcacccgattgcagttttgccgaacttgatggatagccggtacatgtctgtctacattgccggacaccgagcccgctcgctttcaggaaacatccaaaaaccatccagaaatcttgtcaataagttccagaacgcctttcgctccagccaaggcactgatggccagtccggcaccggcagcagctccggcacaggttctgatacttccggtaactccaactccgaccagtcatccagccagaacgagcagtcggccattgatggtcaatccggcaccatcgaaagctgatacaacggtttacccatggggcggtagctctctcatgaggcggtaattaccccatggggcggttagcccaaaaccgcattccgcggaataaagccattttaagccaccgccccatgggaattttaccgccccatgggccacttaccacccaatgaaggttttaccgccccatggagggcagcctcacaccaacacacacagcacacccggccacacagcaccccagccacaaaaaattaggcacactgcccagcgacacacgataagccgctgggcagcggcgttattccgccaaaaccatcatcaatcaccccaataatctccggcagccgtattacgctactacaaccgtagcgctacgattaacgtatcgctacggaaaacgtagcaatcaagcaacaccaagctccggaggtatcagtgggcaatatcttcaaggtcctcaaacgcgacttcctgcgcctgttcaaggtgccggccgcatgggtgatcctgttcggcatggtgtttatcccgccactgtattcgtggtacaacatcgtcggcttctgggacccgtacggcaataccaaaggcatcaccgtcgccatcgccaacaatgacgacggcaccgacaacgcgctcatcggcaagcaaaacctcggcgatcaaatcgtcaagcagctgaaaagcaacgaccagctcggctggaccttcgtcaccgaagccgaggccatggaccaggtggaatccggcaaggcatacgcagccatcatcatccccaaagacttttccgacgatctcgccggcgtggtgaccggcggcaagagtcggcccactctggagtattacgtcaacgaaaaagccagcgccatcgcccccaaagtcaccgatgtaggcgcgtccactgtggaccgcacggtcaattccacattcgtctccaccgtatccgaagtacttaccgaagtcatcaatacggttggcggcaaagccatcagcaccgaagacaccaccaaagccaaggccctcacggcccttgccgaggcctccggcgacgtgcagcacacacgcagcaccatcgccaagctcaccaccaaactcaccgataccccggagcagacacgcaccgcacgtcaggcgctggacgacgcgcgcgcacttggcatcgacaccgcggaaggtctggccggcgtctccaccctgatcggcactacccaagccagtctgaacggcttcgtcacctccacgtccgaagcgcttgaccaaggctcaagcctgctgagccaggccgcagcacaggccaaccaaagcgtgggcacggtagccggaaccatcagcgccgccaatcagcaggtaggcggactgatcaatacggcggaagacatcaaccaagcgaacgccgacatcatcgaccaactcaaagggctgccgaacgccgatcgagaaccgctgcaatccgccattgccacactggaaagccacaatagcgagcttgccggcgcactgggcaacctcgatagcctgaacaccactatcggcaacgcctccacagacaccgccggattggcgcagcatctcaataccgccacccaaaccacggtgcgcgaggccaataccgctcgcggcaccatcacctccggcgccattcctcagctcaacaccggcctcaacaccctcagctcgaccgccaacactctgtcgaccggcatcacgtcgcaaggctcactcatcgatcagtcgaagagcaccctcgatcaactcgacaaagccgcctccaccacggtgaccgccctgcacgacaccgataaggcgctggccggcatgcaaaccaagctcgaaacgctgaccaccgacatcaaagccctgagcatctccagttcactcagttccctgatcggcaccgacggcaaactggatgccgccacaatcgccgacttcatgctctcccccactgttatcagcgaacgggccgtctacccggtcgcctcctatggttccggcatggcaccgctgttcaccaccctgtctttgtgggtgggcgcgttcgtgctcgtggtcattcccaaactcgaaaccgacgacgagggcatcgacgatctcacgccaacccaaggctatctcggccgtttcctgctgctggccacgctggctgccgtccaaggcctggtcacggccatcggcgatcttgtcatcggcattcaatgcgcgagcgccccggtgtttctgctcacctgcgtcatcacctcactggtgtatatgtcggtgattttcgccctctccaccacgttcatgcacgtgggcaaaggcgtgtgcgtggcgctggtcattctgcaggtgccgggcgcctccggcctgtacccgattgaaatgatgcccgcgttcttccgcgccatctatccgctgctgccgttcacctattcgattgacgcaatgcgtgaaaccatcggcggcttctacgacggcctctggttcgcctatatcggcaaattgctggttttcgcggttctggcctttgtgcttggcctcggcgcccggccgaaactggccaatctcaaccgcctgttcgcgcgggaaatcaaggaaagcgacatgattatcggcgagccggtgcacctgcccggcagcgaataccgtgtcactcaggccattgcggcactggccgaccgcgacgaataccgtcatgccatcgaacgtcgggccgccaaattcgcctaccagtatccccggctgctgctgggtgcgcttatcgccggattcatggtgccggccgcgctcattatcgtgtttgtgctgaccaccagcgagaaaatcgtggtcatgggcacatggctggcatgggtgctcatcatcatgggcttcctgatggtcgtggaattcatgcgcgattccatccgccgccaaaccgagctcggcaacctttccgacgagtcgatccgcgccatgctgtacgggcataaggccaagcgtcgcgacacctccgccgaacgccacgaagaagcggacccgagcgccgccgttaccgcaatcatccccactattccgccgaccaaggaaggcaggcacgcacgatgaacaccatgtggaaactatttaccggcgacatcaaacgcctgaccagcaacgtggtctccatcatcatcgtgatcggcttggtgatgattcccggcctgttcacctggttcaacgtggccgcatgctgggacccgttctcgaatatgaagaacctgaaattcgcggtggcgaatgtggatgaggggtatcgttccgacctgatcccgatgaaagtcacggtcggtgatcaggtggtgaacgcgctgcgcgccaacagtcagctcgattggacgatcacgtccaaagccgatgccgtcgagggcgcacgatccggcaaatactacgcggccatcgtaattccgaagtcgttcagcaaagacatgatgaccttcttctccgacgatgtgcagcatgccgaactgacctattaccgcaacgagaagaagaacgcgctggcaccgaatctgctcaacgagggcacggacgaggtggcggcggaaatcaacaccacgttcgccaagaccatcacttcggcagggctggaaatcgcgtcttcgctggccgatcagctgtccaagcccgaggccaaagagcaactgaataccttcaacgccaatatcgccgatttcgccacacggcttgacgatacggcggatttgcttggcacatacagcgcattgaccgatacggccggcgccttgcttgacacctcgaactcgctgatcactcaggtttcctctgccgccaaacaaggaggcaaggatctcgccagcgccaagcagggagtcaccgacgtggtcggagccctgggcaccaccgctgacgcgatgagcagctcactggacgcgagcgcctccagtttcggcgcggtgtccgattccatagacaagctgtattccgacgcgaatgatggtgccaccacggccgccgacgaattggaccgtcaagccacggccattggcaagcagacggagaaatacactgaaattcgcaacacgttggccggcatactgggcaacgactcatccatcatcacggcgattgaccgttcaatcgcacggcagaacaggctgcggcaagcgctgaatacggcggcgaccaatattcgccaaggtaatcagaacgcgcaggatcagcatgcgcaggtcaaggatctggccgatcaagcgcagaacagtatcgccaatatcaagtcggatttcacggccacggtgaaaccgcaaatcgactccctgtcgtccaccgtctctgacgcctccggcatactgagttccggcgccacccagttggactccacgctcggcgacctgaaaaggacttccgacgacgccagcgatatgctcagcgacgctcgcaccaccttgggcaaggtgtccggcaaactgcgttccgccggtgccgaactggcttcgttcaacagcacactgagcgacgcactaaacagtggcgatatgagcatggtcaaagaggtgctgggcaatgatcccgaaacgctggccagtacgttggccgcgccggtgcagctcaggcgcaaggccgtattcccggtggcgaatttcggttcgtcgatggcgccgttctacacgctgctgccgttgtgggtgggcgcgctgctgatggtggtgacgctgaaaaccaccgtgtctcgccggacacgcaaagcattgggcgagccgcggccgcatcggctcttccttgggcattacggggtgttcgcgctgattgcgctgctgcaatccacggtgtcgctcggtggcgatctgctgttcctgcgcgtgcaggccgcgcatccgctgctgtttatgttgtccggatggctggcctcgctggtgttctcgttcttcacctatacgatggtggtgagtttcggcaatgtgggtaaggcaatcggcgtgcttatgctcatcgtgcagatttcgggtgcgaacgctgcctacccggtgcagatgttgcccgacttcatcgccaaagtcagtccgttcttgccgctcacccatgcggtgacgatgatgcgtgcggccatcgccggcatctacgacatggattactggcgggccgccggaatgctgctggcgttcgtgccgccgctgctgttgcttgggctgttgctcaggaagccactggtgcggttcaaccagtggtatgtggccaaagtcgagagcactaaagtgctgagctagtaggtattatccgggggttgcctacaaacggcatggacttaccaccctcagtctggctttgccagtcagctcccgccaacgggagcgtacgggagcatatttcgaagagaagagatgacggagatgacaggtacgacggcgacaccgcgcggtgagcgcacgcgcgaggcgacggatcgcaagctcatgcgagccacgctgcagattgcggtggaccgcggcatcagcggcgtgaccatcgaggaggtggcccggcgctccggcgtggccaaaaccacgatttaccgtcgataccataatgccgacgagctgctgcgcgagatcagcgcgatgtatctggccatcccggattccgacccagtgcccagccccacgcgtgagcatttcacgcaactattgcagcgattggtcgattgggtgcgcgacaacgacatcgacgtcaagcgcgtgggcattgtattgtccagcgaggccgagttcttccagcacatcgtcgaccaggtggtgaccccgtggctggagcatgtgggggcgttcctcaagcagggagtcgcgcagggcgtgtttcgcgaggacgttgacgagaagttgctgttgtccacgattatcgggtctttggtggcgtatgaggccatcgagggcaaagcgatggacgacgacaccgcctgggcctcgtgcatggccgatctgctgtggccagcattgctgaagtagcggtcttactcctgaatcgaagcctcctggcgggcgacttcgagggctttgttgaaggcgtcggaggtccagctggcaccggcgaccttgtccactttgagtcccttcaggggcttgccgtccactacgccgttgatggctttggcgaagtcgccctgatgcttcttggaaatcgtggtgaacgggtgcccaatgattttgacggtctcgacgttgccgtccttgatggtcagatggacgtcgatggaatcctcgccgaccgggccgtactggccgttgatcgagtagttgccgtccttgtagttgccggtgtccttcttgtcggacgtggtggtggacgggtcgttgtgcgatgagccggaatcggagccgtcggagctatcggagccgttcgactgggattgcgactgctcttcctgcgacttctcggtctcgcccgagttgccggcgtacgcatcgtccatcggcgtggccttggattcgccgcacccggccagcagcgcgccagccacgaccagtccggccgccgccaatgtcgcggatttcttcaacgtattcttttcggtcatattcacgctccttaagccccctctgacgagggggctgtcagcgaagctgactgggggagagaccatcagcttgccatgtattcctcacatactgctcgatgcccctgacggccctactcctcgccgccggttttcgcggccttggtggggtcagcgaaaccaatggcggtctcgccgttctgcgcgccctcgacctgcgcgcccgtggaggcgggcttgccgccggccgcctcgtaggccttgcgcgcatcctcgtcattccacttctcaccgacgagcacgccatggttgagcatgatctcgcgctgcgcgcagctggcgacaagcgcatcgtgggtgaccacgataatcgtggtgccctgctcgtgcagcttgcggaacaggtcgagcacgattttctcgttcttctcgtcgaggttgccggtgggctcatcggccagaatcagcttcgggtcgttgatcagcgcgcgggccacgcacacgcgctgctgctcgccgccggagagctggccgggcaggtggtgggcgcggtccttcaggccgaccttttccagcgcctccatggcctgcttctcatcgaccaccgaatggtagtactgggccaccatcacgttttccacggcggtcaggtgcggcaccagatagaacttctggaacaccagtccgatgaggttcttgcgcacgtcggccagctgcgtggcgttcaggtcctccagcttgcggccttccagcttcacggagcccttggagggcgtgtccatgcagccgatcatgttcatcagcgtggtcttgcctgagccggaggagccgacgatggcgagccattcgccttccggcacggtcagattgaggtcgtccacggcatgcaggtcgccgtagatcttcgagatgtggtcgagttcaagtagcatgacgtttctctttctttattcttcgcgaagcacgacggcggggtcgatgcgggtggcgcggtggacgggcgggatggaggcgacgatggcgaccagcgcgctgaacagcacggagatcagcgccagccaccagttgaatccgatggagcgttcgaacaccgccacgcacagccaactggcgagtccgtagccgattgcggtgccgatgaggccgccaatcaggccgtagagcgatgattcgatgtagaactcggtgccgatggcacgcgagctggcaccgagggccttgcgcaggccgatctcgttgcgtcgctgcgagacgatcgagctgattgtggtgccgacgccgacgagcgtcagcaccagcaccaccagcgagacgatccagaacagcgtctgcagcatggtgatgatgcgggtgtcggaggcggtgatcttggtgacctgctgcgccttgacgtgcatggaggtcatgtcgttgatgctggacaccaggcccgcgagatcgctggagccggccgaatactcgatgacgtccacgccgcgcgtgatgccggtgagcttgttgacgtcggcgttggtggcgtagatgatcgagtcttcgctgccaccggtgtccacgatgccggccacgcggaattcggtgccggaggtgtccatgatgtcactggagacacggccgtctttggtttgctggtcgatcgaggagttcgacgaagtgccgttggtgctggcgttatcggatgcacggtagccgatggtgatggcggagccgattctcagaccgatggcgtcggcgatgtcacgtccgaccagcaccttgccgtcggtcggccacgagccgtcgaccacccagtgatggttgaggttcttgacctgcgccgcattcacgccggccatcacgtacggcgaggcgttgacgcgcacgttctcgtagcggtaagtggcgtatttcacggaacccttggccttgaccatttcagtggtgtgctgcaccatcgccttgtcgatgccggccttgccgtcggcattggtcgattcggtaggtgtgacaatcaggttcgcgccgtacgcacgcatctcctcgttcatctgctgcggcacggcgaggcagatcatcgccaggcagaacagtgtggccgcgccgaccagcgacgccaccacggccatcaccgcgcgcgaacgccggcggaacacggcgctgaacagcattctgaagaacataccggtgttggtcatcggtttcctccttccacacctacgtagataaactcagcggccatggagcacctccgcgggcttgagattcagaatcgaacgaatcgaggaggcggacgccagcagcacggtgacagccagcagcacgaacaccagcacgaacaccatcggccgcatcgtgatgccggaaccgaataccacccggcctatcagctgggccacgccggaaccaagcaacgcgcccacaatcgcgcccagcagcgagattgccgccgtttcggccagcatcaggcgggataccgcggcatcggtggcaccgagcgccttgagcagcgccagctcgccagaccgttcgccgatcgaggcgaccatcaggttggccacggccacggctgcggcgatcaggctcagcacggtcatcagaatcatcacggcctgcgtcttctgcagcacattgccctgcaacgcggcgacctgacgcacctgcttggccaccgcgcccggaatcacctcttcgatctggtaggcgatcgagctcgggtaggcggtgcagtaccaggtctcccattcctcctggctcagcgcggccgggttcgcggcggccttacgggccaggtcgttctccggcgtggtcagggccttgacctcgatcttgtcgaccgaatcgggcaggtcggcgagcacctgggccgtggaggaggcgatgtagagcgagccgttgtcctcgtcgccggaatcgtagacgccggtgagcttgattttctgctcgttcttcttgcccgaggcggtggtcttgttgagggtgatggtgtcgccggtggtcacaccgagttcggaggccagcgtcttgccgatcacgccctggtcggaatcgtccttgggccacttgccgtccagctgccaccacgagcgcatgccttccacgcccacgacggtggtctcgccggtggagatcttgaggtccttgttgaaccacgtgccgacgaccggcacgttggcaccgttcaccgtggcgtggatgttgagctgcggcgcgaagttggtgatgttgaacgaccagaagatcgtcttgatcttggccgcgtccgactccttcagaaaggcggtcgggtcgctggtggacgccgcaccgcccgactcggtgttgtacaggtcggaaacgaccgcgtccgccttgggctgcacggtgatgttcgaaccgtaggtggacagctcggcgttgagcttgtcgcccacgtcgaacacgacgcccagcatcgatacggacacggtcgccgacaggcatacggtcagcgcgataagcaggcgccggcgcagctgtcgggtgaacgagcgagtaatcatacgcagaaagaacatgattcttgtctcctgcctgactcactggaagtgggcgctcagcgcgtccagatccgtagtctgaatggtgatcttgccgtggccggtcttgtacgggaatggtatcgggttgcagccacccttgaagccgatggtcgccaggttgatggccacctcgcacttcttgcagatgatcttgccgtccttctcgtagtagccggcgtcgccgcagttctcgcaggcgtccaggccgatgccgtacgcgccaccgttctttcggatgatgatgaagcgcatgacggtgccgtccttggccttgtattcgaaacggtgcaggtggccgtcctcgacctggctgaagggaatggtggccacgccgtccttgagcgagtaggcttccggcggcgaaagagtgatggtctgatgggtcgcggcgacgccgacggtgagggtcagcgtgacgccgatcatggccacgaggctccagacggcggaggccacggcgcggcggcggaacgccttgtgcttgcggccgatggcttcgttcgcgccggtcagcggcatgcggaagccggccaccacggaggcgacggccggaatcaggaacacgaacgcctgggccatgatcatccagtcgttgtggttgatcgaccaggcgagggccacgaatcccgtgtggcctatcgggaaaccgcgtgcctgcaggatctgcatgacaccggtcaggtgccggacgaacagaatcaccagcaccgcgagaacggcggcggtgaacgaggcacgcaccgcggtcgaacgcatcgtgcggaagatcacggccacgatgatcgacatggccaggcccagcgcgaagccgagcgcgcgcagcaacatgtcggacgtgaagatcgggtcgccgggctccacccagatggtcagctgcaggatcacgtccggcagcgcgtagaacagggtgagcgcgatgtcgatggcggccacggcgttcgcaatgtgcatgaacaccttgtgctgctgccaattggtggtgatgcggcgtgcgaacaccaccacgacgatggtcaggatgtcggcaatgatcgcgcaccacagcaccggatagttgacgaacgtgcgctggttgatcacggccgaggcgcgcaggccggcgaatgtgatagcggcgatcaggccgacggtcaggccgatgagacgccaatgcgagcttatcggcttatctcgcccctcgccgaccgtgagcatcacgctcaggctcatcaccagcaatgcgggggccaaggtgcccggcatcactgccacgaattgttcaagcattcgcgtcctttctctgttcatcttaggctcccctccctgaggggagctgtccgcaaagcggactgaggggagtttttagaccgtcctaagaattatctccctaaagcggcgtaaagccccctctgacgagggggctgtctgcttagtcaatcaccactgacgcggggtgtagtcccagttgtcgaaggtgacctcgatgggctcggtccagaacttgtggttcttgacaccggtctccgggtcaacgtggagcatccagccgttcttctcaggggactcgatggagagcttgagttggtaggtgccggccttgtcgagcttgacgttggcgccgtagtgcgggccatcggaggcgttcatctgcatgaaggtaccggaggtggcctggccgccctcgacttccttgccggtggacttgtcgatgatggtgtagttcacagtaaggtcagggacgaagtcgcccttgccgtagccgtagtcggtgccttcctgggaggcgtggatgtcggcttccaggtggaaggaagcgtcagcagccttcagacccatggaagcagggtacatgtcgatgggctggaagtagacggcacccacggtcagcgggccagcggccttgtcctgctccttggcggtgccggaggggccgaccgggacctcttcgaagccggaggtctcagtcggggcgtcggccttcttggagtcgtctttcttggcggtgtcggaggagctggtcgaggacttggtatcggaagcgttgttggtggaaccgcaagcagccatcgaaacagccatggagccggcgagcagcacgccgagcagagcggcaagcttcttgttcttcatcatttctcttattccttctgttgtggtgaatggattattcacgacttatctgtttttagttgtggcggcgtgggctggaatcgcttccattgccatgtcgcaagttgtgttgcgcgagatggtcgcaccgggcgttgtgctacgcctgcgcgctctcctcgtcagccttcgcgtccgacttgctcgcaccggccgcaagccgggccttggccttacactgtttggcaaagccgaccacgaacagcgcgatgacggcgatggctgccagtacctgggcgatgatgcattcggcgtacgggtagaatccgagccagtcgttggtgggaacgcccggcaggtagttggcgggcagcaggtcgccctcgatgagcgcgtgcacgccgccgccggcgaagacaaccaccagcacggacatgaggatcgaggtgaccaggaagaacgggccaatcggaatctttacggaggtgaagcgaatcaccaggaagatgatcacgagcaccacggcggcggcgagtgcgccgaccaccatgccatgcgtatcctggctcatcgtgtagatggactggtagaagatcacggtttcggcgccctcacggaacacggcgaggaagctcagcatggcgagcgaaatcaccgtgcgggaagccaccttctcgccggattcgacctgcgaggagacagaggccaccgcggcttcggtcttttccctgatgtagcggttccacgcttccaccgaggacttgttgagcatccagttgctggtccacagcagcatgcacatggcgacgagcgcgcacacgccttccatgatctcctgcagcgggccggagccgccgaacgcgagcatgaagatgaccgccacgatgcctgcgccggccagaccggcgagcacgcccacgtagatccacttggtgaagcgcttgttgccggacttgacgaggtaggccaccacagcggcgaccacgagcagggcctcgagaccctcgcggatcagaatcaggaacgcctggccgaccgagctggtgatgaacttgaggaagccaccctcctcatcggccgcgccgccgtcgagcttggcggcatcggtggccagcatgttcttcaggtcgtcgatgtacttcttgacttcggaagcaggcttgccggtgttcatcgaggagcggcacagcttgaactggtattccacctgggagacgcggttgccgctgatggcgctcagcacggtcttctcgaagccgagcttctcgtagtgctggtagtaggcgtcgttcacgagcgtggcacccttggcggcgtcgccaccctcataggccttgtaggcgttgtccaggatcggaagcatcgcatccgcgacttccttccaagtcttggccgtttcctcggtgcgcttcttcttggcgtcgagctccttgcgctccttggcgatctgcttctggaggtcttcggagtactgcttcgggttggcgaggctggtgttggcgtcgagctgctgggccgtggcgtcgaggtcggtggtcaggtcgttgaccttctgggtaagctgatcggcctggtctgacgtgaacacctggctttgcaggtcctggaaggcctgctgctgcgcggtctgcttgtctgcgccgatggtgtcgctcaccactttgttgaagttggacgtcacgtagacggtggtgtatgcagccccgaaatcggacttggcacccattgggttgccgtccttgtattccttaaggccttcctgcaactgcgcttcgacggccttggcaacgtcggcccaggtcgcgtaatcgacgctggtggtgtcgtcgctcttgacggtggcagcagtggcagtggttgccggcgtcacggcgaacgcggactgcggaatgatggcggaggggaggaaggtcgcggcgatcatcgcaaacagaaaaacgatgaccgcaaatgcacgagccgagaccgtggccgactgcagacgaccggtgctgcccgacttcgcgcgcacgcgagaaacggcaacgcgcgtatcacgttcccgcatcgtgttcatttcagcggactgcgcgcaggcgcgacgaaccatgctgaattcctctcacttcaagtactcgaatggtccaaaaacaactatgaactctatagaaaaaaattcttgaacaacagtcttgattttttgacgggtgcgaggtaatagaaggcgttttagtgcttttcaaccccgcaattatttcactatctgagataactatgctcagagaggatggctttcccggaatgtgaacggcaacaccacaaaaagcggcaacgtgaggaataccggaatcggataccaaaatagtgccacgggtgaggcatacagcgacagcaccgtgaatgccagcaagccgtaagcggccagtgcggggccgtagcgtcgtcgcgcaggccgcaccgccagcgcaagaccagcagccagcggaatccacgtgacgtacagggccatcgaagtcagcggattgcctttgcgaacaccgacatgaccatccgaacgcgcccaccgatgaatcgcccgcaatatgtttttctgccattgcggcttgtcggaggtacccctcagcggcgcaaggtcatgttcgatggcggcaagccgttcggccgccacggtatcggcatcgccgtcggaagtatgcttccaagcaccttcagtcaggaaagacgcccattgcctgagatagctaggcgtgaacaggtagtcggaatcagtggggtacgcgaaattgacgcgcgggtcccaccatccgcgagtcaccccggcataggccgtggcatattcaaccggatgcgcgaggccgagctgcacccagacctgcagggccgcgagttgttgcgccgcggttggcctagggtgctcgcgcagagtgcggaaggtctcatcggtgcggtgcgggttgatgccggcggcggcccagtcgagatccatgattgcgttcagccgctgccgctgaaccttgtctatcgcactgggatcatcgtgcgcgagccgggccactggctgggtgaccaggccccacacctcacgtccgggcgatcgattcgcatgcgtggcggccgcgcttaatggcgtccacacgccctgcgccacaacgatggcaaccgcaagacacgcaaacgcacgacgccgcgcgcctttgggcgtacagacggcgagcaaacagcagccggcgcatagcacgattatgagcgccgtccgcttggaggcgatggtggcgaacagcaggatgacgaacgcgaatgccaccgggcggcgagccagtaccgagccgcgcgtcagacaagcctccacgaacagcacggccaacggcagatagaacacggcatgcaacgagtccttgcccatcgtggtgattgcgccgaccaccacatagttggtggcaagatagacaaggccgagaccgatgagccagcgcggcgagccgattttgcggatgtagcacagcagaagcgcgcacccggcggcgagtagaaccgcttgggtcacggtgtacagggcctgcccgatcagaggggagccgagtgcgctgccgatatgccagaacaggccgaacgtgagcgtatcaaacagcggatgctgggtgtagtagtggtgcagaccggacgattgcagatattgggcaagcgtatcgtcgcgcatcgaacccggccaagtgagtatgagccacggcagccaggcgatagcgagcgtgagcaggtaagggaggaatcgcgcgcgcagcgatgtggataacgtggtcgggcggcgggccgtgagccaactaaggatcgcggatatgctgcggtatgtctttgagtgtttcttcgattggcgcgaccggccgccatgtgctgcggttacgtcggccgctgtcccctcgttcatgactccatagcctaggcgcgattgcgggcgcgcgccggacgaacatcgaaaattcacctggacacggtgatttctttaccgggggttgtgtaggtgcgcgcgggtgtgtgggccctgcacaagcatgcggtccttgtgcgggtgttgcgcgggactttccagtgagtctttcactcgcagtgatcattcttcacatccgcgtcgcgacacgcgccacgccgaagcgtgcacttatccgaaacctgtggtaacttattcgagttgcctgcggaacacagttcaactgcgcactgcaaagcatggaggattcgcctagtggtctatggcgcacgcttggaaagcgtgttggtgtaacagcctcacgagttcgaatctcgtatcctccgctagcagggctttcgaagaaattcgaaagcccttttcttttgccgaaaacagcttcctttcaacgattccgaacggcttggactgtcggaatagtttccttgtagtgtcttcagagggtgttcggcccgacgatgtcggtggcacgttacgtggtgcatccggtaggccaaatcggtgcaccactctatgcctgaagggagccactcatgacattcgatgatcgatcggcgtgccatatgagaacgtctccgtcgattccgacggtgtttacacttttacatcttcctacaccttcttacacttttccttcaggtcgaaaagtgttggaagtattggaatcattgggattgaagaccattttcctttacacttttgctcttttcgcgggtctattgcacaagggatcctcaaaatgcgttggaatccttggaatctttgggattcagggatccggaggaatgcgatgagcgggcgccgtaggattcggttcggtcgtgtccagaacctctagggacggaaaacgcaggtatgtggaggcacgctaccagccgccggtatgggcctatgccaaatggcccgatttgccgaagcattattcgagacgattcgacgccgactacaccgcaatggcggaggcctggctcgctgacgttgaacggcatataagactcggcgactgggaaccgcccagaatcgtggtgagcaagacgagggcgacggcgggaacatcatcggggccatcctcgccggccatgacggcagacggtcacgcatctatcacactgcggtccatcctgaagcgcgcggcatgggtgttggctcacttttggccgggcatgcggtcgaggcgcttcgcgcactcgggttgccgaaggttgccgtcggcgtatatgcggacaacaaggccggcaacgacttctgggagcagcagggctttgcaatccgagacgacctggtctatcgcgagctttccttgtaaggtgtccacccgcaatccggcttttgcggtcggtcattcactcgtttcgttgccgcacgcacatttcatgtcgacgatctgttgactctgaatcgtgattcaaatgatccgggccgtatggcctatggattcgatgtcggtttgcttcaatcgcacagacgtctgatgcacacaagtccgcaccggatattgaaacactcagtcttcgatgacgctgggatcggcgccactttttttgcgtggcggccgcttacgaaggtgcatatgccgtcggagacggtagccttccggccgtatgacttcctcatagatgcaagcagcagaccatgggactacggtctccccggttctgctagatgtatagattgtttttaagaaaacatagaaagtatgggagatataggtaatcgtgacacctcttgtcggcgtgaaggtatggaaaagcgcaagtttccttctggcgggctttgagcggcgaacagagtggtacactcattctgggaattggtagaaagccttgctgttgctgggtttgtgggtttcggtagatagagtctccatgatgtgcgcagacctcatgatgcgacgggctcgcctgttcgggccgctgctcgcctccggctgcgaggtgctgatatcgggggaggggacgcgccgcgtgcgattgttcgacggtgagcgggccttggtcgggaacgccacggccaaacgaagaagggaattcacggagacgcgtcttttggcccacgaggccttacgacgtatcggccatgacgggcccatactcaaaggttcggatggtgaaccgctctggccatccggcatcgtgggatcgctgtcgcattgtccgtcgctgtgcgtcgccgccgtggtgtcggcggaaagaatccgtgccgtgggagtggacgtggacgattcggacggattgtccgacgggatcatgcggttcgtgttctcttccgaagagctcgcatcattgcgtatggcctcctcggtggaacgtagggcggccttctgcgcgaaggaggccgcctcgaaggcgttgtccgcattggacgggacggggacttccgtaaggtatccgtgagcctgaaggcggatggaacgttcgccgctgtgagacgggatgtggcgttgcgcggccaatggcgattctacgatcggctggtatccgcgatggtcgccgttccctcggagaccgtctgaggggcgcggacccctcgaatgagcagccggagcagaaaggcataggccgcatcgtcatcgtcgacgggcgtatcatgttcgggtcgtgtctcgaattggacgaatccgtgcacggcggaccatatggaccatgcgatgaggtgcgggtcatccctccggatctttcccgcggcctgcccgtagcgcactagctcggtcatggcggcgaggcatgcctccgaagcctcgcccgcatgccatcgccacaacagggcgtagatgccgggcgacgccttggcgtgcccgcggtatacgactcccgcatcgtagagtctttgcaggggatcctcggtggtgacgcgcaggagcttctcccgtaacgtctggaaactgtcgtcgatgagagcgttgatgacggcctgcttgtcgccgatatgccggtagatgctcgcgggggacacatccgccttttccgagagaagccggatggtgaaggcgtcatagccgtcctcttcgatgattcgtttcgaggcgtcgagtatgaggcccctgatctcggtggtgggcgtccgctggctttttgtcgttttccgaatagtcctcatatgcttctccgcatcatcccgccgttacggatgaaaaacgccatccggcccgtaggtccctgcaccgtcccatgatgggtggggtcgaaggtccagccacgctcttggatcgcgcctcgatggctgtgatgactggtcccaccgcattgagactgccaccgagccaagacatgtcggggaagccggacaggcagccgtggaacatgccgacgctctggctgccgtgaccggggaagcatgccgcgatgtcaccgatggggttgcgtgtgtcctccgctatcgcgccggccgtcaggaggcggtccgtcatatccgtgtccttgatccgtgggatccgtccgtcgtctttcatggtggatgttcctttctattgggggagattgcctgaatcgtgtttgggaagtgtgatccagcagagcagcgcgaacgccaatgcgagggcgcaggcgatccagcatgccgcatgcgtggcgctcatgaaactggtcgatacggactgctccacggtctgtcggatgcctgccggcaggtgcggaaggatcgatttcgcggccatcaccgaatcctccgcggctttcgcgatggaagacgggatctgcagtccggacaacgagtccgagagctcgtcggggtagacggaggagatcgcggaccccatgacggcgacgcccagcgtgccgccgatctcacggatcgtgtcgttgacggccgatgcggcgccggtcgagctttccggaacggtgctcatcagggcgtccgtggcgggcccttgaatcagggcgatgccggccgccatcagggccatggtgggtacgaccacgaaccagtagctgcaatgggcgtcgacacgcgtgaccacgaacatgctcgccgacaggaacagcagtcccgtcgagacgaccgaccggtatccgaaacatttcgccaattgcgtggcgagcggagcgaccgccgccatgaccaccgcgaagggcagcgtcgcgaccgccgtctgcaatgcggtgtatccacgtaatgcctggaaccattgggtggtgatgaagatgaagccgaacaggcagaagaacgcgacgcagatcgcgcaggtgctgctcgtgaacgtggcccttcggaacaggccgacatcgatgagcggggcgtgcgtatgcccctcgaccgccgcgaacaccgcaagtatgatcagggccgcgcagatgccgcctatgacctgccaggagagccagccgtaagtcgggcgttcgatgatcgcccacaccagcaggcccacgccggccaccgataacacggtgccggggaaatcgaacctctcggaacggtacgctcgtacctcgggcaccgccaccgcgatgcaggccagcgccaccacgccaatgacggagcacacccagaaaatggaattccacgcatagtgctccagcaggacgccgccgatgatcgggcccagggcgatgccgacccctgatgtcgctgcccacaggccaacggccaggctacggtacctggagccttcgaagatgacgatgattgacgacagcgtcgccggatagatcagcgcggcgcagacccccaacaccacgcgcagcgtcaccagctgccgcagggcccaggagaaggccgtggctgcggagaccacggcgaatcccgccaatccgacgagcagcatccgtcttcttccccatcggtcgctgagtttgccggcgggcaggagcagcgctgcgaaggacagcgtgtaggcgtccaccacccattgcaggtccgtggacgaggcgttcaacgcgtcgctcatcgtgggaatcgcgacgttgacgatggtgttgtccatcacgaccagcagcaccgccagacacagggcggtgagggccagccccctgttcccggaccgtgcgtgtctccggaccggcatgggggtgggaatcaacgaacgttcagattgcatatcaatgctctcctactgtgtaacaatgttatctacaaatgaaacaatactcctctctgtggggggatcgccaccatccgtcaacgaggcatggaagtgctccgcgtgcggacggacccaccgtcggcgccatgaaccatgccgccgcccgtggcgcgggaacgggaaggccatgcggcgtcgcccggggtccgcaaaccccatggcatgttccgggcccgggaatgccacggccgatgggtcctccaaaatcagcgccgtccgcttccgggcggagagttcgtgcggtcgctttgatgacacggccgccgtcccgtcgggactttcggcatcacccgattaccggtccaaccctcacggcgggaccatgacccgtcgaacttcaatgaggaaagcgccggccgaccctttgccggaaaacgcgaaccgtcggcatgccccgctgaagcgacgccgacgatggtttcggatggtgggcggccccgatcgcccgatccttctcgatccaccgcccggcgatcgccgaacgcccgtggcggctcacgatggttgcaggcccatgcccatccaaggcgttggccgcatcctgcaaaaaaccgggtccatcgtacgcccgaacatgcgaatctccgtacgccggcgtggatatcccgcataggcgggatatccgtcggggagattccactgacagcgtgaccagtcactcatgcgccggcgggagacgctaccatgaagacgcgaatcatgtgaatcatcacgcaaaggagcatgacgtgaactatctggaacatcgccgacagcacaaggacgcgctatgggaacagctacgggaaccacatcaagccccacataggaagcgtaccgataaagcggctgacggcatcgcaggtgcaggccgcgttcaagtcgtacataattcctgaagcggaatagccacatcgcacactggttttctctgaattccgagattctttctctgaattcagagataaatctcgggattcagagaaaaccgttcaagaatgatctgcgtatctcattcaacgtactgccgcataccacacgttgcgtccactgccgaccttcttagcgcgtccttcaaggactagttttcgcaactggtagtacgcctgattcccctcaagatgcagcaattccatcacatcgtttttgctcactgatttctgttcatgcattaacttgatgatcagttcgggataccgcaccctatcgatgtctgattggcgaacgtaatccatcgccctaccgctgcaccgatacactttcgcacccaacatatacgtgcggcgagctccaacgccagcgctttcaacaagccccgcctccgtcagctgccccaatacggtgcgcagacgctggtcactcatgtccagggagcccgacaacacatcaaagccacaacgacgttcactcttgagcttgtccaaaataagcagaccatcgagagacatggacttgccgctgcgctcacgttcctcggccagcagttccacaaacgccttgtcgggcacactacgaggcaacagcaccgacactccacgcctgttggacctcgaataatcaggcagaggacgaccatagttcaaagcaccctcgaatatacggtcgatgccgcgtcccgtacgctcggccaatccggttcgtttcagagcatccatcaggcagggattgcgaccatgcggttcggcggtaagcagattatggatgttgatgccctccacgaacccgccgggattggcgatggtaagccccgcatcatccaactgcacgcgcacacgtcccagcagggtgtagtcacgatggccgaaggcgttcaccagcgcctctcggaacgcccgatggtcgaattccggcaccatcattgagaacagaccgacggatagctcgacgcttggattccaaggagagaacatgtcgttgatttgctcgatggtcttcagcaacggtccggcatagtcttggttgactttgatatccgtaccagacatgacttggaaagacgcccgatgagtcggaacgaagcgtttcagagactcccccttgcccagcagcagcaaaccggtcagcgtcggcatggtcttgccatcgacggtcaccgtcaattgcagggatttctccagctcctcatcggtcagttccaacaaattacggtcactggattggtaggtgccgataatccggcgcagacggtcgcgttcaaggggatcgaaatcatcacgggtcgcatccggcaccggctgcgcggaaaagtccaaacgtcccaaatcggacaggcgcgtggcgatctcgtacgggtacatcggcacgctctccggcgtaccatccaccttcatacggcgtcgcaacaccttgcccgacttggtcgagaccacgctgcgggatttcggcacatcgatctgcatcaccggcgtcttctccgtcccgacgatctgcgcacgagcggaaaccggaggaaccgtacgggagtagggagtagagtggcggcgtcgaccgacgcatgttctcgccataatttcaatcccgaaaaggagcctcgtcgcaaccatgacatcacatcttgccgaagcaggacgcacgttggttccccgcaaggaagacagatacggtctgctctcccccgccttggtggtgctgacgttcgtcgccgggctggtggacgcgctgagctacctgtcgctggggcatgtgttcgtggccaacgtgaccggcaacatcgtgtttcttgggttttcgatcgcccatgcccaaggcttcgtctggtggacgtcggcgctgacgctcgtctccttcatggtcggcgcgcttatcggcgggcgcatcatccggcgattcgaggagaaccgggccaagcatctgttggtttctacctgcgtgcaggcgtcgttcgtactcgccgcgctaatcggcgtctatcttttgaaccagctcatcaccggccccgcagacgatgcgtccggcgtctcctcgattgcacggcttgcacagaccacccaggcctcacaggcctcacagccgagcctgaacttccccaccgcacggcacatcgacctgcacatcatcctgctgatcgtgctgctcgccccggcaatgggcatccagaactccaccgcccgcaagctgtcggtgccggacctgcccaccaccgtgctcacgatgacgctgaccggcgtcgtcgcagacgcttcggcacacggccaccagcagtcgaagctcgggcggcgtgcggtcgtaatgctggcgctggcgtctggcgcgctgaccggcgcgcttctgcaggcgcacggacacgagaacatcatcttgatggtgatgctcgggtgtctgctggcggtcatcgcgatgatgattccgcacgtccattcggatgcgccgtgggtcaccggccggcaatagcctctggcgcatactttcgccatatgagacaaaaacggccacgccacagcgcaaccagtaggaaacgcccggcaatctcggctctcctcgatatgttggatacccgttgtttgaaacaggccctccgcaagatacaaacaggggcagtgagaaggagaggtaaatatgactgacgcacagcaggcgaacggcaaccagccagaatcccagaaccaagcagaagcgacggcacagccgcacaacaagcgagtgacgaagtgggtcgctatagtgattgccatcgtggcggtggcgattatcgccgcggtcgcggtgttcggcgcccgcgcatacagcgcgtctcagtacgatagcgcagtggccgcctgcgccgccgcctcggaagacgtacgtaacaccaccaacgactacaacaacttggtcaatggcgatgctgcagaagccgccgctctgaccaaggcagacgtctcggacgtctccgctctcgacgcgctgtccaaggaactgaccgtggaactgccgacgtacgaaggctgcgtggccgacgacaccaagggctaccaggccgcgaccaagaaactcgaacagcaggtcacgtggtaccacgagcacaccacgtcgctgcagaaggctgttgacgccgtcaacgcggtcaagaagtaagacgaggtcggtctccctcacgttttcaggatcggacagcgctcaagtcgcggcaacgcgcgatgtcggccggtcctgcacggcccgaaacggcagaaatcccgcgccccttacgttcggacgcgggatttctgccgtttttgagtcacggattgggactatagcccagtctttgccccagagttgtctattcaggattaccctctcggccgtatctcatgagcaggacgtgtaaaaacaaaaaaccctcgctaatccgcgagggttattggctggggtgcctggactcgaaccaagaatggctgaaccagaatcagctgtgttgccaattacaccacaccccaatttggcttggcgcagcaactccgaagagttgttcgtcgtacccccaaccggatttgaaccggtgttggcgccgtgagagggcgtagtcctagaccgctagacgatgggggcatattcagtttttcaaccggctgcgaggcgaaccgcgcaacaggtagatatattacgcgctaccctgctctcacgcaaatcccggcgtgtcgcgccattttccgccgttctgcgggaacaccccatgcaacgcgaaagcgggcatccgtatgtacggatgcccgccatgcgtcacgctcccatcatccgccggcgtgcggtggacgacgcatcacagatgcgcccgcaggcccttgagacgggcgacggtgatcggcttgccaacgatctccatcgattcgaacagcggcggggagacgcggcggccggacatggccacgcgcaccgggccgaaggcgagacgcggcttgtagccgccctcctcaaccagagccttgttcagggtctcatgcaggttgtcggtcttccaatcgacctcatccacgccttcgagagcggcgatggcggcatccagcacctcgccggcagaatccttcagctgcttcttggcgtcgtccgcgggctccagatactcctcggtggacagcagggagccgaccatgccggcgacctcgcccagcaggcgcacgcgcggctgaaccagcggagcggcggcggtcagcacctcacgctcacggtcggtcagggcatcccagttgtcggcggaaaccacaccatcgcggtgcaggtacggcaccgagcggcgcaggaagtcctcgggctcgagcatacggatgtgctcggcgttgatggagatggccttgtcgatgtcgaaacgggccgggttggccttgacgtcacgcacatcgaacttctcgaccatctcgtccatggagaacacgtcgcgatccggcgcgatcgaccagccgagcagggccaggtagttgagcaggccctcgcggatgaagccgttgtcgcggtggttgaacaggttggactccgggtcgcgcttggagagcttcttgttgccctggcccatcacgtacggcatgtggccgaacaacggcatctccttggcgatgcccagctccatgaggtaacggtagagcacgatctggcgcggggtggagctcaggaggtcctcgccacgcagcacgacgttgacttccatcatcgcgtcgtcgaccgggttggtcagcgtgtacagcgggtcgccgttcgggcgcacgatcacgtagtccggcacggagccggccttgaactcgatggtgccacgaatcagatcgtcgaaggcgatgtcttcatcaggcatcttgatacgtagcgcaggcttgcggccctcggcgcggaaggcggccttctgctcatcggtcaggttgcggtcgtagccatcgtagccgaactcggccggacggccggcggcaaggttgcgctccttgatttcctcgggagtggagaaggactcgtaggcgtagccggcttcgagcagcttggcggcaacatccttgtagatggcggtacgctcggactggcggtacgggccgtgagggccacccacatcgatgccctcgtcccagtcgatacccagccaacgcagggattcgagaatctggttgtagctttcttcggaatcgcgcacggcgtcggtgtcttcgatacggaagatcagcgtgccgccggtggcgcgagcttccgcccagttgaacagggcggtacgaatcatgccgacatgcggggttccggtcggcgacgggcagaagcggacgcggacgttcgcggggagttcgggtttggtgttttcagcatcagtcataatcccctattgtgccgcgcgcgccggacgcggagagcagcgctcctcgctcttttgcttcgttattgacatttcgggccaacaccatcccaaaacggccattttccaacgaaatctcttttgcctgtctttggtagtgcccgatatcttgatgcctgtcttcacacctgttttgacacctactttggcgccatccacacgcccgcacgcaaggcttcgacaccatttggcgcaactgttgagttttttacccaaacgatggaagaataggagtcgacgcaatcgtcttatgaaaggggaatcaatgaccgatcccaacaacgtgccgttgccgcagatgcccgcgcccaacggtaccccggcccagcagaatcccagcacgccgcaatacggcgcacctgctccggcccccgcacagccagattatgggcaattcaacgctccggcccccgcacagccggcctacggccagcccgcatacgggcagcccgctcccgattcttccgcacccggcgcagcgcccggtgcaactcccgcctatggtcagcccgccgccgacccgtacgcggcgaatgcggctccgcaattccccgctcccggcgcggctcctacctacggccagcccggaccggacgccaacgcttacggtcaggtgccacccgcatacaaccagtacgccgctcccactgccacagcagccgtgccgttgaacaagccgtattacgactgccccttccctgaggcattcctccgtttctggaagaagtatgtggtcttcaagggacgtgcctcccgcagcgagttctggtggtggacgttggcctctgtcggcatcagcgtcctgctgagcctcctcagcagtgccacggacgacaagctcgggttcctttccagcatttggagtctggccatcctgattcccagtctggcgctcgccgttcgccgtctgcatgacacggacaagcccggctggtgggtcgccatcttctatggcgcgatggccctcggcatgatcatcatggttgccggcggtggcgcagcactgtatggcgccttcggcagccttagcaactccagctatggagccatggcaaccggcggcctcggtgccatggccattggcggactgattacgctcgctggttcaatcgtctacatcgtgttcatggctatgcccagcaagccggaaggcgcacgtttcgacgatgacgcagtagctgccccgatgcctcagggtgcttacggcgcaccgtacggcgctcccgcaaccccggacttcaaccaggccgctccgaacttcgccgctccgggcaccgctccgaacgcacccgctcctgacttcaaccagccagccccggcctatggtcagccgaccgcaccggctcctgactacggccagcccgctgtgcctacgcccgattacggtcaggtaccggttccgcagtacggccagccggagaccccggccccgcagtacggccagcccgacgctcaggccccacagtacggccaggttccgccgattcccgaaaacgttgatgatgggtccaccgtgctgtctccgcacacggctcccaccgatgacaacgcacagaaaccctggcaaggccagtgactgacgccggcgaagttcgcttaagaagttcgcctcatcactcatgaagcccaacaatgaggccccactcatcaagcggcggtagtattccccgccgttcagtaagccaatgccctgtgtactggatcattccagcacacagggcattgtgcgttattgcggcccctctcttcgcgcaacattccccggaatgcgttacggtggaggatggacgctgcgccgagctactcctacaagctgcctacggagagcgtttgggagatcacatgggattctcccgggcccagcgtcacgatgcggtcgcggcataccgccgcttcaaccgccacgaaaccgcgccattcgcccggcttggtgtagctcatattgtcgccgtccgctcccggattccacaccacggtttgcggcgacccggtacggctgatatgaatcgcacgccccaacatgtcatcgcgcagttccagacgcgcatccgagtaatacacacgattcaccggctgctcgccaaacgtcaccacttgcgcgtcctgtgttttcggcggaaacccttcttcggtggcatccagatacgtcgctccctgcaatccgaccagctgagcaccggacacatcgccgacatgcagataggaatgcaacgcggcctcgtacgacataggcgccgtgccggtgttggtcacggtcaggctcatggtcagcgcattgcccgtttgcacgtcatacacggcatgaaactgagcacccggctcgtcatcgaaccaaggcacttcattgtcgttcagctgctgcgaatccaacacataccgtatgtggctgtcgtcgaatgaaccctcgtccaacgcccaccgacgcagacgtgcaaaaccgtgggatggattgagtgccagctgcttgccatgcgcaaaacccgggccgaaccacgggaagcagatcggcactcccccgccgagcgacttaccggcctcgatatgccacgtactcggcgtccacaccacatccgcctgcccggccggggcccagcgcaacagatgcgctccgtaatcgctgattaccacgctgccgccattgttggcgagcatacgcaaatcgacaccattgcccataagtttcccattcccattgtgcgaacgatacttttcactaaataggatacttccttaacaaaaaagaatcgcaaagtatggccgcaggatgcacaaaggccgtgccaccccattcgccgacgaccgccacgcgccaatcgtgcgcaagatcatcggatgcgactggcaatagatgctggtcacgcgggccagtgcccggctcaagcacgacttccccctcgcgcaccagttcgccgtgctcccaatggtgcacataaacgcgatccgcacccaaatcgctggtcagcacgcggccgtccggcactggctgcacccagtgggcgacggcgcgtccgacagcagccgttcgcggcgtagcaccttggcgtcgccactgttatcgccgccggcatccaataccaattgttcgatgccggggcaagccacatgatgcagtttgccgaatccaccaaccagaatatccatgaggatgttccgttttactacgaactacgaaactcttttcgccacacaatacgccgtcgccggcggggcaaaatatgccaaaattagccaattgcagaaaaagggcgatccccgtataggaatcgccctttgcgcaaacactcaggcggagggaagtgcctcaggccgtcaaaccggcgaagagcgccgaccagtcctgagactcatcctcaaggtcgaatcgttcggtgttcatcagtgcctccttcaccggtccgggagccctcccctcaagtttgtgtattgagtaatcggtgagatcactcgtcgtggccccaatgcccatccggaatgcggcaaatacacgtggaattggattgagcagacgaagacgccgacagtgatcatcgaacgtgatctgccgctgctgggttcccgctacgccgattcagtgcgcaccaaccatccctatggcgtgcgtaaggcggcggtgcgcttcctgcaacacggtcacacccgtgtgggcgcggcgttcaccgatacaccgacttcggagctgattcaggatggctggaagcaaatcgtgacggaaagcgacgccatcgaatgcccgttcaccatcaccggcattcagccgtacaacaccagggacgtcaaccaaatcgtggacaccattctggattcgggcgtgacggccatgctggtgcactccgattatctggcgatcgccatcgcgcagaccctggagcgccgcggcaagcgcgtaccggacgatatctcgatgatctccgtcaacggctttgccacgcccagctcccgcccgctgaccgtactgcgctcgtccgataaggatctggccgaggcggccatcaacctgctgatcaaccgcatccaaaacccggattctacaacccgccacatctacgtggacccgacgctgaccgatcgcggctcggtaatcgataagcagtaaccccacctccctctgacgagggaggtggcatcgcaaagcgatgacggagggagaggcaccaggcctctaaccgttacgagcgaagcatcggccagagcaacgcccttactctttacaactccacggtctctttgccgggatcatccttgacatgcgcgaacttggcggccagagcctccttattgcgcttttcgtcttcttccttggcctgacgcttagcctcgtccgggttccagagcacatcctcacggtgcttgttccattcggcaacggccagaggagcgatgtattcggcggtggcggtcagggtgtctgcgtcggcggctttggcacgggcattaagcaacccgaggatctgctcgtcggtcaggcagatgcgcggcaccgagcactgctcgcgcagttcgttgacgtagagcagaatcggcagaatcttggcggcagcattggcgacactgtccgctgaaccatcggccacagcatcaccggacacctcacccaataacgcatcgcacacggcgagcgcggtggcgaaccgaacagccacatcggcgggcttggcagacgtggccagacgaccatcggcttcagcgtcggcctcgacctgggcttccatggccgcgaccgcctccctcaccgattccgccgtcgcggaatcccagtcgattcccaacacgtcggccgcctcaacgatcagcctggcatcaccggactcggcgtagtcggccatcgtatcgtaggcgtcattggcggcaagcagcgcatcaacgatgctctgcgggcgaccgggaatctcatcggcaccttcgtagacgaactcggcgtccggcacggtgacgtcctcgccggtcaggatgcgggcgaatgcacgggtgacgcgcacctgcaggttctccgcgtacttggcgtcattgtccatttgcatggcttcggtcagcggccacaggccgatcagcgccgagccggcttcggcggcctcagttaccgccggcaatgccgcaacctgtgcgattgcctcacgattgagttcaatggtcatctatgctcctttgcgtccaccactcgattgcagtgcgtcttggctcccctctctgaggggagccaatgtcctaacaccagtgtgccgttacttgacgttggctgctgggtcgacatacgtgattgacatcacacggccggtttcgttgtcgtacgtcaccgaggtcacggaggcgagcgccgtgtgccgcaggaacatccagtgctcggggtggccggtctccagataatggcgataactgaaaatcggcgattcgtggctgaccaccacaatctgctcgccggggtgctgggccaccttctcgcgggcgaagtcgtccatacgcgccgcgatgtgctgataggactcaccccagctcggcttgtacaggttggtgacgagcttccagttgccgttcttccacagcgcgccctcgccatggccgatgcgcttgccacggaactcgttgccggcctcaatcacccgttcatcagtggtgagcgtgagcgaagcctcgccacgagcctcgcgcacggggttcagcgcatcgagaatcacgccggcggtctcgcgcgtacggtcgagcggcgaggagtagacggctgcaatcgtattggtttggggattcttggccaagtacgtggcggtggcttgagccatgcgacggccaaggtcggaaagatggaagtcgggcagtcgctcatagagcagatggtcggggttatataccttgccatgccggacgaaatggatggtggtagcgctcatgagccgcctttctgcttcccgccctgaagggcatgagaacgttgtcttaatatctccaatctaccgcgtgtcgcggagtggacacccgtagagtatccgtgacgcaaatatgcggatgggaaaatccgacgcaaactttgcgcgaccatggacaacacatcattcgatgagggcttcgccggcaacgccacgccagcgggggacatccaatcgggagcggaaaggagcgtagtgctgttatgtccaataactcgtccaactcgaactcgagcaccattctggccggcatcaaggaagtaggccacaaagtctttggtgggtatgcggaactactgcgcattccgcataccgcccgttattccatcggctcggtcatcgcctgcatgccattcccgatggtcggcatgaccatcaccatttccgtacagcattattacggcaactattcgctggccggcatgctcaccgccattcaggcgattgcgctggccgtggccacgccgctgctgggcaagctgaccgacaagttcggccagaggcaggtctcgattccgacgattatcgtttggattgtggccgccatcgcgctggtgacggcgattaccaaccgcgcgccggaatgggtgctgtactgtctgacgccgttcctggccgccattccgccgtggggcgcgatgagccgcgcgcgctggaccaagattcttaagggtgaccgggagcgcacgaaccgcgcgctgtcgctgtgcggcgtgctcgacgaatgcatgtgggtgatcggtaatccgctggcctccacgctggccgtgatctccggtttgctggcgttctcgttcaccggcatgtgcgtggtggtcggtgcgctgatgttcctgaccgagctgaccactgagccaccgtcgcagaccgcgctggcgcgtgccgagggcatctcccgcaaggaataccgtgagcgcgaggccgccaaggctgaggcgctgaaggtggaaaccgccgccgaggagacccgccgccgtcttgagcgtgaaggcgtgaccgatgaggccacgattaacgcagccattaagcaggcggtcgccgatgcgcgttcgggcaagaaggcgtccatttggggtccgggtctgattgcggtgtgcgtcacctggttcggtttgggcgcgttccagtcggctacgggcatctccatcatcgcgtttgccaccgaagcgaatatgaagcagtacacgggctttgtgtttgcctgcttctccttcagctcgctgatgggcgcattggtgtatggcgcgaagaactggtcgattgccctgtggaagcgcttctacttctgcctggccgtggtgaacatcggcatcagtacgttcctgttcgccaagcatctgtgggtgatcatgatcatctacttgattattggcgtatgccaggccccgacgtggatcaacggcaaccagctcatgttgcatctggtgccgccctctcgcttgaccgagggcatggcgtggatgggtgcgatgaattctatcggctcctccgccggttcggcgattgccggccagttcatcgaccgcatgggctcgcacggaggcttcatggtggtgaccaccttggcactggcctcgctggtgattgcactgatcggcttcaagcagatcaagggctccaccgagcagccgaccctgactgaagtgagtgtgtgagacgtatgctaagccccctctgacgagggggcttagcatacgtcaaaacgctacttcggccagcctttgggcgtgtgctccaaggaccagatgccgagcttgtgggagaagctgttctgccacttggcttcaagctcctcggcattcagtcgattttcagcggacttcagacggttcatcgcattggtgtgcgtatcgtcgagcagccacttgcgaatcaagaagttccagatcattaccacggcagtggccaccaacttgccgatattggtgcgcaacagatattcggcatgctgcgatacataggcatcatggttcataccataggtggaaatccagataatcgcgtcattcatgaacagaccgactacagcacccgccacgaagataaggatctccatccagcgtgccatgtcatcacgatgcttgaatacgaatttcatgctcgccagatagttgaaaatcagcgagatgatgaaagagatggtggcagccagcacgttgtgcatgtggaatatgccaaccaataggttgaggataccccagtcgataacaaaggcgataacgcccacaatgccgaacttcatcagctgttcaatcagttttctcacaagagtattcaacactattgggctgactgcggaacgtgtattggctggaaaggccaataatatccccaattggccttgccccggtccgttctgcaagcagcttcctacgtccgcatgccatgttcaacagcagccgctgaggctagactggaagtgaaccgaatcaaggaggaattatgcccgttattcacactcatgtgtccgtgtccaccacccccgagcagcgtgaggcactgaaggccgcctacggcaaggcgattaccgctgtgccgggcaagtccgaaggctggctgatgtgcccgttcgaggacaatatgccaatctacttcggtggtagcgatgaccagcccgccgcctatgtggaggtcaacgtattcggccgctctgtgccgggctctgcttgggaaaagctgaccgaaagcattatggccgcgctgaactccacactcggcattcccgaggaccgcacctacatccgctacaccgccaccaccgattggggctggaatggcggcaacttctagttgccaccattcccctcgcagcatagctgttcgcatcgcctacggaaagcccagtgggctttccgtttaatggctcagggtggcaactagtttgcgtattctggctcccctcagtcagcttagctgacagctccccctcaaagagggaagctcagatgtagaaagcccgccggtggcgggctttctacgtttcaaggggctgatttccaacattcagaagctctactagcgtttcaaggggcttttaaaacaagaaacccggagtataaacattgcaatttcaatggtcatactccgggtttcgcaatcgaagagcccctcgaaacgcagatagacctccggaaaaccggaaatccgcccctcgaaagcgagttacctcacctcatgcctgtcatcacacaatcttgggcatgggggtggtgaggctggtggtcaggttgacgtggaccagaccggcaccggcatgcacctcgaccttcttcagggtcacggtgcgctcttcttcgggggcgcggtcgttgtcggtcatggtcgccggggacttgaccgccacgaacgccagatcatccagcgagatgcctgcgctctggcacagttccatggcctcggacacggactcggtgaagcccggcttgtagatcacgcgctcggccggtacgccgtaggcgttctcggccacccacttggcgttctcggtcagggccatgcccttgtgcgaatgcggttcggccggcatggagccgttctgcagcgcgtcgacgaaaccgtcaagctgcggggccagcgcctcgccgccgtcgcggaacaggttgccgatgatcggcgtgcggaagcccagctcgtcggcggtggccttcagggacggaacctgatcgtcctcgccttcccacaggttgatgagcgggaaggtcggaatgtccaggttctccaggcgctgcacgtggaacgggtagcgccaggccagctcgggatcgtcgcgccaggtggaggcgcgggtcaccacgatggcggcggacggccactgcgcgccatactcgcgacaggcgatgtccagccacttctgggcaccggcgtcggtgccgtaaccggcttcgaccacaaccacgtcatgcagagcgcaggccatttccacggaaaccagcgtcggaatgccgatggacacgttggcgaacgggccaccgtgcacgtagaccggggagccgttcacggtctcggtcttggccggcttgaccgcgtcggccagaatgccggtgatgcgccacaggtccacgaactcgccgaaggtcacggccttgccgtccttggtgccggcgatcatcttggatacacgctcggaaatctcgtccatcgagcgggagagcaccatgatctgcatgagctcgcaggtcggcgtgagcacgaccttctccggcacgttgcccttgccgtagtccacggcggtggagcgcagggagcggctcggcacctcggagacacgcggcacgagaatcgtgtcaagcttgccttcatcgatggccttctcggcgaaggagacgagcaggttctgggccgcctcgatggcgcccatttcgccgcacagaccccagtcgatgagctcggggtgggtcagggatgccttgccgccgccggaggcaccgcccttggaaccggctgcggtgatgcccatgctcggctgacgcagcacggcggccgcatcaatgccacgcttgttcagggcgtcgatcaaggcgatggtcgtggtggtcttgccttcgccgcgcgatgccttgagcggcgtatcggcggtgacgagcaccaccttgccgtgcttgcacggggcgtccgggttctcagccaggtacttcatgtaaccgaatgcgtcgatcttctggaccaggccgtactggctggtgaagtcttcgatggtggtcatttaatgcctttctgtgttgatgatggcggagcggggtggtggggcggccgccgccgcctcttcgcctagaaacagccactgggctgtttcttaacagcttagcctctcagtccgcttcgcggtcagttcccctcagggaggggagctcaatacggactaaaagtcggacatgtggaagccgttcttcatttccatgctgcgagtgtacagcacggagtcaagcagcttgtcggtttcctccttgagctggtcggccatggtctggttggcggcggcgagaatctcgcgcacctcggggttacgcagcgcggcgatagtctcgtccggggtcatcggctgcacatcgccatccacgttgtcggcctcgaattcctcttcagcggcagactgcgcggcttcctcggcggccgtcaagcccagacgggcgatctgctcgtcggtggcggcgaccaagcggtgacccatcgcaccggtcttctcctggtagcgctcgacggcgttggacgtggagcggaaggcgccatcgcacagggcggcgatgatgcggttggcccagtagaagttctcggacgtcacgcgggtggtggtgtcctcaaggtaagcgggcgtggtgtccacgttcgggaagaacggcaccagcgtgttgaacgggttggagccgtatgccatccactggatggcgcgggaggcctgcgggcggtacgggcggatctgcatcaccgcaagctggctctggcggttgatgccgatcgtgcggtacatgtggcgggtgcgctcatcgcccagctggccgtatggatcgaacggggtgccctggtagtgggagctcaacacgtacttgatgtcctcgatggtcaccttgcgctcgggctggcgggcccacggaatgtcgtcggaggtgggcttgtggtcggcgtccgggccgtcccacacctcgtcgtacgggttgaggaagcgctgcatgtaccaggcgcgcggggtgttgtacacgtggtcggagtcggagtgggagccgaaggcgtcgcgcgggttgaacggggtggtgttctccaccgcgaggtccaggtggttggtttcgatgaattcggcgagatcttcggagcacatgtgcgcttcttggtcgcccagagcgtcctcaaggtcgaattcgtcgataccgagctggttcggcatggtcacgtaggcctcgtccggcactcgcttggcaatccagtgatggccgcccacggtttccagccaccagatttcgttggagtcggagaaggcgacgccgttcatctcataggtgccgaattcctcaagcagcgcgccgaggcgctggacgccctggcgtgcggtcttgacatacggcagcacgatggtcaggaagtcctcttcgccgatgccgccgggcacctcgggctcatcgcccctggccggcgtgtattccacgaacgggtcggcgccgagcacgcgctcgttggtggtcagggtctcggtggcgctcatcgccacgttcgcctcgttgacgccggcctcgccccagatgccttccttgaggtccgcgttcggcacggcggtgtactgcagcgggtcgtccggcagagtgatggtcaggtgggagatcactgatttgtattcgcgcggctgttcctccggtttcacgacgatgaagcgcttcgggttgaactcgccgttcgcggaatcctcgttgcgggcaatgatggtcgaaccgtcatagctcgcgtctttgcctaccagaatcgtggtgcaggccatagtgtgatggtgtcctttctcttattcaagctccccttgtcaggctgagccgttcagcaaacagcccggtgggctgtttgtaggcgagggtgggagataagtcccaccacagatgttgcgggcggtagcccgtccgtaattgcaggacgagctgtctcgcaaagcgagactgaggggtagtcactctagctgtctctcccccagtccgcctacggcggccagctccctcatcagagggagctcacatacgccaactaaaaatcacgccttaccggtcaggaagatgccgtcggtgtcgggcgcttcgccgctgttgcgcagcgcgtgcaacagctcgttgagccagaagccctgattcaagccgggcaacggcttcttggtggcccacacctgcaggtagtactcgtggtccttgtccggcggctgcggaccgttgtaccgcatgatcaccgctgggtcagtgctgcggcccaagaacttggaggccgaagaattgcggccttgcacggtctcgggaatcatggccggcagctgacgggagaagtccggcgggatggccaacgcatgcgaatcattgaagtcgtacatcagcgcgtcaatcggcagattggccacggaccagtgaatccactcgaagccgcagaccggaatcgaatccgggtccacgaactcccagtgcaggtaacgggcctcggggttcacatcaccgatgtagaacgggaaggagacgaccggcacgccgccgttgaagtactcaggcgcggcggccttggcaaaatcgtccggaatgacggtgaaatcggcggaaatcttcatatgtcccagtatcgctcatatgtgtgacgtactgggggctgtgcgttacgggggtctctcccccagtctcgccgcgctcgacagccccctcgtcagagggggctggttgcgtcgggttatggaattagggcgcagaagagggattcgaataccagtagcgggttgccgttgccggctagacgcttgcgggcgtaggccacttcgtccagacgggtcacggcaccggcccggttcaaccgcaccgacaattcggtgatcggcgagcggttctccaggttgatgaggcccaccgaatcctccgcattgttctgcagcaccgccacatcccggtagatggaggcgatggagttcagcgcacgatccaatacgtcgcgcgtacggcgggtgaccaaacgcttcacatcgtctttcttggcgatctggttgaacgcgccacgcagtttcggcgggatgcggtcgttcggtgccagtccgttgatgcggcggaattccgcttcctggccggcggtgatgcggcttgcgtccgcctcggcctgggccttggcattgtcgataaggctgccggccagcagcaccgcgtccgaggcgcgagcgaggttcagtacgcccaccaccaattcgtcgcgatccgtcatcacctgctcgtcagtggcgtacaacttggcgatgccgatgtgtccctcggccagacgggccgcacgctgcgccacttttggctcgacattggtggtggaggtcaggaatccggccaccgcctgggtggagggcacggcgaggttcacgatgcgcgtgcgcgagcggatggtgggcagtacgtcctgggcactcggcgcacacagcagccagatgcagtgttcagccggctcctcgatctccttcagcagcacgttggtggtgcgctccagcatgcggtccacatcctcgatgatgatgatgcgccatggtgccgtggcaggcatttgctcggaggcggtgatgatctcgcgcacctggtcgatgccgatggtcactttgttggtggccagcactgtgacatccgggtgggtgccagcgagcacctgttgggtgacgcgcgtgggctcatcgttcatgccgtggtcggggctttccagcgccgccgcgaatgctcgggccatattggaacggccggagccgggaggcccgcaaatcagccacgactgggtgatctgacccgggtcgccctgcgcgatgcgactgagcatgtcgattaccggctgctggccgactagtgaatcccatacgctcatcggacaccgcccatcgtcacggctcctgtagacgccccggatcgcgccatcaccgtatccacatctgcaacattgtcccgcagcagtgtctgaatgtccgcttcgatggcggaccacacctgttcgatggactggctggcatcgatcacgtggaaacgattcggctcggccacggccaagtcgaggaacgcctgacgggtgcgggactggaagtcgctgccggccgactccatgcgatcttcggcatgctcaagacgattgtgggaaagcgccggatccatatccagcagatatgtgcggtcgggcagcaggttgttggtggcccacatgcttaaggctcgaatctcttctggcgtaagttcgcggccaccggcctgataagccaaggaagagtctaaatagcggtcggtgatcaccacttcaccgcgctccaatgccgggcggatggtttcggcaacgtgctgggctcggtctgcagcgaatagcagcgcctcggcgcgcggtgcgatgtcgacggcgcccccatccacaccgtgcaacagcagttggcgaatggccttgcctagcgcagtgcctcccggctcacgggtaacgaccacggtacgcccctgagcctcaagatacgcacgcagccgctcgacttgcgtggtcttgcccacgccatcgacaccttcaaacgaaacaaacagaccgctcatgctattgaccttagcgttaggcgcagagttgtgcccaacaggcagttaaaccagctctacctccgtttcaaggggctgatttggtcttttctgaaggtctacttccgtttcgaggggctgttgcccaagtagacaacgttccaaaacggcggaatgacgttggcgcggagccgttcatactcgtggttcagcagatgaccagccccttgaagcggaagtagatattctcaaaacgagaaatcagccccttgaaacgcaagtagagcaataattccgctcagccacgcttgggaattacggcggggcgctcgtagccctcgttggcggtcagccagtcgacatccttcttgacggtggcggcggtggagctgagcttttcggcgatgcgctggttggaccagcccttgtttgccagcttcttcacctcggcacggcgtccggcgcgcttggcctcggcggcattggtcgcagccgaagcagcgcccttcttggctcccttggctcccgacttcgcggcaccggcacgcccagcaccgcgacggccacgggtggagggaccagccgcacgcttttcggcgagcagtcggaaggcgtcatcaggggtgatggattcaggcgtgtactgacgcggcaccgtgcggttggtctcgccatcggtgatgtacgcgccgaaacggccgtccttgatggtcacgttcttgccggtgttcgggtccttgcccaaatcacgcagcggcggcttggcggcaccacggccacgcccgcggccgtacttaggctgcgagaacagttctttggccttgtcgatatcgaccgtgaagatctcgtcttccgaggtcagcgagcgggtctccgacttgccgtcggcacccgtcttggtcagataggggccgtagcgaccgttgttggcggccaccgtgcattcggatacctcgccggtttcggcgttggtttcctcgtatgtgcccacttcgcgcggcaggctcagtagctttagcgcgtcttccagcgacagcgattcagggctcatcgtcttgaacaacgaggccatcttcgggcgcgacgcggcggcggccgcggccttcttcgaacccttcttggccgcagaagcaccagcagtatcgccagcagcgccagccgaagcctcagccggcggcaccagcgccacatacgggccgaaacgcccattgcgcacctcgacggtaccgccggataccgggtcaacgcccagctcgcgcggtccaccggagtggttgtcgatcaaatcgcgggccacggccaccgtcagctcatccggcgcgatggtgtccggcagagacgcgcgcttcgggttgccttcgacgtccagatgctccatgtcttccagatacgggccgtaacggccgacgcgcacgtgcaggccgtcgccgatgtcgatggtgttgatggcgcgcgcgtcgatctcgccgagctgcgcgacctgctgttgcaggccttcgtgcgcctcgtcggcgttgcgggcggcgccctcgccggaaccgaagtagaagtgggtgagccagtcgcggccggattcctcgccgtgggcgatgcggtcaaggccgttttccatctcggcggtgaactggtagtcgaccagcttggggaagttcgtctcgagcaacttggtcacggagaaggcgagccagctggggatcagcgcacggccacgctcgtatacgtaaccgcgatccatgattgtggagatgatgctcgcgtaagtggacgggcgaccgatttccttggcttccagcgtcttgaccagcgtggcctcggtataacgggccggcggctgggtttcatggccgtccggttcgatgtcgcttgcctcgacctgctggccgacgctcataggcggcagggaggtgttggattcggaggcgtcacccctgacggccttgacgtccgtcttgccggcagcagcctggtccgagccagccccagcgccgggaacggcggccttgggcttgcgtccctcccccgtggccttcataaagccggggaattcgatgacagtgccggacgcttggaacacggcctcgccctcggtggggccggccggcgcagacaggcgcacggtggcggtggagccggtggcgtcagccatctggcaggcgagcgtgcgctgccagatcagcgtgtataggcgcagctggtcgccgggaagtttggaagccagctcatccgggtcgtggaagcgcgagcccgccgggcgaatacactcgtgggcttcctgcgcgccagcggttttggtggcgtactgcttgggctcggcggagaggaacttgtcgccgaaatggtaggagacggcgttgcgggcggcggtgatggcctcctgcgacagcgtcaccgaatcggttcgcatataggtgatgtagccgttctcgtacaggctttgggccgcgcgcatcacgacgcgagcacccatgccgaggcgattgccggcggtctgctgcaaggtcgaggtggtgaacggcggctgcgggcggcggcggtacggcttggtttccatcgacatcacagtgaaatcggcggtcctcagcgcttcagccacggcagtggcaccagcctcatcaagctggcgaacgttcgccgcgaacccgtccggggtcagctggccgtcggcaccgaaatccttggagccggcgagtcgcttgccgccgagcgcgatcatgcgggcggagaattcggcacgctcccccagcgcgtcaggcgcggccaacatggcgacgatatcccagtacggcacacgcttgaatgccatgcgttcgcgttcgcgttccacgatcaggcgggtggccacggactgcacgcggccggcggacaggcccgggcccaccttgcgccacagcaccggcgacagctcatagccgtacagacggtcgaggatgcggcgggtctcctgtgcgtcgaccatattgccgtccacgtcgcgcgtgttgttcagggaggcgttgatggcgttcttggtgatctcgtggaacaccatgcgcttgaccggcaccttgggtttcaaggtctgcaccaagtgccacgcgatggcctcgccctcgcgatcctcatcagtcgccagatagagttcgtcggcgttcttcagggccgatttgagttcgctgaccgtacgcttcttgtcgccgtcgacgatgtaatacggcttgaacccgtcgttgacgtccacgccgaacttgccgaacttggccttgtctgccgcgggcacctgactgggctgcgcgaggtcgcggatatgaccgaccgacgccatgacggtgtaccccttgcccaggtagtcaccgatcttgtgggccttggtcggagactccacaatcaccagtttggtagccatacccactccttatgtattgcgcgaaacacacgacgtttctggcgtcataatactcatgaatcatatccaactgccaaattccgccgttgtgccgggcaaattcggccgttcgcacctcatgttttaccgtttgggcggtgccggcggagcgccgatcaggcccagcctgcttaagggcgctgcagtgatctgacgtagggccagcaacagtccgaatgcgagcatggccacacccgtaatgcccacaacagcgctgacattcgccccctgaaccgcccaactggcgctgacattgagccccggcaccacctgccagatcacataaccgctgtaggcgagcaacagcaggcccccggtaatcaacacgctgccgacgatctgcacactcactgaggagacgcggtggcccggctcgtccataccggacttgcgtgtaaccgccagagcgagcagggccaatcccgccaccagcaggatggacatcgccacatccgaagggcgatgccattgcccgtatatcacagagacaccgacggtcgccgcccaaaccacgccgatgacgcccgccaaagctcgaaccgcgcgaggcacggtaagcagcagaatcaccgcacaggctgcggccagcatcgtgtgtccggaaggcgcggaattagcggcaggcgattcagtgttgatgatgaacggacgcggcaacagacccttgatacgggtgacggccaagcagaccacggcgaacacggcgatttgcccggccaaccaccagcggcgtcgaatcagcgccgtaataatgccgattgcggcaattgtgcagctgacagcgataaccagccaggattgtgcgacggcgttcatcatgccggtggtccaggacggtacatcgttgtgcaggtttttccagaccagttcgtcgtacgattgtccgttttcggtaaacacgcacccccaccacacgccgaagccaatagcgatcaggagcagaccgaataccacgcacagtacgcggctggagattcgcgggcgcacggtaagcgggtcaagccgggccaagccacggtcgatatcagatgccccatccgcatcgtccatgcccagcggcctgaaatcccctaaggagcctgatgtggatgccgatgtatctgaaccggagaccgggccgagcgcagccaatgggtcaacaacgttcgacgacgagtcaggctgcgctgcgcctgagccgaccagattgaccgccgcatgcgggtcgcgaattctaggggtctgtgcgtcattcatacgttcgactgtacggccgcgccccggacagggagccgtgctcgtgccagctcacggccaaatccgcacaaatggaaaacctccacgcacccgtcagaggccacttacccttgctgcattcctgccctgggggagttgggtgacatagcgccgcgtggaggctggggataagtctatggagacgtatggaccagcgcagcgacacgaaacgtgcgcgccgggtcgcacggcaggccaaccagcgcattcaggcaatattcatgcagcatcaaggaacgtgcccaattgtaagaattccggaaaaataccggcataaatgcgtgtggttacgctcacgtcaaacgattgttcaaggccaacagttacggtggacaccatggcttcttatactcgtcgtgcacattcgggaggcaatggccccgctctgaggcaaccgcgcaccgcgcaaagcagagccgaccactccgcacaggagggcccctatacgccccaggagagccgttcccgccacgcaagccacaaggcttccaatagccatcgagccccgaacaggaagaaaaagaacacaggaaaaggcaagcaccgtgtactgaaatgggtgctgggcatcttcttctccctgattggactgggcttgctggccggtatcgcagtattcgcatacctgtacaccaccaccgaggtcccgcaacccgaaaagttcgcgttggccgagaaaaccaccgtgtattacgcggacggcaccaccgcgatcggctcctacgcggaacagaatcgttcaatcatctcttgcgaggggctgccggactacatcggcaacgcgattgtggcgtccgaaaaccgtacgttctacacggataaaggtcttgatctgaagggcatcgcccgcgcattcattaataatgtgaccaagggcacgcgccaaggtggttccaccatcacccagcagtatgccgagcggtattacatgggcgaaaccacatcctatgtgggcaaggcgcgcgaggccatcgtggccatcaaaatcgcgcaaaccgagtccaaggacgaggtgctgtgcaattacatgaacaccatctatctgggccgcaactcctacggcatccaggcagcggccaaggcatacttcaataaggacgccaaggatctgacgctgtctgaagcggcgatgatcgccggcattattccgtcaccgtccacgtgggatccggccgataacgccgatatggccaaatcgcgcttcaagcgtgtgctgaacatcatgcaggaggatggttacatcactgccaagcagcacactgatgccaagttcccgcagactgccgcggtggcgcagcaaaacgaatacgcggggccgaacggttatctgctggatatggtgcgccgtgagctggtgcagtccaaggcctttaccaaagaggatttggataccggcggatacaagatcatcaccaccatcgacaagagcaagcaggaccttatgcagtccatcggcgacacccgtctggacgacatgcctgaatccctgcaaatcggcggcatagcgctggacccgaagaccggtgaagtattgtccgtatacgccggttcagattatctgtccaagcagctcaacaatgccgatcaggccgtattcgaaccgggttcgactatgaagccgttcgctttgctgggggccgcgcaatccggcgtcagcttcgatacgttgttcaacggcaattcccaccagcacttcaccggcttggatcaagaggtgaataacgctctggagaacaactggggcaacatcaatctgtatcaggccaccgccaactcggtgaacacggtgttcatgaacgtcaatgagcatctgacgccgaagcgcacggccgcaatcgcccatgaagcgggcattcagggcgatatcgatgaaaactccatgtacaacgtgctgggcatcaacgccctgaccgtgtgggatttggcgcaaggccattcgaccatcgccaacaatggtgtgaagagcaccttgcacatggtgtccaaagtgcttgattccaacaataaggacatgtacaacgcgcccagcaaaggcaccaaggtgttcgatgccaacgactgcgctttggtgcagaaggccatgcagggcaccaccacgtacggtacggcggccggcacatccaacatgctgggccgacccatcgccggcaagtccggtaccgccaacgacgaaatggcttcgtcgttcgtgggatacacccccagcatgatgaatgtgtgggctatctggaacccggacgataagggcaatccgcaggcggtgccggccttctccggatacggcatctcttccactggataccccgcccacctgttccaggagttcatggctcaggccttgcaaggtaccgaggtggagcagttcccgaccgctaaagacaatggcaagatcggtggacccgacggcacttggggcttgggcaagggacagagcagcggcctgtccaacaacaccaacaagcagtccaccgaagacgcgcagaagcaggctgagcaggacgcacagcagaaggcggccgaagaggaagccaagaagcaacagcaggcccaggagttcgcccagcagtgcctcgccaatccgagctattccaccgagtgtccgaattatcccggcaccactaccggcggagatggcaacaatggcaacaatcccggcaataccggcgggaacaacgggaacaataccggcaacgataatggtaattccggaggcaccggcgggaacaacggcaccaacggcgtcacccagtagtaagtaagcacagacaacaaagctccctctgatgcaatcagagggagctttgttttgttgttagcgctcagcgcttgcgctgggaacggttgatggcagagataatcgacttcagagcgctggtggtgatcgacgaatcgatgccgacgccccacacgatctgcgcatcatcggcctcgccgacctggcattccacgtacgaggcggccatggcgtcggtgccgacggacatggtgtgctccacgtaatccataatcgaggcgtcaacgccaaagttggaaatggcgttgaggaaggcggcgatcggaccgttgccgatgccggagacctcgcgctccacgggcgcatcgaccccgacgttcacgccgcggtcgagcaggcgagccttgagcacggtatcggagccatcctcaccggagctgacggccaccttgagcagcttcaagcggccccacggtgcgagcgaggcgtcatgagtatcgcccacaaccacaccggcggcggtcatgccggactgttcgatcggcaggtactcgtccttgaacagacgccagatatcctcgtccttgacttccttcttggtcgtgtcagcgtagtcctgcacgatcttgtcgaattcaatctgcagacgcttgggcaggtcaagattgtggttggtcttgagcaggtaggccatgccgcccttgccggactgcgagttgacgcgaatgatggcctcgtacgtgcggccgatgtccttcgggtcgatcggcaggtacggcacaagccacacgaagctgtcgagatcggcgccagcgcgctcggcggccacctgacgagcctcgagacccttcttgatggcatcctgatgcgagccggagaacgcggtgaacacgaagttgccggcgtacgggtgacgctcggagatcttgatctggttgcagtactcaaccgtcttgcggatctcgggcacgttggacaggtcaatctgcgggtcgatgccttgggtgagccagttgaggcccagcgtgaccaagtcgacgttgccggtacgctcgccgttgcccagcaggcagccttccacacggtcggcaccggccagcacggccagctcggtggcggccacgcccatgccttcgtcgttgtgcgggtggagggagagcactacggagtcacggtcgtcgaggtgggtggagacgtactccacttcgtcggcgaacacgttcggcgtggtcatttccacggtggcgggcaggttgatgatcatcgggtgctcgggagtcggcttgataacaccgatcacggcgttgcacacctcgacggcgtactccggctcggtgccggtgaaggattccggcgagtactcgtagtacaggtcgatgcccttggcctcgttctcgaggtccttgcacagttcggcggcgtcggtggcgagcttcttgatctcttccttgttcttgcggaacacgacctcgcgctgcagcacagacacggagttgtagaagtgcacgatggcgcgcttggcacccttgagcgcctcgtaagtacggcggatgaggtgctcgcggcactgggtgagcaccacgatggtcacgtcgtccggaatcagctcacgctcgatgagcatacggatgaagtcgaaatcggtttcggaagcggacgggaagcccacctcgatctccttgaatcccatggagacgagcaggttccagaaacgcagcttgcgctcggaatccatcgggttgacgagggcctgattgccgtcgcgaagatcgacggagcaccagcgcggcgcgcgctgcagtcgcttgcccggccacgtgcgctccgggtaatcaaacgggatctgcttgtcgtaggcggcgtacttgttatacggcatacgactcggcttctgcggatcgccgatgaatcgtgccggaggcagcagcgggtcgttgttccccccattggacgccgcagccactgccgcgagatcaaaaacggatgattgaccctgacccattgttcctcctttactg

SEQ ID NO: 2298 - DNA, 39774 bp, Unknown
  R119_18m  MAG No. k141_21924
aagccgaccacgaaacaggacgcccagccctctacgacaacgctatcgacaccgactacacccactcaatcggcattcaaaaaggccaaatctaacccccgcgacacgccgagccagacacacattttgacccttaacccgccgaacatgatggagaagatcggcagatcacggccgcgcgacttataggcgctttcgaattcgtcctgatgatcggagttggagcggccgtcggtcatgagcacgatggcggtggtgtattgcgaggcttccgactcgctgggcagctcgtcgagcgcgctcagcaggccttcatagatatcggtgccgccgctggcatcggtggcatcggcctcatgcagcaggtcgctggtgcttgtgccagtggccttgaccgggcggtgggcctcggtttcaaacgggatgagaatgttcacgtcgccgctggcgggctcgatgtacgacttcttggcctggtccgggtcgagcgccgcgttcaggcctttgaccacgccgttcttgccctctccagacatcgaaccggagtaatcgaccacccaaatggtccagctgggcttcctgagcgcggtctggtagacgttgagcgcgctgtcgatcaccgtggcggaggtcatggagaacgtgagtttgccgtcgctgaccgcggcgaggatgtccgcggtggagacgggcttggtggcgccggagtcgtcagcccagccgagtttgacggccttggatttggcgatgccgaacacgatcggcgtggtggaggtgctggccgcgtctttgacgatgtgcttggtgtctcccatcgaaatccacatcgaggaggcaggccagacggcgtcgtgatcctggccgccggccttgagcgcgttcataatctccagcgaacccatgtagtgcatcgtcacggctacgttggattggtcggccgctttctggatggcagtggcgacttccttgttctcggagccggaggcaatgctcagggtggcggtcggtttgccgccggacggctggaaggtctgcgtggtggcggacgtgccgttgccgtccgctgtgccgtcatcggaattattgaacgccgtgcaaccggtcaacgcgagcacgccggcacatgccgcggccgcaaccgcggcggcgcggcggcggagagaagacattatgcccataattccatggctctcccgccatctaaagcgggccgggccacaaggtgaccgcacggtgaacaatgggtgaagagctacatcagtacgcggcgcaggcaatcatggggtcgtcgtagaagccgaggatcttttcgaggtagggcttgtaagtgctgttgggcatggagaagatttcgtggcgcgattcggggaagcgcacgatgttcgcctcgccgccgccgtccttgaccagttggacgaagtgattctgcggcttattgagtacccagatgtcgcgtccggactggaagagcagcaccggcgtctccacttcggcgcaggcggacggattcagtatggcccggttgagcttcaacgcctggcgcacccattcgaacgccgcgcagtaggtctggtattcgctattctcgcaacgcagcttgaagtaccagcgttcacgcgcctcggaagcgccctcgttgccttccatcgagaactccggcgtgaagtccgactgcccgaacacacgcttcttgccgaagccgagtccgcacagcgcgccgaccagcacacgggccacgcccagcggcatgccggtggcgggggcgaccatcggggcggagagcaccgctttgtcgaacagggtggggtatcgctccaacacggccgcgccgatgccgccgcccatcgaatggcagaacaggttcagcggcatgccggccgcgtactgctggccgatggtttcggcgaagccggccagatcggccacgtagcgctgccagtcatcaatccacaccatgcagcggttgtccacgtcgcgcgcggacttgccgtggccgcgatgctcgagtacacacaccgagtagccggcaagcaggaagtaccagacgagctcgtcgtacttttcggcgaactcggtgaagccgtggctgatgacgatggccccgcggaaggtggcggtggcgccttgctcgcgaatcgcgtcgaatttggcggagtcgtagcacaggtagtgcagctggcccgagcggccgccggtgtccataatgccggacagcggctcgatcccggccgaacgttcggcggcggacggatcgaaccagccctcctcgcagcattgttcgagcgcgggcagcaccacgtcggtcatcgtttcggcgtacttgttttcgtcgatcatcgtcacctgcatggctcccatcttaggacaagcctcacgcccacacctcgcacccacaccacgacacattcccgggaatgcgtcgcaagcctgcgcgccactgaccgcacaggcgcgtaggttgtgaggtatgagcgaaaccaatgatgtcaatgacgcaatcaagcatttcccacgcctccgggcgcgcacgctgcgcttcggctgcggcgcaccgcgctccgcacagaccgtgggcgacggctcgcgggccctgttcctgcgctccgacggccccgaggatctggtgaccgcactgtggctgagctggttcgacgagtccggcgaacaccatgagaccaagctggccgacccgcgcgaactgctgggcgcaaccgccgacagcgaggacgtgccggccgaggagaaggcccgccgcgagcgtgcgcgcgaaggcggcaccggcatcgtcggatactccgcagatgacgacggcaatcgcatcgtgttcaccatcaacggccgcctgttcctgaccgacatcgattggaatgacgagaccggcgcacccgagccgcacacccgtgaactggccggcgaatggctcgatgaggacccggcgatgtacacgccggtgctgaacccgcgcatcgccccggatggcgaacatgtgctgtacaccacgggcagctacctgatgctggtcgatatcggcggcgaactaggtgaccgcatcaccgccgtctacggcgtgagcgtggaggatgaggacggcaatccggccgaaaacacgtggaaaatcggtctggccgagttcgtggccggcgaggagatggaccgttacgacggtttctggtgggccccggattcgcagcatgtgctgttcgaatccttcgacaccgccgacgagccgacctggtacatcagcgatccggccgaccccgagaagccggccgccggccgccgctacccgcgcgcgctgacccgcaacgccgacgtgtacctgaccgtgatcacgctggcgttcgatgagaacgaccggtacgcgggcatcaccggcaacgccgatgtggattgggatcgcgaggcgtacgagtatgtggccgccgtgagctggcgtcgcggccacgatccgctggtgctggtgcagaaccgccgccagacccgcgaccaggtgctcgaggtggcggtcgcggcggatggggccgcgctgggcgccacgcgtgtgcttgaggagcacgcgaacgagcagtggatcgacctgattcacggcacgcccgcctacacgccggatgatcgtctggtgtgctcgctcaacgatatggccacggataccaaccgtctgacggtggacggccgaccgttcacgccggctggctggaacgtgcgcacggtgctcgccgtgaccgacgaggacgtgctggccgtggtgcagcgtgcgcccgaaatcgcgaccgaggtgccgcgcgcctgggccggctcgggtgccgcttcggatgccgagtctctgttcggcggccatgacgcccgcagcttcgatgtggtgagcatgggatatgacggctcggtcgcgccgatcacgaccgagcccggtcagtggacggcctcacgcggcgcacgcggcatggtggtgtctgggcgcgatatgcgttccgcccgcgcccggatgcggcacatcgtcacgcgacgcgccgtcggcggcgtcaccgatgccgtcatcgccgccaacaccagcgatgccgccaacaccaccgacatcaccgccgccgacatcaccagcaccgccgcggaacccgggttcacgccgaacgtcacgttcacgcggctgggcgagcaccggttgtacacggcgatcatcgcgccgagcccgtccagcccgtacgcccatgccgacaaactgccggtgctgatgaagccgtacggcgggcccggcttccagcaggtcgtcgcctcccagtccttctactgggagggccagtggtgggccgaccagggcttcctggtggtcacggcggacggccgtggcaccacaggccgcggcccggcctgggatcgcgcaatcttcgagaacatgaagggcgtgacgctggccgatcagatcgaagccgtcaacgctcttcccgaggccgtctccaggctcaacgccgatgggcgcaggcccggcgttcccgcaccggacctcgacaaggtgtgtatgatcggctggtcgtacggcggcttcctgtccgcactggccgtgctggacgcgccgaacgtgttcaaggccgcgtgcgccggcgccccgcccaccgactggacgctgtacgacacgcattacaccgagcgctatctgggcctcgacccggatgtctactaccgcaacggcatcgtgcaggacgcaccgaaactcgagcgcccgcttatgctgatccacggtttcgccgacgacaacgtcaccatcgcccatagcctgcgcctctcgcaagccctgatggcggcgggtcgcccgcacaccttcctgccgttgacgggcatcacccatatgaccaacgacgagaccgtagccgaaaacctgctcaccctccagcgcgacttcctgcgcgacgccctggcctgaccggccccgggcgcgccgtgggccgtgacgtccgcggcacgcccggggcccgcgcccacacggcatgcggaaaaacggctcaggtggtgcgccgcacccatttccgccctgaatttttggatatttttggatattttgcacccatcgtcatgtgagagaccggttttttgcctcatattcccatcaccgcgtaggatgggtgaggattagaaagggaggactatgagcgttctcgaccgttttgaaaaaagcgtggaaggtgcagtcaacggagtattcgccaagtttggctccaaagacctgcagcctgtcgatctttccagcgccttggagcgcgagattgacgccgaggccatgcccgtgggccgtgaccgcacggtggccccgaatgaataccgtttcaagctcagtactcctgacttcgaccgtatcgaggcatggggtagcgagaccctggccaacgaactggccgataacctcaccgagtacgcgaagagccagcattacgccttcgtgggcccggtgatcgtgatcttcgaggaagaccttgacctgtccaagggcaacttcaacctcacctccgaatccgtgcagggcaatgccgtgccggtcaccaccgatgcgcagaccgaggacagcccggtgctcgaggtgaacggcaaccagtacctgctcaccaaagacaagacggtaatcggccgcggttccggctgcgatatcgtcatcgacgatccgggcatctcccgcaagcacctggaaatcgacatcacggataacggcgtgatcgcccgcgacctgggttcgaccaacggcacgtacgtggagggccaccaagtgcccgccgccacgctgctcgatggcaacaccatcaccatcggccgtacccgcatcctgtactgggcctccgcccaagcccaggagtagtcgagcacacgcccgaaagtcgtccacttatgaccgaactgacattcgccctgctcaagtatggattcctgatcctgctgtggatattcatctggctggccgtacgttcgctgcgcaaggacatcgagacgttcagtccgcgaccttcgcgcgcgcgtcgtcgccgtgagcgtgaagtgcataaggccaaggccgaaacgccgcaggcagctgcgccgcgcccgcatcgccagcccagcgcttccgcgtcgtccgccgcctcggcgcagcctaccctgttggtcatcatcgatggtccgcttgccggcagctccgtgccgctggccgaagccgacatcacgcttggccgcgccgcctcgaacaccgtggtgctcgatgacgaattcgtgtcttcccaccatgcccgcgtctaccgtgacacgcgctccaggcagtgggccattgaagacctgaactccaccaatggcaccgtggtcaaccagcagcgcatcaaccgccccaccatcctgcccgctcgtattcctgtgcgcatcggcgccaccaccttcgaactgaggtagccgcatgccaaaatccgccgcttcacaaccgctgttcctgtattccaccacggtgtccgatgtgggcactgtgcgcgcgaacaatcaggattcctccttcgccggcgagcatctcatcgccatgtgcgacggcatgggcggtcacgccggcggcgatacggcatcctccatcgccatccggtcactggcccacatcgagcaggacgacaccggcggcaacgtcgagacgatctcccgcatgatggaaacctccgttatggccgcgcatgacgccatcgtcggcaaggccaagcgcgaacgcaagcttgccggcatgggcaccaccgttaccgcagtggcattggtggccggctactgggtcatcgcccatatcggcgattcgcgcgcctacctgctgcgcgacggacacctgagccgcatcacgtgcgaccacagctacgtgcagcacctcatcaacaccggtcgtatcaccccgtccgaagccaagaaccacccgcagcgcaacgtcgtgatgcgcgtgcttggcgactttgacattgacccgcgcccggatatttcgattcgccgagcccaccccgccgaccgttggctgctgtgctcggacggtctgtgcggtgtgctggaagattccaccatcgaagagacgatgaccacgctgtccgatcagggcgaatgcgcgcagcgtctggtgcagatggcactgcgggcgggcagcaccgataatgtcacggccgttattgcggatgccacgttggcgttggatgccgatgcgttcgatctgccgcaccaaacgccgttggtcggcggtgccgccagccgtaatcttgagccgattgccgacatcgtcaacgagccggtggctaccgcgcccgcactgcgggaggatgattcccccgcccagcgcgccgcagcattgattcagcccgccagcgcgcacgaggcggagaccgcgcaaaccacggccaaaccgtcgtccacacgcgtggtgcagccgtccaccgtccgcgaggagaccggtgaacgagccaatcccgataccggtgagattccggtggtgcaaaagccggatgggcgcctgtccgccgaccccaacgacccggatgtggccaaagccatccgcgatgagcaggtcgagcagaagaaggccacgcgtaccaagaagcgccgcaataagcttgcggtgattattacctgcattcttgccgtgctggcattggccggcgctggctggggcgcgtacacgtggagccagacgcactactacgtgggagatagcaacggcaccgtggccatttatcgtggcgtgccgaccaatctctttggacttgagctttcgcacgaagtgcagaccaccaatatcgccaccgcggacctgcctcagacatggcgtgaccagctgagccaaggcatcacagtcggttcgttggacgaagcgcagtcgcatgtgggtattatccgcaccgaaatgcgcaaactggccaagcagcaggaagccgacgccgccaagaaggccgaggcgtccaattccccggacagttccaaagacagctcccagagcgattccaaggacagcaccgaggattcgtccagccagtccggctcctcgtcagacaagtccggttcgtcaagctcatccgattcctcggataaatccggtatcggagcggccgacaacgcggccacgggagattctcaatgatcgttacccgtctacgtcagatttctttgttgctgattgccatggcgatcagcgcgttggcgttcatccagatgttccaacgcaccgccggcgaattccctatgcaatacgccggcatgctggcattggtcgtagtgctgtttctggtgctgtgggggctgattgtgcgcttccagccgtacgccagccagtcgattctgccttgcgtgctactgctgaccgccaccggcgtgaccatgatcgcccgcatcgaccagagcgaaggttgggcggtggcccaacgccagctggtgtggctgtgcatcgccatcgtgctttccgcgctgctcatcatcttcctgaaggactaccgcgtgctacgacgcttctcctatgtgtcgatggtggtgggcctggtgctgctgctcgccccgatgctgccgttcatcggcaaggaggtgaacggcgcgcgcatctggatcaggattccgggattgggccagttccagccgggcgagttcgccaaactgttcctcgcgttcttcttcgctgcctacctgttcgatcatcgcgaccagctggccgtgggcggtaagaagatgctcggtctgcagctgccgcgtatcaaggatctcggcccgatcatcgtggtgtggatcgcctcgatgggcgtgctcgtcatgcagcatgatctgggcacctcgcttatgttcttcgccatgttcgtggccatgctgtacacggccaccggccgtaaaagctggatcatcatcggtctgatcgcgttcgccgcgggtgccgtgctggccgcaggcatgttcagccacgtgggtcagcgcatcgacgcctggctgcacccgttcagcaacgagcaatacaacaagacccccggcggctcctggcagctggtcaccggcattttcggcctggcatcaggcggcatgctcggcaccggtctcggccaaggccatccttcgctcgttacgttcgcgaactccgatttcatctacgcctctctgggcgaggaactcggtctgatgggcgtcctggccattttgatgctctacctgctcatcattgcctccggcttcatcaccgccatgaaaatcaaggatggcttcggcaagctgctcgcttccggactggtgttcaccatggccttccaagtgttcaccgtggtcggcggcatcacgctggtgattcctctgaccggtctgaccctgccctatatggcggccggcggctccagtctgatcgccaactatattctcgcgaccctgctcatcatcatctcgaactcggccaatgcgcccgagccggagctgacctcggatacgttccagtacgaggctttggccgtgctgcgcaacaaggaacttgaggccagggcccgcgccactgagccgatcgttcagcctcgcagcgcgtcggctacggcgtcgcagtccgaggcggaatcgtttgacgaccccattgtggacatcaccaagcacgcgccagacacacttgaggcacccgaagtgcccgcaattgtgacctctgcgggctctgttgcggcccccatcgccgagcccattgtggatgccaccactccggcgtatgccggcgccgatgaaccgtacacgcctaccggtacgattcccccgcttcctcccgttaacggaggcactcgcgtatgaacaaatatcttcgtcagcttttcaccgccgtggtcgcgctgttcgtgattctcggcctgtcgtccaccatcatcatggcggtacgggccaacgcgctgaacaacgatccgcgcaacgcccgttcgctgtaccaccagctcggtgcctaccgcggtgccatcctggcctcggacggcacggtcatggccaaatccgagccggtcaacgacgcattcaaatacctgcgtacctattccaacggtccgctgtatgctccggtcaccggcttcttctccatcaaccagaccgccgatcgcggtctggaagcctcccgcagcatgctgctcaacggtgaggccgattcattgatctggcagcgggccaaggccatgctcaccggcactacgaatcagggcgcgtccatcgaaacctccatcgaccccaagctgcagcaggttgcctacgatcagctcggtacgcgcgatggtgcggcggtggccatcgaagtcagcaccggtcgtatcctcgccatggtgagcacgcccagttatgatccgaacaaactggcgacccatgacaccaaagccgcgtctcaggcctacaacgaactttctgcgggccaaaatagcccactaaatagcccactaatcaaccgcgccacctcgcagctgtacccgccagggtccacgttcaagaccatcgtcgcctcggctgcgctggaaaccggcgaatatcagacggacacgaagattcctgcaggctccagctataccttgccgggaaccgccacacagctgccgaacgacgaggcacagggcgatggcgtcaacggacagatctccctgcaagaggccgtcgcatggtcgtccaacaccgctttcgcccagcttggcgtgaaactcggcgcgagcaaggtttcggacatggccaccaagctcgggttcggcagcaccatcaccattgacggcaccgaatccacgggcaccccgatgacggccaccgcgtccacattcccctctgatccgaccgacgacaagcttgcgctggcatccatcggccaaggcgacaccacggccacgccgttgcagatggcgatggtcgcgcaggcaatcgccaacaatggcaaactgatgcagcccacgctggtcgatcgtgtgcgcgccgccgatctcaccgtactttcgcagaccaaaccgcaaaccatggccaacgcgttcagcaaggattccgcagacaagctcaccacgatgatggagagcgtggtgaccgaggccaatccgcagctggccatcgacggcatcaaggtggcggccaaaaccggtaccgcacaaatcggtatcgacaactctgccatcgacggctgggggatcggtttcgcgccggcggacgatccgcaaatcgccgtcgcggtgttggtgcataacacagatgtacacggttcgctcgccgctggcccgatcatgcgcgcgatgatgcaggaggctttgcagcagtgaaacttatcgaaggacagcttattcaccgccgatatcgtcttgattcgcgtcttgcgcaaggcggtatgggcgaggtctggaaaggctacgatattcagctcggccgtgaagtggccatcaaggcgctgcgctcggacgtgaccaacgccgaggccaagctgcgccgcctgcgtgccgaagcccataattccgccaatctggcgcacccgaacatcgctgcgttgttcgaatactacgagcatgacggcatcggctttctgattatggaatacgtcccctcgaaatcgttggcggatctgttccacagcaagggcgcgatggatcccatcgaactgctgcccattctgattcagaccgcgcgaggcctattcgtggcccactcgcacggcgtgattcatcgtgacgtcaagccggccaacatcatggtttccgacaccggcgaagtgaagatcaccgatttcggcgtgagctactccaccggccaaggccagatcacccaggacggcatggtggtgggcaccgcacaatacatctcccccgagcaggcgcagggccagcaggccacgccgcaatcggacatctattcactgggcgtagtggcgtacgagggccttgccgggcatcgtccgttcaccggcaccactccggtcgatatcgccgcagcgcacgtgaacaatcccgtgcctccgctgccgaactcggtggacgtccagttacgcgaatttgtcatgtcgatgctggccaaggacccgttggatcgcccgaaagacgcgctggtggtgtcccgtacgctggcacgcatcgaacgccgtctgctggatcagcagaccgaaatggccgacaccaccatggccacgtccggcaatcgactgccgcgccgagtgaccagcacgccacgcattgttttggaggccccggcctcaagattgggagggaataagcaatgagcaccagtatgcccaccgcattggccggcggacgctaccagcttggccagctcatcggtcgtggcggcatggccgaggtccacgtggctcttgacacccgtctgggccgtaccgtggccgtgaaaatcatgcgcgccgatctggccaacgacgacatcttcctggcccgtttccgccgcgaagcacacgccgtggcccagatgaacaacccgaacatcgtgaacatctacgattcgggcgaagaactggtttcttccgaaagcggcgataccgagcgtttgccgtacatcgtcatggaatacgtcaagggccagaccctgcgcgacatcatcaaggtcaacggcgcactcagccagcgcgactgcgaacaggtgatgttgggcgtgcttaacgcgctcgactattcgcatcgcatgggcattatccaccgcgatatcaagcccggcaacatcatgatttccgagcagggcgcggtcaaggtcatggacttcggcatcgcccgcgctctggacgattccgcaaccaccatgacccagtcgcagggcgtggtgggcaccgcacagtacctttctcccgagcaggcgcgcggcgagaccgtcgacatgcgttccgacctgtattccgccggctgcgtgctctacgagatgcttaccgggcgcccgccgtttaccggcgattccgctgtggccatcgcctaccagcatgtctccgaagtcgccacgccgccatccgccgtggtgccggggctgccgaagatgtgggattcaatctgcgccaaggccatggccaaggaccgacagaaccgctacgccacggcctccgaattcaagaccgacatcctgacctacatgaacggcggcgtgccggtggcggccgcgttcaacccattgacggacctgtcgaatatgaaggcccgcaaggaagccgaacgtgatttgcccaccacgccggtggaaccgcagcagcagcccacccaggcattcaacccggtgaccggtcagttcgagcagattccaccggccaatggtgccaactcagcggcgttgcagtcccgtgcgcagcagcgtgcggcggcggccaaggccaagaagcgcaagaagatcatcatcggttcggcgatcgcggcgattgtcgcggtgctcgtcattgtgggcatcatgttcgccatgaacggctccgacaacaagtcctctgaagacaccgtcaccatccctgaagtgtgcaacgcttccacgtccaaggacaacatcaagctcaagcttgagagattgggcttgaagatgaccgaaaagcaagacaccgactccaccgagccggaaggcacctgcaccaagatgagcccggacgccggctccaaggtggccaggggatctgccgtgaaggtgtggttctccgcaggcccgcagtccactcaggttccggatgtcaaggagcgcagccaggaagaggcgcgcagcattctggaaagcgccgggttcaaggtgaacgccaccgtcaaaaccgaagacagcgccgacatcgccaaggatatggtgacgagaaccgatcctgccgccggtcagtcggttcccaagggcaccaccatcaccatatatgtttcttccggcatgaccaccgtaccgagcaatttggtcggtcagtcgaaggacagcgtgctacagcagtatgagggcaagttcagcttcaccgtggagcaggaaagctccgatacggtggaggccggtctgattacccgcgtaagccccgattcgggctcttccatcgcgcagggcgggtccatcaccatctgggtgtccacgggcaaggaaaaggtcgctgtaccgaatatcaccgctggcactgactacgccaccgccgaactcatgctcaaggccgtgggcctcaaggctcaggccagtggcccaaccgacagcaccgctgtggtagtcagcatcaatcctggcgctggcagccaagtagatgcgggatcgaccgtcaccattaccacgaaggccggcagcaccggaggcgacaccggtaccggagacggtggcaacggcaacggtgccaacaacggcaacggggggcggaacccgtgagtgagtgagcgccgggcgtgtgtgttgcgcatacgcaacgcacatagcgcaacacatgcgcaacacatgcgcaacgtaaacacgcaacgcaatcacacaacgcaaaggggaggggcttctgcacccctcccctttgctgtataaagagctatcccagcgcaacattcccgggaaagcgtcgccgcgcgcggaaaagctacttcgtaaccttgggctgaaggccggcggacttggccacggcgttgtcttggccgcagaccttaagccagttggccagcagacggtagccgtcctgggtcatcacggattcgggatggaattgcacggcgtacatcggcttgcccttgaccttgatgccctgaataatgtggtcgccctgcgtccacgcggtaaccaccagcgtatccggcaccgaatcgggctcgacggccaacgaatggtagcgggtggcggtcatggggttggccacgccctcgaaaatctcgtcatcgatatgttccaccaagctggtcttgccatgcatgatggtgggcgcatggcccacagtgcagccatacacctcggcgagcgcctgcaagcccaggcacacaccaaacatcggcacgccgctggccgcgcacaggcgaatcatatcctcactggcaccggattcggccggagcgccagggccgggagaaatcagcacgccatcgtaaccgtccagtacacccggcgcggctgggtcgatagcgtcgttacgcaccacatcaacagtggcgccaagggtttgcagatagcctacgatcgtgtagacgaaggaatcgtagttatccaccaccaaaatatgcgcggaatcggtcatagggctctccttgagggacgtgtactgcaagccatagtactaggctgccgtcagctcactgccacgaagttcgacatctgctgtaggaatgggatattggcggcggcccaagggaatccccactggaacagcgccgcggcggctgcgaacagcagcagagccagcagcagccatcgaatcggtgccacgccgggctgcagacgcaacagtccgccatagatgctggcatccgggcggcgacgctcacccgcgcgaatctcgcgcagcaccggccagcgccatgccaccgcagcggcgatgaacagaaccagccacactaccagcgcgccgaataccaccttgtccagcgagccaatgcgggaagcgatcgagggggtttcggtggtggagaacttcactgcaccggacgaatcagtagtagccagctctttgggcacgccatcagacactttggcccagtacgccaactcaccatagctgatccatcgatgggtgggggtggagtatttcggctcacaggtggtcagtgtgatcatgcgtttggtgggattggcagtggagtcttccggattgggcgcgatcacatacacgtccgtgggcagcacaatctcgtgccgggtgtagtggtagacgtaccagtaatccttggtacgaacgatgatgggatcgccttcctgcaacttgtccacatcgcccaacggctgcccgtagccgttgcggtggccggcgacggcgaagttgccgacctgccccggcatctgggtggtgtcgtaatggcccagaccgtggcgattgagctgctcgagcgtggtgccttccacgatgttgcgatgccattgggagccgaagcgcggaatgtagatctgcgcaatcaagtcgccatatttcgcgtctttcggctgtactggagcatcgccctcctgggctttggcgatggtgaccgttcccccgttgttgctggggtcgctccagtcgacggactgggtggtttcgttctgggctcgctccgcctcgacaccggtccaccacatctgccagacgatgtacagggcgcaaatcacggcagcggtaatcagcagttcggcgcagatgccgagtgcctgccagatcaggctccgctggggcgaagacgcgccgcgtactgcggcacgacgggaccttgccctgctggcattggccgggtctgccgccattcgtgcggcgtcgtcctcggggaagggctgtacgtccgacacggacgcgagatcaatgggcgccggtgcgccgctgttgtgcctgccgtgtctcattgctgagtctgctcctcatctgtggtctttgacgtatcgaccgtggcatatttcaactgctgcagcaaggcggcggtagcggggaactgaaggccctcggcattctccaccttgtagccaatgccaaacgcggtcacatattgcttaagaatggtaatggcttcggagtcgttcaacgctgcgcgaagtctttgcgggtcaccaatcgcggaaatggtgaatggcggcgagtatttcttaccgtgcaacgacagcacgttgccggaacagatgaccgccgaattgaacagcacccgctgatccataatcatcagcgcatcggcaccgccggcccacaaggcattcaccaccgattcgacgtcctgctgatgaatcacgtaatcgttgatattggcggtcgtaccattgttgttgacggcgttctcccataacggagaatcatccagcgttaccgttacgccgctgccgctgagcgcgggcagcatcaggctggaatccacattgctggagtccttgccttggttctgcgtgctgtcagtaccgtcggtgccatcggccttgagcgcgtccgtaagattggcgacctgttcggtcagatcactgacgtcctgctgcagctggttggcctcgcccacgccttgctccaccagatcggccgtatcgttggtggcggcaaccgtacgattgaccctcacgttggtgctcagcagaaaaccggtcaaggcaatgacgacgaataccgcgacaccaccccatagggagtgccgtgcgccgtgcttacctacatgtctggccatgaatttcctgtcttcttgccgactctggtcgccgctttcgagtgtagccactattatgacttttagcctattgaatggagactatgctgatggctgacgaagagctgcacgagaccgactcgaacaaccagaaggactggcagagcgagacctcatccagcaccgctgctgacgagaccgccaacaaagacaccaagcagaacgcagagaacgcttctgccgaggaagacgcggcttacggcgtgaatatggagcaggtgcaggccgtgctcaacgccactgccgataaggccacgctgaccccgcagatgcagcgcatgatgaaccgtcaggcggagaacaccaagcgtgttgaagaaaccattaagggcaccaagtcgaacccgcgttggttcgtgccgctgttctgcgcgtttatgatcatcggcctgatttggtgtgtggtgtactacctctccccgtccggctcctggccgattccgaacatcggcgcgtggaacctgggcatcggcttcgccctgatcatgatcggattcctgatgacgatgggatggcgctgagttccgactcgttgcgcttatctatcggtagatcgtttttctatcgttaggttgttcttagttcttatgcgaaaggccgacctcccgtatgcggaggccggcctttttcgtgccttcacctgttcatccacagctatccaccacttatccacgacttatccacgacttatccactacgttatccacagcctgtggatgaatcacacccatgtagttttccaccgaatgtggaaaaccatgtggataagtggtggataagcggcgtttctcggtgtatatctcgtgcataactttggcttggcatatatcgccacagcgagggaacagttatacacccgagttatccactgcaacaaacccagtaataccgcggcattcctaacttatccacataagttatccacagtcttatgcacttttctacacacttgtgcacaagtcaccattgtggataactcgttatcgtggataactcgtcattgcgcgcatctcattactgtggataccttcattactgtggataccttcatacagcgcatgcccactcaccgaatgacgatatccacatcgctaatatccacatcgccgctttccgtacatacactgatgccgggcactgcatgttccgcaatacccggcatcaatcgttttttacagccatatcaagccatatcagtgcagggagccgaaactcatccacccgtaaggattggccatattgcacaacagaatcaacacaacgaccagcaccaccatggcccagccgtaaacctgcatacgccatttcaggcttttacctcgccacgccggcacaccacccaccagcagccatgtgagtattccacccactacaaagccgccgacatgcgcctgccacgccacgcccccgaccacgaacggcaaggcgaagttcaccgccatccagatcaacatggagcggatatcggcgccgatacggcgatataccaccagcaatgatgcaaacaggccaaataaggctccagaagccccataggctgccatctgccagccgatgcctcccggagccaccgcagcccacaccataagtcccagagagccgccaaggccggaaatcacatacagtcccaagaaccgccagtggccgatcattcgttccagcactgggcccacggaatacagggcgatcatgttgaacaggatatgcaatagcgagttcggcgcatgcaggaacatcgaggtgatgagcgtccacggctcagccaccagtctgaccggagccgccatgccgaggtacatcaaccaagccctcaggcccggggcaataaatcccagcaatacctccagtagccacactgccacgcacgcaccaatcagcgcccaggtcatcaccggaccaccgcgctcccactggtatcgaatctcccgttgtgtaggaatatgcatgcaatccactgtatcgaaggtctcggatgcgtttcacgcgccgcgaagatgctgagccgaccgagggcatgcgggcgtggatgaatcgcccacgaatgtcattccacccaatcgtcacaaacagcggcctagaatagggagcagagtcggtctgaatgggcataccgaccagacgatccctagggaaaggagccgtcatggagaacaagtcttctaacggttggaagttcttcgcgctgctgttcggcggattgctcgccgcgcttgttggcttgtacatctacaagcagcagaacccagattacgatccgtgggaggagccgtgggagaacagctcctcgccggtcgacctgggtctgaacaaggccgaggatgaggccgatggcgaggcggaagccgccccggccgaagcctgatagcacagtttttcaacgcaagaagccccgcaaccgatggatgtcggttgcggggcttcttatgttctggttcccctctccgaggggagccgccccaccgactcagtcagccagaggagcagtgtgccagatatgcggagccgttaagcgggaagcccggcgggcttcccgtaggcgacgccgagcggcgacagccgcgaggtagaaaccagcacgtagccggcgcgctgctccggcggccgtcaggccagaggagcagtgtgccagatacgttccaaatagtcttccatggagcggtcggagctgaagtagccggagttggccacgttgagcagggccttgcggttccattcgagctcatcggcgtagagggcctcgatctcggactggatgtccatgtaggcggagaagtcggccagggtcatgaaccagtccttggtcagccagtcggccacaagcggggagtaggcgttgcggtcgccgttggagaaggtgccgtcggccaccagatcgatggcctgcttcaggcgcggatcggcctcgtagtaggaggcgggattgtagccctcggcgtacttcttctcgacctcgtcgacggtcatgccgaacaggaagaagttctcggcgccgacgcgctcacggatctcgacgttcgcgccgtccagcgtacccacggtcagggcgccgttcagagcgaacttcatgttgccggtaccggaagcttccttgccggcctgggagatctgctcgtcaagctcggtggccgggatgaggttctgagccatctcgacgttgtagttcggcagcatgtggacggcgagcttgcccttgacggccggatcgctgctgatcacgcgggaaacgttgttgatcagctcgatggtcatcttggccaggtagtagcccggagcggccttggcaccgaagaacacggtgcgcggagtgatgtcctcggccttgaccttgccggacttgatgtcggcgtagttggagatcacggcgagaatcttcagagactggcgcttgtactcgtgcagacgcttgaccatggtgttgaacagggtgttctcgtcgatatcgatgccgtagtggtccttggcgaagcccacgaatgcgtgcttgttggccttcttgacggcggcgaacttcttgacgaactcatcgtccttggccagcggctcgaggcccttgagcagttccagatcggcgacccacttgtcggtgcccaggccctcggtgatgaggtcggacaggcgcgggttggcgagcttgacgaagcgacgcggggtcacgccgttggtcacgttggtgaacttgtccgggtagacgtcggagaagttcttgagggtgacgtccttgagcagctgggagtgcagctcggcaacgccgttgacgtgggagccgccgtaggtggccaggtaggccatgcgcacggcgtcgccagtgtagatggccatgtccttgatggtgtcggcggcaacgcccttggccttgagctcggcctcgaactgagcgttgatcttctcgatgatctcaaggtgacgcggcagcagctcgccgatcaggctggccggccagacctcaagggcctccggcagcagggtgtggcaggtgtagttgaaggtcttggtggtgatggaccacgcggtatcccagtcgtagccgtactcatcgatgaggatgcgcatgagctcggggatgccgatcaccgggtgggtgtcgttgagctggaagacgatcttgttcgggaaggtcgtcaggtccggcttgtcctgccccgggtagaagacgcggatggcgtcgtgcagggatgcggagacgaagaagtactgctgctcgaggcgcagttccttaccgaccttggtggagtcttccgggtagagaatcttggagatgttctcggccttgacctgcggggccacggcgtccatgtactcggaacggttgaaggcgagcagatcgaactcgtcgtagctcttggcggtccacaggcgcagggtgttcacacgctgggacttgtagccgggaaccatgtagtccaccggcacggcgcgcacggaccaggccggttcccaggtcttggtgccgtcggcgttttcgacgaccttgccaccgaaggagaccttctgatcacggttgtagtcggtgtggccccacggctcttcgttggccagccagtagtccggggtttcgacctgcttgccgttctcgtcgaacttctgcttgaagatgccgtacttgtactggatgccgtagccgaaggccggcacgccgagggaggcgagggagtcgatgaagcaggcggccagacggccgaggccaccgttgccgaggcccggctcgtattcgacgtccacgatgtccttcggcttgaagccaagggcttccacagccttgtcgaactggtcggtcaggccagcgttcagcagtgcgttctccagctgcttacccatcaagaactcggcggacaggtagccgacggccttggtgttgccgttgacggtgtcggcctgggtcttgaaccaggagtcggcaaggtggttgcgcacggccttggatgcggcgacatacacgtcagcaggggtggcctgctcggcggtgacgttttgagtgtatttcagttgttcacgaatctcgtcggcgaattgttccgccgtgacaggagacttcggtgcggtgatttcggtcattctgactttccttccgggataagtgcccgtgtttattatgccgcgcgataggtatcgtcgcatagacgtaagcatgaactctccgtaacgacgatggcggagcgttcttgcatacgttctcattgagagcgtatcacatatctcacggttccgcatcctacagtatgccatcgtttgcataccttgcggtttcgcgtgccggtgccatgatggagcatatggcagtaattctcgaaaaagacttgaaacgagggcacgacgcactggtgcaatggcgtgccgcagccctggaactggccgacaacacaccacatcgcctgaccacctcccccgttctgccgcgcccggtgtgggcgatggctgtgcgctactcgctgttcctgctggagcggcgcgcgcccggccctggcgtggaggtgcgcgttgcgccgtggggtgcggtcaaaatcctggacggcccggaatcggacccgcacaacctcactccaccggacgtcatcgaactggagcccgaggtctggctacggctggcctgcggcatcaccacgtgggcagaggaaaaggacgccggccacatcagcgcggtcggagagcgcgacgatctgagcgacctgctgccgctgtaaatcgtcggatgcccggtatcggatgccctttatcagaactgtgcgatgctccaacgctggatgtgctcggcccagtggtccggcgtgggcagggtgacgaggctgcgcatcgtcagcgcgtaagcggcggcggccaccagcacggcggccagaatcaggcaggtcggcccgtagccgatggtctgcataccccagccggcgagtgccacggccacgccataggcaccgtactgcaacaccatgctgcccgctccaacgcggccgagcttgtccttgcccaccaaggtattgctgaggcctccaagcaccgcgttgcccgcgggcaatgccagtaccgagcaggccacaaatatggccttgccaaccatggagggcaccaacgcggcaccggtgaatcctacagccagcaagacgaacatcacgcccaccagtacgccgccgggcacacggttgaccagttgcgaggccatcagtgcgcccagcaacatgccaacggcggaggcggcgttgatggatccggcggatatcagctggctgccaccttgggagatgtccagcgcggtcagcagcaggaaggcattgctggcaccggtcaccatggccgctgcgatgatgagatggcgttggaaccggtcgcgcagcagccagatcatgccgtccagtgcgtcgcgccagcgtggggcggagtcatcggcatcatcggcgtccgagacggccccgacctccgaaccggtatcaacattgcccggacggccgctatcgctcacagtcgcacgtttccaatagcggcggatacgccatgcggacaccatgcccagcacgctcagcaccgcgctggtcagaaacggcaccgcatgtcccacggtcatcagcagaccgcccaacggaccacccaccaacgtgaccgtcgaatcacgagcatcattcaacgccatcgcgtgcggcagctgctcatccggcaccacgccacgcagcatggcattcgacgtattctccaacagcccatcgcgcaccgaaaacagcacgacgatacacagcagcgcgatcggaagcacgtgggcatacggtccgccgaatgccggagcgtttgccccgttaaccccatggccgctcgtcttcggcgcattgccgaacagcatcaccgctgccgccgccaccgccgagagcaccacaccggacgcaccccagatcagcatgagcgtacggcgatcataccggtcctgaatcacgccgccggcaaggcccagcaccgtctgcaccaccacgcagatgctttccgtcgtggtggcggcggcagaggatcctgtcgtggcgagcatgatcagcggcaccgcgaacgcgatcaggctggcaccgaccgcgccggacgtgtccgcagcaagccaccatccgtaatcagttccccgccataaatccgtatcacttgccatcgttgccctccctgggattggtccttatggacgccaccatagggagccgccgccgagccgaacacccgcaatcctcggttatggggacatggctgcggtcgtcgtcctcatttgtgaggacagggcacaatcagcgccggacgccggacatcgcagcttctgccccatcagccccgcacgcatggaatgcgcacgtaaatcatccatacgccatcgtccgaacgggcggtcaactcaccgcccaactcctgcacacgggtgcgatgcatggccagcccacgccccgaccgctcctgcgcggacaggccactctgcgcgtcggcatcgtcacggatatcgttggtctcgcgaatctcaatccattcgggagacagggtgacgaacagcaggtaggaatcatctcccgccggtgcatggcggcggatattcgtgccgatctccgtcatcagcgacagcgcctcggccgccgcctcggggtccacgaccatgacgatgccgttgaccgcggccgtcccccgatagccctgcgcctccagaaactcctcggtatcggtgatctgcgccttcacacgcgtgacgaaggattgcggcatgcccgctgtggattgcgtacggtcatcgccaccggcgttctcgggcacggcattgtcaaccacctcattcgcaatcgctggacagctcccggcacctaccgggtcacgagccagggcggattctttcgtcggcgaatcaacctgccctgattctgcagtcgccacctcagatgtcccggtgccaccgaccggcaaggactcgtcccggaagccggcgtccattccgctctgctcggtcagaaaatcgatgatgccatgcacttccgcaaaggcacgttggctgcgatccagcacgcgctgccagtcgccaccatcgatgccggctggcgcggccagattattccgggcgatggtcgagatatacgtcagatcgttggacagcgtgtcgtgcagttcgatcgcgagctggttgccgtggcgcagatcggccagcgccgattccatctgctcgttttcgttctcctgattcaccacgcgcttgcgccagcgcaacgcaatgcccagtaataccagcagcacgcttgccgtcaacgccgccgacgccgtgaccagccacgacccggtcaccgcatagacgatggccgccaccgcaagcacaccgatcgggccgaacatcgccagcggatgcttgagttctatatcgatatcaatctgatgatgcttcttgccgtcggcgtgactatacgaatacgacgaatgctgcgaaatgataatcggacgtttcaccgggccgctccccttatgcgtcttgcgcttcttctaccgtgttcccacacacccatcggcgccttcatcagtgcaggttcatgcgaatccatgcgccgataagttccttgagattgccggcgccgagcttgtcggccgcacgcatcagatgcgtgcgcacggtggtttcggtgatggacagttcggcggcgatctgcggcatggtccggccgcgggaccacagttccgcaacctccatctcacgcgcgctcagacggttgtccttctcggccttgatgcgcgcggacgcaacggccgcggtctcgaaccgcacgtcgccaccatcgccccatattttgccggtctgcacctggcggatagccacggcctgcaatcgcacatcatcgttcttgctcatgatgccctgtgcgccggcccgggccatctcctgggcatgtcggcccacaatcgaggcggtaatggccagtatcgccgtggtcgcgttttccctgcggattgcacgcaccacatccggaccattgatgtcgttcatcgcgatatcggccaatagcacagcaggcgggtgtttggtggccgtgcacagctgaatggctttgctgccttcgctcaccggcggcaacaattcgaagtctggcagagccttcgacaaaatcgactgtaatgccatcagggccatgcggtcgttgtccatgatgagcatggtgggccttggcccatcctgcccgctgatatccggcatatgcctacgtgcgcttagctcttcttcggcttcagcgctgagggcatgggcatcggaatcggcttgcgtggggccggcttcggcttgggcgcggccggcgcggaggccgggaactcgccgctggtcgcctttgcggcggcttcggctgcccacttggcgtactcgtcgaggtcgtcctcctgcgcggcgggcgagaccttggcggcgtcggcgtcagcagcagaatccacatccttgtccgcatactgatcatcaatatcggcgaacgggtcaggagagcccgttcccggctcctgctcgctcagctcttttgccagctcatcgtaatcggtatcggtggtcaggtacttgagctttcgggcaattttctgctgttttgctttttgacgtccgcggcccatctgaccccctgcgattactgtgctgttcgattcatcaacaatagagagtaccactaatagtggcttgttcgttgtcggctcacacttttaccataaaaagcgtttatctgagccctatttaaaggattttcgcatgaccgacgagcagcaactgacagcggcaggcaatgagataagcgcgagcttcctcgcggccaaaaagcgttcggacgaaacgctcgccaagctggaggccaagccgtcgtccttcaccatgttgaccggcgaccgcccgaccggccggctgcacctcggccactacttcggctcgatccgtgagcgtgtcgccatgcaggagcgcggcgtcaacacgaacatcatcatcgccgactaccaggtgatcaccgaccgcgacaccaccgagcacatccaagacaacgtgctgaacctggtgctcgactacatggccgccggcatcgatccgaacaagaccatgatgttcacccactccgccgtgccggccgagaaccagctgctgctgccgttcctgtccctggtcaccgaggctgagctgcaccgtaacccgaccgtgaagtccgagatggaggcgtccggccacgcgttgaccggcctgctgctcacctacccggtgcaccaggcgtgcgacatcctcttctgcaaggccaatgtcgtgccgatcggcaaggacaacctgccgcacgtggaaatcacgcgcaccatcgcccgccgtttcaacgagcgttacgccaagaagaacccagtgttcccggagccggccgccattctgtctgaggcaccggagattccaggtctcgacggccgcaagatgagcaagtcgtacggcaactccatcatgctgggcgccaccgccgaggaaaccgccaagctcatcaagaagagcccgaccgattccgagcgccgcatcaccttcgacccggttgcccgcccgcaggtctccgccctgctgaccaccgccggcctggtgaccggccgcgacccgaaggacatcgccgaggagatcggtgattccggcgccggcgcactcaaggcatacgtcatcgaatcagtcaacgagttcctggccccgcaccgcgagcgccgcgccgagctggccaaggacatggattccattcgtgacatcctgcacgacggcaacaagcgcgccaacgccatcgccgaggagaccctcgaccaggtgcgcgaggccatgggcatgaagtactgattttcccgccgctcgtagcaagacgccgtgtcagccccaactgggcaactgacacggcgttttttgcattgcggcgtctgctgtgtcctatcttcacttcgaggggcggatttcttgttttccggaggtctatctccgcttcgaggggctgttgctcaagtaggcgaggcacaaaaacggcggaatgacgttggcgtgaatgggattttatctgagattgagcgcatgaccagccccttgaaacggagatagacctccggaacggctcaaatccgccccttgaaacggagaatcaagcgttagtaactctcaattcaaaaaacacaacatgttttccgtgcaacgcggctatcaagacggacctctggtcacttcatgccgatggcttgcatcaatacgtacgctccccgcacagcaatgtcattacgacgtgttgcggcatagcgcgcatggcttccggagtatcggcggcgtatgggtcggcgtccaacaacaccatatcggccgggtcgccggatgcaaggcggtcacggccagtggcggtcgaggctgccagcgaggtgcgcacatcgaggcactgctcgggctggaacggctcgcggtcagagctttcggagccgaacacggcggcggaaatggccagccacgggtccagcggggccacgggcgcatccgagcccatgcgcagcgtggtaccggcgtcgtggagggccctgaacggataagggataccggccgggttggcccagaaacgggtgatgacgtcgcggtcatccatggcgtgctgcggctggatgctggccgcgagccccagctcggcgaaacgcgggatatcgacgggtttgagcatctgtgcgtgctcgatcgatccatgtgcgtgcgtggcggcgactgcgttgagcgcaatggtgttcgcttcgtcgccaatagcgtggcaggcgatgtcgaagccatgctcggtggctaggcgcatatagtcttcgatttgctgcggcgtgtagctcagcgtgccatacgtcggcggctcgatgcccgaatacggcgtggagcagtaggcggagcgggtgttgagcgatccgtccgagatgagcttcatggcgcccacatggccgagcccggcgctgcccggcagtgggttgccggtatgccaacccgcgtcaatggcggcttgcaaccgctcggggtatacaccggcgtccacgcgcaaaccgttaatgccggccgcgaaacgattggtccacgtatcgatgttttcggccatttcataatcgcggatgcccaccacgcccttgcttgcggcgtcctgttcggcctcgcgcaacagacggtcagtctcttcagcagcgcccggcaccttgtcgaaggcggtgtaggcgttgaaccattcgagttcaccgaccagaccggatccgtccacatgtacgccaagcctgcgggccgcggcggagttcacccatccgcagtgcatgtccgcgctggagagggccaccggctgttcgccggtcacggcgtcaattgcagccagtgtgggctgctcgtcgtcggcccacagcgagtgacggaatcgcatgcccaccacgaaggcatccgggtcaagcgtgccggcggcgcggcgctcatccagatgacggcgcaacatgtccatcgcttcggcggcggaacgggcattgatgaggtccagtcggcccagcgtcttagcccattgcgtgaagtgcgtgtggcagtcccacaggccgggaataacccacaggccgtcggcgtcgatggtggtttcgtcagcaggtgcggaggccgacgttgggattgagacgctgccagaagcaatggcattcgtcgcgtatgccaacgatgtcgtatgcgccttagtctgcatcgtgccgtccgaagccgagaccgttccagcagggccgacagacgcaacaaccccatcgcgaagcaccacatccacgtggccctgagaccccggaacaccggcattgacaatacgcaccaagctactcatacccgccatcatgccacctttgcatgaacgccatggagattcgttcaagctgaatcgcgccgtcggcggcgattcccgctggctgcctgcaaacccctacgttccatgtaattgcgggatggcctgcaactgcgatgaacacccatagtttatccaccgacttatccacatttatccaccgaaaaattggggcggtagacaaggccggtagccggactctacactgcgaggacaaagcgaacatcacgaaggggtgatcatcatgggtagctcaacggcattgaccgagctgacaatgcagaagtatcaacgaatgcagacgtgcgcagatgttcaacgacgaagcgcatggcgcccaccctatgccctgacaacagcattggagcttttgtcaattgaagtaccccgcatatcaagcaaacacagaggccttgcaactacaaccattgttgcggttccacacgccaatgacaaacggcacattgtgggggtcaaagtggttgtatggcctttcccactagacacggtcataatcgagggacaattcacatgcacttcaccagcttgcacatgggccatgttctccgcgtatctcgaacttgaagaactcatcgttctcgctgattccatgatgcgacgagatcgaaggctctgcagaacaaccatcgacgccctttctctgtatctcgatgaggccgaggcccaggtgcgagccgacaaagagaatggcaccaattcgtatttgttccgcgggtataacaaatgccgtcgcgccctgcttttggcgcgcgcgggcacagattcctccatggaaacacgaactcgtttggttctcttgaaatacggtctggattgcccgcaggtgaattatccaatattcgtaggaaacaacaccagacccatatatctcgatcttgcataccctgaattcaaggtatgcatcgaatacgaaggctctcatcatgccgggcaatggctgaatgacgcgagacgccgccagatgatcgaagacgctggctggaagtacattcaagtcaccaaattagatattggcgacgaagcgggagaagaggcccttgcccgaagagttgccgagaggatacaggaggttacgggcaaaacggtccagctcacgatgcggcaaaccacccagcaaattagcgatgtccgaaagctacgccgtattccgctgtacaaacggctgaaattcgagcctctgctgccgattattccgacgacgcaggaataataagcccggtagagtcagtccgcaccgtccgcaccgcgctacggtattcaaaacccatttcaaggggctgatttggcctccgccggaggtctacttccgtttcaaggggctgatcatccgctagatcacgtgtatcaatgcccttacgccaacgccattccgccgttttggagccgcgtctactcaggcatcagccccttgaaacggaagtagacctctccagaacgtcaaatcagcccctcgaagtccgttttggcctcaatggttcctgccgaaccacaaaaaatccactcctctgccatacgaggcgaccgcacagcaggcacgtgtcatttgccgctgcggacctcggacttcatggcttccatgggctcgtcgacgagcacggtgccggacggcagggtgccgggcagcggatcgtccatgtagtggtcgaactcgtagagcatacgctcgttcggtttggcggtcagcaacgaaaccaccacgatgaacagcagcgaaatgatgaacgccggcagcagctcatagatggcgaatacgccgcccaagggcttgacgaggttgtgccagatcagcacggccgccgtgccggacagcatgccggccacggcgccggccttgttggcgcgacgccagtatagcgagcacagcatcaacgggccgaatgaggcgccaagcccggcccacgcgtaagacaccacctggaagatcgacgagttctggtcgtatgccaccagaataccgaacaggaacatgaccaccagcgtgaccctggccacgatcatgacctgcttgtcggtggccttgcggtgcagcagcccgcggaagatgttctcgcccatggccgaagcgccgatgatcagatacgaggagctggagctcatcgaggccgcgaaaatgccggagaccaccacgccgcacatgaagctcggcagcagggtctgcgccagcacgatgaagatggtctccgcatcggtggaagtcagcagttcggtgggcatcatcgcacgtcccaccaagccgatgcacactgcgcaacccagcgaaatcacgcaccaggaggtggcgatgattcgggacttgcgcacttcttccacgctgcggatggacaggaagcgcaccagcacctgcggcataccgaagtaacccaggccccacgccagcatggagatgatggtgatgatgccgtagtcggagggcgcgccgaacacggccttgcccgcctcgacgagctgctggccggtggccgggtccagcttgggcgcggccacctgcgtgccggacaggtagccggggatggcacgcaggaattccacggtgttgtcgacgccgcccgcgctggccacggtgccgatgaacaccaccgcgagcgcgaagaacatgagcatgccttgaatgaagtcggtcatcaccacggacaagtagccgcccaccacggtgtagacgaacacgaccaccgcgccgatgatcatcatgacgtggtagtcgaaaccgaacaacgtggcgaacagcttgcccacggtcacgaagcagctgcccacgtacacgctgaagaacaccaggatgatcacggccgcgatggtggagaccacgcccttcttgtcatggaaacgcttggcgaagaagtcaggaatggtgatggcatcgccggccactaccgagtagcggcgcagtcgccgggccacaagcttccagttgagataggtgccgagcgccaggccgatggcggtccacatcgggtcggccgcgccggtgaagtaggccaggcccggcaggcccatcagcagccagccgctcatgtcggaggcttcggcgctcagggccgtgagccacggccccacgccgcgcccgcccgcaaagtattccttggaagaggagttggagcgtttggagtagatgaatccgatggacagcatggccgcaaaatagatgaccatggccagcagaatccagaaatcgttggccaactgcgacacctccccaatcatgacgccaagcggctaccgccatggcagaactatgtgctgatatgcgtgctgatatgcgattgacgccggagcggcgtcatacagaccgtcacagccgtgaatacggccgcaacgcacttcgcctgatggtagtggatacaagggctcaagcaccttccaccgtttccatactgagacgctgttttatccgagctccccacctgaggggagccaagatgacggtcagatgtcgtagcgccaggacttgtcggtcaccacgcgggccatcgccaaaccgatcggcagacagataatcaccatgaacgcacggaacgcccagtccagcgcattcatggtctggaagctgccgaggtaccacatggcacggtacatatacagaccgggcaccatgatcacgatcgacggcacggtcaggcagatgcgcgggtagccgaggtgcggcggtagccagccacgtcgcacggatgaacgccacgccgatgccagaatgcccgccaggaacgcgccgatgaaggtagccatctcgggtgccacgttgaagtcttgcaattccaagcgcagcgtgtccgtgatcgcaccgatcagggcggcggccaggcacatgcgctgcggcgaattgaacagcacggagaagccccacacgccgacgaacgccgccacgaaccgcagcaatccgttgacccacgggtcaagccccagcggttcaaagccttccgggtgcaggtgcaccatcacggccacggcccagcctgccagcgtggccatcaggatgatgcacagcacgtacgccacgcgctggatgcccgaggggaagtcgattttcgccatgtcgagtccgccggtgatgagcgggaaaccggggatcacgaacagcatggcgccgatgtaggccgtatcgtgcgagagcgcgactgggtcgaaaatgccgatgagtcgcagggtgccggtgcaggcgagcgccgccgcggccacgcacacaaaggtgacgaagaactggttcagatggtatgcaaacagccggcgacgcatccactggccaaggcccgcgcccacgaacgcaccgatcatgtcgtatgggccgccgccgagcaggaacacgaaggccgcgcaggccagggcggaggccagaccggagaaccacggcttgtacagcggcttgcggcgctcaatcagatcgagtcgctcgtgcgcctgccgcacggtgataccgcccttggccttctcttcgtcggagcgctcgttgaagtgttcggcgtattccttgggcacgcgattcttgcgcttcgtactgcttgcagcagggctttcggcggttgcgccgttcgccacgttcgccgattcaaccgactcattggagtcaccggtaaacacttcggcatcgtcgtaggccttctcttcggccgctttgtcttcgaccgaagtgacttccgcgctgtccgccaaaagtcggtgggcttcttcattgtcatcatccaaggacttggccacggaggtcacgagtaccttggttttcgacgcaagatccagcgcctcgtccacgctgccgttggccgcctcagcctcggccttggcacgttcgcgcaggcgcttggccaaatcagcagaatactgcgaagcgtcacgttcgtccaaatgcttgaccacgccatcggacagttgcgaatcgacgtgatacatcgaccccttgccgagattcacggagaaccagtcggcgaaatgttccagcagccagatacgttcggtgttcacgccggtggtcggcaaatccacgacttcggtgatgcggttacgaccatccgtgcaggtggcctcgatatccgtcaggttcacgtcggcgcgtacgtgcacgcccagcgggtaggcgatgcggtgcatcatttcacgcacgcggaaggagccggtgccggctcccaggtccagcatgccgacccgtacaatcacgctggctttggcggcgataccggcgtccaccaccggtttttcccaatcgcgcgcaatatcttccatgtccagcggaatggagtgggtgtggaatttacgtacagccgttgcgcctttcgcttcgggcgcactttttttcttctgttcgctcacatccctcattactactccctgcctcccccgccagcaatcgtaaggtgctcaaatcttccgcgaatcggacagtgtctcatatgctgtccgatattcggtctctataggtggacaacttggcgcactatatggactccgtaacgcaaatagcgatttcgcggggatacactattgcccacacaacaaccacgttgaatatgggctgtgggctcgcaacgactggcctcaacaactgcggaggagccacagacgaccggtagaccgagcaacctgttattcggcaaaggaggttatatggcaacacctgaagaacagatcactcccgctgacgccgccatcgtcactaccgggaccggccgaaagggcccggaggagcatgatcttcccgaaagcctgaagtacgacatggatctgtgtcttgagatcctgcgtaacgtactgggcgaatacaaccccgaactgctgtctacgttcgacaccgtgcgtcattacgcggtggaggccagcgccgagcatttcgccgagctgaaggatccgaaccccgaccaggatggcctgaaggaggccgtgaacgtcatcgacaacatgacgttgcacgacgcccagctgctggcccgcgcattcgccacgtatttccatctggcaaacctgtccgaggagaactaccgtgtttccgtgctccacgagcgcgagaacaacgtgtccgttgaccaggcggtcgacccgatcaacgagctcaccgtcgcctaccaccagctcatcaatgagactggcccggccaaggccaaggaactgctcaaccagctcgaattccaccccgtcttcacggcgcaccccactgaggcccgtcgtaaggccgtggaaggcaagatccgccgcgtttccgaattgcttgaggagtacaagcgcctcggcggctcggataagaaggaatgcctgcgccgtctctacaacgagatcgacgccctgttccgcacctctccgatcgcgctgaagaagccgaccccggttgaggaagcggacacgattctcgacatcttcgacaacacgctgttcaacaccatccccaaggtctaccgtcgcttcgacgactgggtcctgggcgataaggccggtctcgtcgagcccgcttgccccgcgttcttccacccgggcagctggatcggctccgaccgcgacggtaacccgaacgtcaccgccaaggtgagccgcgccgtggcccgcaagttctccgatcacgtgatcgccgcccttgaggaagccacccgcaccgtgggccgcaacctcacgatggaagccgagaccacgccgccgagcgccgagctcaagagcctctggagccaccagaaggaaatgagcgagcgtctgaccgacaaggccgccctgatctccaccaaggagatgcaccgcgcggtcatgctggtgatggccgatcgtctgcactacaccatcgagcgcgatgccgacctcatgtaccactcctgcgacgacttcctcgccgacctcaaggtggtccagcgttcgctggccgccgccggcgccaagcgttccgcttacggcccgctgcaggatctgatctggcagaccgagaccttcggcttccacatggtggagatggagttccgtcagcactccgtggtgcacgcccgcgcccttgcggatatccgcgagcacggcctgcacggcgagcgcggcgaactgcagccgatgacgcacgaggtgctcgacaccttccgcgccctcggtgccatccagaagcgcaacggcctcaaggccgcccgccgctacatcatctccttcaccaagagcgcccagaacatcaaggatgtctacgagctcaaccgcttggccttctcccacccggaggacgtgcccaccatcgacgtgatcccgctgttcgagcagcttgaggatctgcagaactcggtggacgtgctcgaggaaatgatcaagatccccgaggttcaggctcgtctgaaggccaccggcaacaagctcgaggtcatgctcggttactccgactcctcgaaggacgccggcccgacctccgccacgctggccctgcactccgctcaggagcgcatcgccaaatgggctgagtcgcacgacatcgacctgaccctgttccatggccgcggcggtgccgtcggtcgtggtggcggccccgccaaccgcgcggtgctcgcccagccggtcggttccgtcaagtgccgcttcaagctcaccgagcagggcgaggtcatcttcgcccgttacggcaacccggtgctggccatccgccacgtcgaatccgtggctgcggcgaccttgctgcagtccgcgccgagtgtggagaagcgcaacaccgagatgaccgagaagtatgccgacatggccgctcagctcgacgaggccgcgcacaaccgcttcctcgacctgttgaacaccgacggctttgccccgtggttctcgatcgttacgccgctgaccgaaatcggcctgctgccgatcggctcccgcccggccaagcgtggcctcggcgccaagtcgctcgacgacctgcgcacgattccgtggatcttctcctgggcccaggcccgcatcaacctggccgcctggtacggtctcggcaccgcatgcgagaagttcggcgatctggagaccatgcgtcaggcttacgaggaatggccgctgttctccacgttcatcgacaacatcgagatgtccatcgccaagacggacgagcgcatcgccaggatgtaccttgccctcggcgaccgcgaggacctcaatgagaaggtgctcaacgagatggagctcacccgcaagtgggttctggccatcgtgggcgacaagtggccgctgcagcaccgccacgtgctcggccaggccatccgcatccgctccccatacgtggacgcactgtccgtcacccaggtgctggcgctcaagtcgctgcgcaagaaggtggacaaggaagagctctcgcaaagccagcaggcaggattcatctatctgatcctctgcaccgtttcaggtgttgctgccggcctgcagaacacgggctgattcccggccgaccgatcgggaaaagcgagcggggaggttccgtgccgattgacggcgcgggcctccccgttcgcgtcgcacggccctagactggccggcgacggcgcgcatagaacgggcgcgctggccgagtgacagactcggatgatcggaggggacatggacaagccagcggatgggcgcgggagcaccgggccaacggacggcatcaaggcggagggcgatgccggaaacgaacgccacatttgcaaagcgaatccggctatgatcgatgacattgggaagaaacatggcctggaagatacgtcagaaaatttttccggcgaaaaatgtgctttggcaccgaaagcagataccaaattccttaaggcgagtagatgctatgtggttttgggcaagaccagacgtgtgctgtggtggctgggattactgctgctttcaccagcagtaatgacatgggctgaacgcgataattacagcctcgtttgcagcgtgttgacactttctcctccaccctgcagtgatttgaatacgtatggctccagacttacagcagtgctgggcttaggttttctctgttgggtgatgataccggttgttttttgtgtgaaatccgtcattcgaagcttatatcccaatgtgcccgacttggatacgtcgatggcttcacatgtcgtaatcggaattgtgtcatttttcatgctctgcgtatctttgcctcttctttttttaggcatacttacaatgcatatataaacgaacaggcctgctcaaatcttaagtagtgcgcgaaagcgtcccgcatagcggtggacaaagacctttcggaggaatcgctctgcatggaccgcgccagcaaccatgcatcacagtccgcgagaacatcgctgtaactgaatcccatacgggcgtcttgctcgccgagatgagcgtgcagccatgacgccaggtcctcttccggggcattcgccaggtagcttccccaaatctgcaacaaatccagggcccatccgcccagatcaccgagaccatagtccattggatcgttcgtaacgccccatgtcaagtatcccaaggatgtggcggccatatgggcgatgtcccgattgggcagcgtgcctttgatgacaggttgcgcatcacatgcgacaccgcatgcctgacgcgacaaggccaattcactgggagtaaccgactcaggtgtgtacgcgtgccatagtgcctgcgtgccggaactaccttccgaccagtactcaggtttgcgaagccactgcaggatgagttgaccgatgctgtcctcataaaccgccacctgggtacccagagcggcaggggctttgtgacactcctgctcgggtgtcgccgccggcctgcagaac

SEQ ID NO: 2299 - DNA, 18279 bp, Unknown
  R119_18m  MAG No. k141_22085
ccacgccaatctgctgtggcgcaactggctcaactgggtgtaccagaccacgccgtacgacctgaccgaggtgccgcagctcagggctgagaagaagctcggtactgatcgttcgattcggcatgagccgggcgggccgcgccaggatgatttcaagccgttcgcccacgacggatacggagtgatcagagggtagcgcaaatgccgcacatcctcgtattatgactaatagcgcacaacgcttgcgcaacatccgaaaaaccttgcgccgccgccgattccagaagacgcgccggtgtagtattgacattgtctagacgcaggcaaataatcactcttcagtcattcggagccgaatgcccagcgcagactccgtgtccgcgcccggcagactccacaccgaggagacgaaagtaacgagcacgtcacatttgcctgcccggtgggtttaaactgacacctgatattgaagaagcaggaggcgtgatatggtcggttcgctcagcgcaggattgctgttggcggacgagggtgctcatctgccctcggtcaacgacttccttcccccagagattctgttccagggaactccgtttgccatcaaccgcattattctgatccgcatcgtggccaccttcgtgctgctggtggtgcttgggcttaccgcaaagcgcgccaagctcatccccggccgttggcagggcgtggtggaatacggtcttgacttcgtgcgtgacaaggtcgtctatgacgtgatgggcgaggttcgcggcaagcgctacgtgccgatgatcaccaccatcttcttcacgattttcatcttcaacctgtgtggcatcatcccgggtatgaacatggcggccaccgccactgtggtcatgccgctggtgttcgccatctggaccatggtccagtattggatcgccgccgcacgttcgcaaggtcttggccattatctgcgtcacgagctgttcacccccggtgtgccgtggccggtctacatcctgttgaccccgattaacatccttgagttgctggtcatccgtccggcctccctgaccatccgtctgttcgccaacatgatttccggccacctgatggtcgccacctgcctggcattcgcacagtactggatcgtcgatgcagccaacaagctgcaaggcatcccagtcggcgcgatgtggttcgtcagcggtcttgccatgacgtgcttcgaggcgttcgtcgccttcctgcaggcttacgtcttcgccattctttccaccgtgtacatcaacctaagcttcccggaggagtgaggttcaaccccctctttcggaacccggcctcgcctaggtaggcaggaccgaacgaaataagatttataacgtcgccaagtacgttagaaaggaaacacaatggatatcatcaccctcgcagcggtcgccggcaacctgtccgtcatcggttacggtctcggtgcggttggccctggcatcggtctgggcatcctcttcggcaaggccatggaatccaccgctcgtcagcctgagatgtccggcaagattcagaccatcatgttcatcggcctggctctgatcgaggtgctggcactgatcggcttcgttaccgccctgatgttccactgatcgaacgttttctcagtcgaatacagaaggcaaaacgaatccaccagtgaaaggaggacttcataatgacgctcgcagaaggcggaattgatctgttcattcccgagacctatgacattgtgtggtccctgatcattcttgtcatcgttgcggtgttcttctacaagttcttcatgccgaagttcaatgcgatcttcgacgagcgcgccgccaagattcagggcaacatcgccaaggcggagcaggctaagaaggacgccgacgaggccaaggccaagtatgaggcccagctgagcaccgcccgtgtggacgccgccaagattcgcgacgacgcccgcgcagaagcgtcccacatcatcgccgacgctcgttcccgcgccgagtccgatgcggctcaaatcaccgcatccgcacagcgctcgatcgaatcccagcagcagcaggccatcgtctcgctcaagggcgaggtcggtgctcttgccaccgcgcttgccggcaagatcctcggtgccaagctggaagacaacgacgtgcagtcctcgatgatcgattcgatgatcgacgacctgggcgccaagaagtgaccgtgaccatccgtaaccagaaagggaggtgaccatgcgaggagaggcatcacgtattgcagaccgcgagtcgcgtgattcgctggccccgaaactgcgcgacacccgtgaggacgcgtggcggatcggcaacgaactgttcacgatcaccaaggtgctcgatgacagcattcagctggaacgcgcactgaccgacccgtcccgcccggtcgccgacaaggtggccgtcctgaagggactgctcggtgacaacgcgcatcctatgaccatggagatcatgaccgacttggtctcccgccgttggagccgtgcgcgcgacatcgccaacgcggtggaggacttcggcgtggacgccatgatgtactacgctgacgccaccgacgccacgctgcaggtatccatcgagctgtccgagctgcattccgcactgctgaacctgccggtcgtccgctccaagctgtacgactaccaggccaccagcgaggcccgtgtgaagctgttccgcgaggtgttctccggcaagaccctgaacaaggtcaccatgaggctcgccgaacacgccacctgcaacctgcgccgccgccgctacttggagaccatccagtggctgatcaacaagttctcccgccacatgggcgagtcgatggtcaccgtgaccaccgccaccccgctgaagaaggagcagattgagcgactggtcgaggtctactccgccaaggtgggccgccaggtgcacatcaactcggtggtcgatccgaccgtactgggtggcatgcgcattcaggtgggcgacgaagtcacggacaacaccgtggtcgcacagctgcagaacctgcatcgcaaggtgcagacggaggcgactccggcctgaccggccgagccaatccgtccaacaccacacacaagcaaagacttgactgaacaataaccaatagaaggagtgatcatggcagaactgaccatcgatcccgcctcgattcgcaaggccctcgacgacttcgtgtcgtcgtacaagccgagcgacacccccacccaggaagtgggctatgtcgccacggccggtgacggcattgcgcacgtgacgggattgcctggttgcatggccaatgagctgctgacgttcgaagacggcacgctcggcctggcgttcaaccttgacgcccgtgagatcggcgtggtggtcctcggcgatttcgcaggaattgaggaaggccaggaagtgcgacgcaccggcgaagtgctctccgtgcccgtcggcgacggctatctcggccgtgtcgtggacccgctgggcaagccgatcgacggcctcggcgagatccagggcattgagggtcgtcgtatcctcgaagcccaggcccccgacgtgatgcaccgccacccggtcgacgagccgctgtccaccggcctcaaggccatcgacgcgatgaccccgatcggccgcggccagcgccagctcatcatcggcgaccgccagaccggtaagaccgccatcgcgatcgataccatcatcaaccagaaggccaactgggaatccggcgacccgaagaagcaggtccgctgcatctacgtggccatcggccagaagggctccaccatcgcctcggtgaagcagagcctggaagacgccggcgccatggagtacaccaccatcgtggcctccccggcagccgattccgctggcttcaagtacatcgccccgtacaccggctcggccatcggccagcactggatgtacaacggcaagcatgtgctcatcgtcttcgatgacttgtccaagcaggcagaggcctatcgttcgatttccctgctgctgcgccgcccgccggggcgtgaagcctacccgggtgatgtgttctacctgcactcccgcctgctcgaacgttgcgccaaggtctccgatgatctcggcggcggttcgatgacgggtctgccgatcgtcgagaccaaggcgaacgatgtgtccgcctacatcccgaccaacgtgatctccatcactgacggccagatcttcctgcagtccgatctgttcaacgccaaccagcgccccgccgtggacgtcggtatctccgtctctcgagtcggtggcgccgcacagaccaaggctctgaagaaggtctccggtacgctgaagatctccctggcacagtaccgttcgctggaatccttcgccatgttcgcctccgatctggatgcggcttccaaggcccagctgacccgtggtgcccacctgaccgagctgttgaagcagccgcagttccacccgtactcgccggaacaggaagtcgtgtccgtatggaccggcacccacggcaagctcgacgacctcgacctgaaggacgtccttccgttcgagcagggactgctggactacatcgaccacaacaccgatatcctcaagaccattcgcgagaccgaggaattcaccgccgacaccgaggctgccctcgataaggccgtggacgagttccgttcgacgttcgtctcttccgccggcaagccgctggtcgagaagaagccggacgttgacaaggccgcgccggttgatcaggaaaagatcgtggcgggagaaaagtaagccatgggctcgcaactcgcattgaaatcacgcatccactccaccgagtcgttggcgaagatcttcaacgctcaggagatgatcgcgtcttcgcatatcgccaaggcccgtgatgtggccctgaacgcgaagccgtacaccgatgcgattttcgatgccgtgcaagcgttggtggcccacacccatatcacgcatccgatcgcggtgaaggacgagaagaacccgcgcgtggctgttctcgccctcacctcggatcgtggtatggccggcccgtacacctcttcgattatccgtgaaacggagtcgctgctgtcccgcctcgatgcggcaggcaagcagccggagctgttcgtgtacgggcgtcgcggttcgacgtactacaagtaccgtaatcgtgacatcgcggcgacgtgggaaggcgacaccgaccagcccggcgtggaaattgctgaaacgatctccaacactttgatggacgcctacatgaagccggctgagaaaggtggagtttccgaactctacatcgtctacaccgagttcatcaacatggtggtgcaaaaggtgcgcgtgctgcgcatgctgccggtcgaaatcgtgaaaaacgagaccaaggtgcccgatcctgatgaagaggcaccggctactgcggatgtcgctccgctgtacactttcgagcccagcctcgaaaaggtactggacgcgattctgccgaagtacattcagtcccgcatccacgagtgcctgctgaccgcggccgcgtcggaaaccgcaagccgccagaacgccatgcacacggcaaccgacaacgcacgaaacctgatcgacgaccttacgcgcaagctcaacgcttcccgccaggcctcgatcacccaggaacttaccgaaatcatcggcagcgctgacgcgctgaccaagaaggaagagtaggaacgcatatggctgacaaccagaccactgcggccgagcctaccaacggtcgcgtcacccgcgtccagggctcggttatcgacgttgaattcccggtgggtcatctgcccgacatctacaacgccctgaaagtaacgatcgtcaacaccggcgccaaggaagaaggcgaggcgaaggagaccgagatcaccctcgaggtcgaacagcacctcggtgattccacggtccgttgcgtcgctctgaagcccaccgacggcctggtccgtggtgcctccgtctccgacaccggcgccccgatctccgtgccggtcggcgacgtgaccaagggccacgtcttcgacgtgtccggtaacatcctcaacaagaagccggatgagaccatcaccgtctccgagcgttggcctatccaccgcaacccgccggccttcgatcagctggagtccaagacccagatgttcgaaacgggcatcaaggtcatcgacctgctgaccccgtacgtgcagggcggcaagatcggtctgttcggtggtgcaggtgtgggcaagaccgtgctgattcaggaaatgattcagcgcgtggctcagaaccacggtggcgtgtccgtgttcgcgggcgtcggcgagcgtacccgtgagggtaacgatctgatcggcgaaatggccgaggccggcgtgcttgagaagaccgcactggtcttcggccagatggatgagcagccgggtacccgtctgcgtgtcccgctgaccgcactgaccatggcagagtacttccgtgacgtgcagaaccaggacgtgctgctgttcatcgacaacatcttccgcttcacccaggccggttccgaggtgtccaccctgctgggtcgtatgccttccgccgtgggttaccagccgaacctggccgatgagatgggttccctccaggagcgcatcacctcgacccgtggtcactcgatcacctcgctgcaggccatctacgtgccggccgatgattacaccgatccggccccggccacgaccttcgcccatttggatgcaaccaccgagctgtctcgtgacattgcctccaagggtatctacccggctgtggacccgctgagctccacctcgcgaatcctcgatccgcgttacgtgggccaggctcactacgactgcgccaaccgcgtcaaggcgattctgcagcgtaacaaggagctgcaggacatcatcgccttgatcggtatcgacgagctcggcgaagaggacaagaccaccgtgaaccgcgctcgtaagatcgagcagttcctcggccagaacttctacgttgccgagaagttcaccggtcgccccggctcctacgtgccggccgacgagaccatcgaagccttcacccgcatctgcgacggcgtgtacgacgacgtcccggagcaggcgttctccggtatcggcggcatcgatgatctcgaagagaagtggcacaacatgcagaaggaactgggtgcgtgatggctgcggaaaaaaccacgatgaaggtcaacatcgtcgccgctgaccaccctgtgtggcacggcgaggcgacgagcgtgaccattcccgcctctgagggcggcatgggcatcctgcccgaccatgagcctgtgctcacggtgatcaagcagggtacgctcaccgtggttgagcccgatggcgatcgccacatgttcgaggtgaccgacggattcatctccttcgactcgaacaaactcaccgtggcggtcgagcgcggccacgacgtccagtactccggcaccgccgagtgatctgaaccaactcctcaaggggctctctggttttccagagagccccttttgctatgtatgccatgtgttgcgctacagtggtggcctatgcgagttattgttgccgactgttcggccgagtattcgggccgcctcaacgcctcactgcccctggccaagcgtgtattgctgatcaaggctgattccagcctgttgattttctccgaattgggctcctacaagccgctgaactggatgaccgcgccctgcacgattcgtgagatcgacccagccgccaaatccgcgcaacattcccgggaaagtgtcgctggtggggctgtggatggtgattccgcgacgcattccccggaaagtgtcgccgctggtgagccggaaaaggtgctacgtgtcagcgccgacaagggctctgacattcttgaagtgacgctgcaacacatctattccgaccaaacctatgatctgggcgaagatccgggtctcatcaaggatggcgtggaagaccatctgcaacgctatctggccgagcagatcgagcgtatcggcaagggagccaagctggtgcgtcgcgaataccctaccgccattggtccggtggatatcatggccgtgaatgccgagggcgagcatgtggctgtggaaatcaaacgtcacggcggcattgatggcgtcgagcagctgactcgctactgcgaactgctcaatcgcgatccgctgctggccccggtgcatggcattttcgccgcacaaaccatcacgccgcaagcccaggtcttggccaaggaccgcggcttcacctgcctcatcctcgattacgacgatatgaaaggcaccgaggacgacagtctcaggctgttctgattgttcttggcttccctcttgaaggggggtttcgaacgtacatagagagactgaggggaggcctcacggtatattccgtgaggcctcccctcagtcagtttcgctgccagctcccctcttggggagagccatcgagattgtttagtacgcggcgagaatatcgattacgaagaccaacgtggagttggcgggaatcgaaccttgctccttatctccataggcctgatccggcggaatcaccagcagaacctgagagccgacggtctggccgaccagacccttctgccagccctcgataacctgatgctggccgctggaatcgctgaacagatcggcgtcgattgtggaatcgcgatcccaggacgaatcgaactgcttgccatccgtaagccaaccggtgtacttgaccaccacggtgttcttgtcggtcagcttggcgccgttacccttgatcagcgtctgcgagatcagcgaatcaaccgaaccctgaccgttcatgtcaatggacggcttgccattcttggctcgcgtcaccttcggcagattggccggcacatccttgacttcctcgccagtggccttcttcaggtccttggacttggatacaaacgtcatcgccaaaatgtaagagtatccggacgaatcctgagcgttgacgccaaagccgatcgtggtgttgatcttggcacccttgatctggttgtagtaggtcgaggagagggtcttggaatccaccttcagcgagcaatccggcgtgttcttggtccaggtgtccatgagctcggtgccgtctttaacgttgagcgcgatgccttgggcgcagacgcggtcgccctcctcgatcacgtcgccatcgcccttttgcagcaccacataggagccgtcggacacggtcatcggcgtattaaaggagatggtcggcttctcgccgagcttgcccttggcggtcacgccggcaatttgccccttcttgtcagaagagccggaagaggatttcgagtccgagctcgaactggagcaggcagccagcgatacgcacatcgccagcgagcaggcaagagcaacggccttgccgagaggggataacatagatttaacagacttacgcatgacacaccaccctactggtgaaccttgattttctgcgctcctaggtaataaacaggtgaagattgtagaatggttaagttatgagtgctgaagaacagactacaagaccggataagggcgccaagcgtccatcccgtcatgccaagatcatgcgtggagtggtgacgcctatcttcggtctattggccgtggcggctgtggtgttggggtacatgaataccacgatatggaagccctccactgaaatcaccgcttccgcaaccatgagcggctcccggtatgccgtcactgatccgaatgtgctgaccttgttggatcagaacgccacgataaccgtggactcgggatcctctcaggacgaggcgtgcgtggcgttgggtccgtccaaggatgttgccggatgggtcgcgtccgagaagtcctatacccgtatcaccggattggcgtcatggagcgagctgagcacccagaagggaagcagcacgagtcagggagcgcctgccagtgccgatgacgcggtggcgttcaaggattccgatatgtggactgccgtgaaatgcggcaccgggtccgtttcgctggagagcaagaagaccggcgcctcgacggtggccattgtggatttgggtgaaaatgccaccaacgccaaggtgcagctgcactgggtgcgctccgaagtgccggactttgcgatgccgttctatctgtccggtggattgctggccgtgctggccgtattgtgcgcctccgtgttcgccatgccgccgcataagcgccgcaagcgcatggtggaaggcacggcaagcgccgtaattgaggaagaggcacccgccagcatcgcagtgtccgggaagccggatggtgcaagtcgacgtaatcgtcgccgccacgccacaaatcggcgttcgggccgtgcgtcctcgcaatctgaagccaccgaaacaccggttatcatcgacccaagttcacgtaacctggtcgccgaccagcagactggtgccgagagcggcgctgagaccggcttcagcgccggcgataacgaatcgacttcggtaatcacccctgacgaactgcaggcctacttctcccgcttggcccaagaggtcaataccggagacgactcggccgatgacggacaggaggaaagctgatgaacaagcgatggaacaaactgtgtgtggccgccctcgcctgcgtggcgttggtcgtgccgttgaccgcctgtgaaggccggctgccgacgccggctgctgatacctccaccaaggttgcgccggatttgaccgaggcacaggagaagaagattcgcctgaagattctcaagacgatcgatgaagccgatcaggccaagaatcccgatggatatgcggccgttatgggcgggccccagctggacattcgcatcagccagaccacgatcaaccagcgcggcggcggtatgtccaaatacgcgaccattcccaaggacatcgcccagacggtgattcccatggacgacggatggcctcgctcggtgttcaccatcacgaccaccaccgaagatcagcagtccaagcgtttgctggtcttcgatcaggaatccgcccagcagaattacaagctgatggccatggctcgactgtttgagggggccaagctgccgaagttcgagattccgactattggctcgcagatgggcactgcaaaggatgagaagctggtggccactcccgccgatgccttgacccaatacgccgatgtgctgcagaacggctccaagagccaatacgcttccaagttcgcagacgatttgctgcgccaggaactggccaataccacggccaaggtgcaggaaggtatgcaacgcaacaacggtacgcaggagcagaaattcaccgttgtgcctgaacagatgtgggtgatgcgtgctgcagacggtgccggtgatttggtggttggccgtattaacggcgaatggactcgcaaggcgggggatggccgcgaatcgcagccggcttccgacgacgagaaggcgctgttcaatagcgacaagtacaccagcaccatgaaggtcacgtatgtgaacgtggtggccttgtacattccgttggcaagctccggtgagcaaatcaccgccgtgggcgccgaccgtcagccggtaaaggtcgaagcgctgtagttgttgccgccgcccaccgcgcggttaacgccccaccacgatatgattcatccaccacgatgtcggtaagttttacctttcgcacaatggtgccgttttgagtcacatcgtggtgggcgttttgctacgtggtgggaatttcaccgcgtagtggaagaatccctacgtggtgggaatcggcattacaatcaatgtcagcaaatgtgattgttgttgtacgcgaatcgcgtggaatcgggaggcattatggcagagcagcagttcaatccgggagtctcattggcgggcgccgtcgatttggaggcgctgaagcatcaggtcaaggccgagcccggccaggcgggtggcgctcctgccgctggtgggtacgtgatcgacaccaccgaaaacaccttccaggcaatggtgcagacttctgcgaccttcccgatcctgctgctcctgtggataccgaccgatgaccgcctgttcccgatggcccgtgcgttgggcgacgcggtgaacgccctgaacggccagattcagctctcccgtatcgatatctcgtccaatccttcgattgcccaagcgttgcaggtgcagggcgcgcccgcactgttcgcgttgattgccggccgtccgatgccactgttgcagggccttccgggtgacgacgagctcaagcaacttaccgacgaggtgattccgaagatcattcaggccgccgcgcagtctggtgtgaacggtaccgcgccgtactcgggtgatcctgattccgatgccgccaagagcgctggtgccaccggtgccggcgcgggtgctgagcaggtgccgccggagcatgccgaagcccatcgtttggccgaggagggcgattacgccggtgccgccgccgaatacgagcgcgtgctcgaatccgacccgtccgatgcactggccgcccgcgaacgtgcgaaggcgctgttgctggcccgctccgggtccgctgatgtacgtgacgtgcgtgccgctgccgccgcagcgccggacgatgtggaagcgcagttggctgtggctgatatcgacatgatcggtggccagattcaagacgctttcgaccgtttgctggactttttggccgccgggcacaaggccgatatcgagccggttcgcaagcgtctgctcgaatacttcgccatccccgaacccaccgacccgcgtctggctcgcgcccgccgtcgcctagccaccctcatgtactgattggttttggctcccctctttgaggggagctgtcaggcgtagatgactgagggaagcgcgcgaacgtacttgattgcttcccctaaaccatccgattcttcccgaaatattgctggaaccttggcccctccagcgccagttcctcctcgaaatcatccgcccacttgcagaacggacggttggcgagaccatcgttattgaatcgcgcctgatcggtgatttcggtgatgcagaatttcggaatcgtcagattggtaaccggcccggatcgttcggcctcggctacgatcagcggcgcgttcggcccgccgaacacgtccacgctccagccgtcttccgcaatccacacggaataccggttcttgatgattaccgagccgccgcgcttgatgagttcggcggcgatgcgcgtgtcgatctcgcgctcgacctcgtagcgcgtgccacccacggacggacctttgacggtgacatacgcttccgagaaccggtcgcggtactcgtccagcacggccaccggatttacgtcgggcgtcatgtcgacgtgaaccttgtgcgagaccagccgcacgcgcaaggcgtaattgtcggcatgcacgtagtagctctgaataatgagggtcggggcgtcgccgtcgtcgtattccgccggcagctcgcggcagaagaagcggcgttcgtattcgaagtcatctgtaggttccgacataaccccattgtagagccgatgatggcgattttctcgttattttggcgacgtatgtgcctcatgcagcgtgatgtggtgtacagtaaagaagttgctcgggtttgtagctcagtggatagagcgtctgtctccggaacagaaggtcgtgggttcgatccccatcaagcccaccagcatggctttcggctagccgccggaagccttttgcatattcggcgcgtgatattaagcgcgtgcaaagctggtgctggtgctggtgctggtgctggtgctggtgtcggggtcggtgatgccggctcgcttgggtcgtggaaaaaccgcccggtttggcgagaacggtagtcgaatcgtctggaatcgtctggaatagcaaggaatagtctgttgatggccgtatgccgggcatcatgcgcgctaaacgcgacttcgctcagtagactgctacgtaatcggcattgccaatcgttgctgatcgtgcgattggtcgtagccggtggtgatgtgtaccggcgccggccgcagcaggtgggcgcccccaagatgagaaggagcacaatatgagcgaaaagatggaagccgtagccacttccgaggcgccggccgcgctgggcgcatacagccaggcggtgaaggccaatggcttcgtgttcgtatccggccagctgggcattgatccggccaccggcgaactggcgggcgagaccgctggagagcaggctgcacaggcgctgaagaatattaagcacattctcgacactgccggtaccggcattgagcatgtgtgccgcgccaccatctacctgaagaacgtcgaggacttcaaggaagtggacgcacgttacgctgaggcgttcatcggctccgtcaagcccgcccgcgtggcctttggcaacaacatgattcccaagggcgcgctcgtggagatcgacgccatcgcggtggagtgattcgaacgtttccccggcggcccgtctgcgcgcatggtgtgtgcagacgggccgccgcgtattgtgcgacgcattccggggaatgtcgcgctaggcggggtgcgaggtgtggttccgcggcacattcccgggaatgttgcgctggaatcgttgggcggtggtccgtgccacaatagagaccatggcatccaaaggaaaaccgtcgccgcgttcggccgtaagcccgctgagtgatgagcaggtcaagcgtctggccgcccgccacacgcttgtggactcgacacagtattacccgaccggccctcgcacgcccaatcagccggaaatcgacgcccagaatcccaaggccaccaaacgactgctgggaggggtgtccattgtgttccgcgccagctgcaagaccaaggcctggggcctggaacaggtgccggaaaccggaccgttcatcaccgccgccagtcatatcaccatgttcgatgtgttcgtgccgatgatgagcctgttccacatgggccgccgcccccggtacatggccaaggccgagatggcgaagtggccattgatcggcaagtggttccggttggtcggcatgcagccggtgcagcgtcattcgggcaaggccaagcagatcgaagagacctcgattgatattctgacgtccggccgcccgctgacggtctggccggaaggcaccgtgacccgcgacccgaaaaagtgggtgatgagcattaaggagggcgtgggatacatcgcccttgaatcctcgcgcagactggggcatcaggtgccgctgtacccggcggtgacgtggggtgccgcctccatcaaccactggtggccatggccgcgcaaaaacgtggtgatgtgctatgaccatgcgctcgattactccgatctgcttgccgacatggactcatggggtgaagaaccgcctgccgaggccgtgaacgagctgatgtggcgcgtgctcaaacgcatgaacacagtactggaggaaattcgtggcgagcagttccccgctgaaggctactgggactaccgcagcatgagtcgcaagccttggccggaagccggcggcccgttcccggctgagaagtagccgcaccggttcccgtacggggagcctaggcgagtagcatggcacaagattgtgccgatgaagttgcgcgacaagcgaaggtaggaatctgatatgggtaaaaatataacggttctcggcgcaggagcatggggtactgctttcggccaagtgctggcggacgccggcaacacggtgaccatgtgggccaaggagcagcggattgtcgagggcattcgcgatcaccaccacaacgccgtgcgcctgccgtccgtcgaaaagttgccggacaacatgaccgccaccggggatcgcgccgaagccgtcaagaacgcggacatcgtggttgtggccatcgccgcgcagttcgcgcgagtggcactcgtcgaattcaagggactgattcccgatcacgccatcgtcgtcagcctgatgaagggcatcgagcgtggcaccaacaagcgtatggacgaagtcgtccgcgaatcccttgacctgccggccgaccggttcgccgccatttccggaccgaacctgtccaaggaaatcgccgatcgtcatcctgccgccaccgtggtggcttgtacgaacctcgataatgccacgaaggtggccgaggcatgtaccacctcctatttcaagccgttcgtgaccaccgacgtcatcggcctggaaatgtgcggcagcctgaagaacgtgaccgcgctggccgtgggcatggcccgtggtgccggctacggtgagaacaccgcagccatgatcgaaactcgtggactggccgaactgaccgcgctgggcgcagccgctggcgccgatcccaagaccttcttcggcttggccggtgtgggtgatctcatcgccacctgtggctctccgctgtctcgtaactatacgttcggcgcgaatctcggcaagggattgacggtcgaggaggccaccaaggtcagcaacggggtggccgaaggcgtgcccaccacggatgcggtggtggctcttggcgagcagcttgatgtgccgaccccgttggcgtatcagatgagccgcgtgctgaacgaaggcatttcctgctcggagatgcttgccggactgttcgggcacgaggttaccggcgaataacgagagaagcgacgtatacgtggcgtatacgttgtacgtgcaaagtcgtgtggcgtatacgtcgttgacgtgcgcgagtagactggtgtgcgtctcttgtgcgcggcggtccgagcgcggttcggtccggttggcggtgcaaagcataggcttgaaaacggttgtagtttcaataaaaggatggttatggccaagaagcgtgttgtggtgctctatggtgggcgtgcagacgagcattcgatttcctgcatctccactgccggtgtgctgggggccatggacactgaacggttcgagccgattccggtcggcatcaccaaggacggcaagtggatcatcaacggcgaagatcctcgtggctggaatctggatggcggcgagctgccgaccgtaaagatcaccccggaatcgcgcccggtgatgcttgacccctctcgcggccaggacggtttcttcatcggcgagcccagccgcatcaattccgccgattccggcttcggcaccagcttcgtcagcatgtccgacccggaaatgcaccatgcgctgacctcccttggccatgtggacgcggtactgccggtgctgcacggcccctatggcgaggacggcacggttcaaggcctgctggaaatgatgggtgtgccgtacgtggggtgcggagtgtttgcttccgccgcctgcatggataagcattacaccaaggtggtgctgggtgccgccggcattcccaccgcgccgggtgtgacggtcgatgcgcgcaacttcaccgccgccgatgtgcttgccaagatcgaggacgccggtcttacctatccgctgttcatcaagccttcgcgcgcaggctccagcttcggtgtgaccaaggtcgagaaagccgatgaccgcgagacccagcaggatcgtctggccgccgccattgccaccgccggcgagcacgattggaaggtgctcgtcgaacaggggattgatggtcgcgaaatcgaatgtgccgtgctgtgcccgaaggccggtgacgagcccgaggccagctggcccggcgaaatcgtgctcgatcatcagaacgacgaccagttctacgatttcgactccaagtacatggatgcctccgccagccacgtggaagtgccggccaatctgccggtcagcgtgcttgaggacgtgcgtgacgtggcccggcgtgcgttcaaggccgtggatggtgccggcttgagccgtgtggacaccttcgtgacgcctgatggcacggtgatggtcaacgaaatcaacaccatgcccggcttcacgccgatttctatgtatcccaaggcttgggatgccaccggagtgagctacaccgaactcatcacgcgattgattgagggcgtgctgaggtaagtgtggtgcggaatcggctgccaaggaagaaggcgcgctgaacgtcatcgccttgccgcatgattggtccaactacggcgaggtcatcgagggcttcaagaagaagtacccggagatcaagatcaccgagctgaacccgaacgcctcctccaaggaggagatcgacgccgccaagaccaacaagggtaccgacgccgcccccgatgtcttcgacgtc

SEQ ID NO: 2300 - DNA, 43683 bp, Unknown
  R119_18m  MAG No. k141_22400
catagtacccatcagcagcgtggcaatcgcccagaacaccatgatggcgatcggggctttccagcagtgctgccagcccatgtaggcacggtcgtacaggttgcgtgcggagacgcgcaatgccgtgtagaaggtgaggaccaggaacacggcgaacaggatccaaataggccatacggtaacgctgaggttgatgctgaacaggctgagatcctgcggcagctgaccggactcggtcagtgtaatggcgccgaaggttccccaggtaaagaagaactcgccgatcatcagcagtgtgaccgggaacgtcagtatcaggattccctgacctgaggagaatgccacggcgaacagggccaccaggccgacgatgaagagcaaagccagctggaagctcaagacgctgaccaccgtgcgcgtgtatccgcgaacgcggtgtgcccactgccaagtagctccgaacacattcttggaatcggaagcatattgggccagtgcatagccggccagagcgccgagcgcggagagcaggtaggccataaagaacgtacgcactgtggcgccggtcaccttggccacgatggtggtgccactggcgagtggtgccgccgcgatggccgcaagcagcgtgatgaccacggccggcagcaatccggtgataaagccggagatcaggccggtgaacttgaatcgaatgctcttggaacgggccagcatgaatgcgccgaatgcggtgccgaccagcaatgccaagccggtgagccccagtgggtacgacatcatgttgctggcgtccatgctggaggatgagaggtcgacgatgtcgaaatgaataccgccagacaggcccatgaccaacgataggaacaggtagtggaagaagttcatgccgttgccggtgatgaacatgccgccaacggcttggttcagtgttgaatcggccccgaggctgggtgctgcggtgctcatggaattcattgcgattgcagggaaaatcgaaagcaccaaggcggctgccgtaccgatgccggccgcaatgccgatggtctgcatgttgggggcgccgaacagttccttgaccagtgggctggaagagatgggttgtgccggagcggcgggagccggcgatgggccgggctgccctgggttcggaatggccgtggtcggtgcggtgaatgccggtccgcctgcgggctgggcctgcggctgggcagcgggctgaggcgtcggctgcacagccgctgcgccgggcaacggaatcgatggtgcgggagccgcgggctgtgcggtcgtgggaacggcgccggtgggttgaccgggcgtgggtgcggcgggcgtcgctgctgctggagctgacgccgcggcaagatggttgccgcaggaaccgcagaattgcgctccttcgcgcacagctgcgccacaattaggacagaacatatagtccccctttcttctgatgcttcttcgagcactatcgtacccgcaaaatcagcgccatgaccatagggcgaggctcgaaatggacaatactgggtgatggcgcgcgggcttggctgcgctggcttggccaaaatggtgggcatcgcgaaaccggcaggaatatggccataccctgtcccgccttatatatagactgtccaagttgcccgaagatgcggtgccggtttggtgctgcgtcatgggctaacacgcatacacactcctgccacggaacgtccgtggccgaatagtccgaaggaggtgggtgatgtctgcgcacaagtacgaactgatgttcatcgccgatcctgagctggatgagcgcggtctgaagaagctgaccgagcagtatctggaactcgtcaccaaggaaggcggctctttcgatgagcccgattactggggccgtcgcaagctcgcctatgagattgccggtaagaccgaaggcaactacgtcgtggtgaagtacaccgccgagcccgctaccagcgatgagctcgaccgtgttctgaacctcaacgaatccgtgatccgtacgaagatccttcgtaagggctgaatcaagcgtttagtcagctgaacagctggtattcaaggtaagtaagaaggaccgttatggcaggcgaaaccgtcatcaccatcgtgggcaacctcactgcggaccccgagctgcgcactattggcagcggcgcgaccgtggcgagcttcacgattgcttccaccccgcgaacctggaatcgtcagaccaaccagttcgaggatggtcaggcgctgttcatgaggtgctccgcttggcgtgacctggccgaccactgcgcccagtccctgaagaagggcatgcgcgtgattgccaccggccgcctccagcagcgttcctatcaggcacaggatggttcccagcgaaccgtcgtggagatgcagctcgatgaaatcgggccctccctgcgctacgccaccgcacaggtgacccgccagtcgtccggtcagggcggcttccaaggtcgttccggtggtttccagggtggtcagcagcccaatcagggctatggcaaccagggtggccaaggtggttatgccggtggccagggcggttacaacggtggctatcagggtggtggcgctggatactcccagcagcctgccgctcccgccaacccgtccgctcctgcggccgacccgtggagcaatgccggtgcatctgatgccggtagcttctccacgttcggcgcttcctccgatttcggcggcggcgacgattccgacccggagttctgatcagtacttacctccccgctgccagcagcaatcaatatcaagatttataaggagaacatcatgtcacgtaagaggccgcaaccgccggtcaagccgttcaagaagaagccgaacccgctgaaggccgccaaggtcaccgagatcgattacaaggacgtcgcgctgctgcgcaagttcatttccgatcgcggcaagattcgttcccgtcgtatcaccggcgtgaccgtgcaggaacagcgcgagctctccaaggcgatcaagaacgcccgcgagatggccctgctgccgtacgccacctcgggtcgctgagttagggaggctttgaacaatggctgaaaccaaggttattctcaccaagaccgtgtccaacctgggccactccggtgacgttgtcgacgtgaaggccggctacgcccgcaactacctgttcccgcagggcctcgctttcgcgtggaccaagggtgctgaggctcagatcaccgctatgaagcgcgctcgtctggccaaggccgtcgctacccgcgaggacgccgtcgccgctaaggccgccatcgagggcaccaccgtcgagatcgccgccaaggtgtccgagtccggcaagctgttcggtggtatctccaacgaggccatcgccatcgctctgtccgacaaggccgcggtgaacccgaaggccatcgaggtcgagaccatcaagaccaccggcgatttccccgccaaggtggccctccacccggagatcaccgcttccttcttcgtgaaggtcgtggccgagtgagtcattccggcctagtgctggaatcacacagaccaagagtctgagcttaagcatcatcccccgtgcggttcgcgccgcatgggggatttttgtattggtgtttaaaaacgctggaaataggcgcgacacgccgagagttgcatccgcttcaaatctgagtatatttaacacctgttgcaaggaacacttcaatatctaaccaagcccctgtagctcagttggttagagcagctgactcttaatcagcgtgtccagggttcgaatccctgcgggggcacagacaaccggaatcgaaagattccggttttttgttttttccagcatcagtccgtagctggtgcggaaaggccgtcttcgcgcgtgacggccggacgtgtaaggagcggcgtcatgtctcagatattcgcgttcaccgtatccgaccccgaaggcatgcacgcccgcccagctggccggttggttgccaaagcgcgggaatatgagtcgaacatcaccgttgcctacggcggcaaatccgtggatgccaagcgtatcttcggtgttatgggacttgatgttcaacaaggtgacgaggttacggttcgggtgcagggcaacgatgaagctgtcgctgccgcagagttcgagcgattcctcaaggagcacctgtaatgagaacgatacagggcgtcggcgtatccgctggcattgctatcggcacggtccgcgtgctcgccgccgccgatcatgctgtagaacgccgcgtaatcgacgatccgcaggctgagatggatcgattccgcgcggcccgtgacatggccgtcgctcagctcaagcaactgcgtgacaacgtcgccgctgagttcggcgaaaacaaggccgagctgttcgacgcccatcggcttatgctccaggacccggactatgcgggatgcgtcgaaggtttgattgcgcaagacaaggtgaacgccgaatttgcggtgaaaagcgtcgccgaacagttcgccgccatgttcgctgcgatggatagctcgaccatgcaggctcgagccgctgatgtcgaggatgtttctcgccgcgtgatgaacgtgctgcaaggcaaacgtgatagcacggcgcaggatggcagtatacaaggcgatgctgtgcagaacggtactgtgcagaacgggattgcgcagaatgggattgcgcagaacggcgaaagccacatcatcttcgcccaagatcttgctcccagcgagaccgcgcagctcgaccgcgctaaggttttgggcctcgtgaccgccaagggctcagcgaactcgcacaccgcgattctggcgcgcacgatgggcctgcccgccatcaccggtatcggcgacgccttcgacccgactgatgacggtcacgttgccgtaatcgacggcgccagcggtgcggtgttcgtcgacccggacgaggccacgctgaccgagtgccagcgcaggaaggccgaagctgaggaacacctgagcctactatggaagctcaaaggcaagcccaccgaaaccaagtccggtcagcgggtccacctgtacgccaacatcagccgtccctctgacgtagccgccgtgctggccaacgatgctgagggcatcggcttgttccgcagtgagttcctgtatctggaacgcgaggactggccgaccgaggaatttcagttcgatgcatacagacaagtcgcacaggagatgggcgaccgtccggtcatcatccgcacactcgacatcggcgcggacaaacaggtcgactacttcaatctggaccacgaggataaccctgcgcttggttaccgggcaatccgcatctgcctgacccgcccggagattttcaaagtccagttacgcgcattgttgcgcgcctcagcatacggcaatatcgccattatgctgcccatgatcacctcggtgcaggaggtgcgcgacgccaagcggattcttgaagaagccaaaagcgagctgcgcggcgagcacaccgacttcaacgagagtatccagatcggcgtcatgatcgagacgcctgcgtcggtcatcatggccgacgagctggccgccgaagtcgatttcttctccatcggcaccaacgacctgacccagtacacgctggcctgtgaccgtcagaccccgagtctcgaacgctttgccgacccgcattcaccagctgtgctgcgcatgatccagatgactatcgaggctgcccatcgtcatggcatctggtgcggcatctgcggcgagcttggcgcagacctgagcctgaccgatacgttcctgtgcctaggaatcgacgaactgtccgtctcgcccaccagcgtcctacccctgcgcaacgtcattcgcaaccactgagagtcaaggtcgcttcggctgattccggtggcttttttgggcattgcattcggctggacattcgacatcgcatcctgccagcatttcgtcgtggggcaaagtgtacaatcgccacgtttgctttcgcgcccagcgtaaatcgcgtcgccggctccgcgaacggatttccaatcacacagaatgccgtgaacagtcagccatgcctgttgcgcggcgaagagaaaagaagaagcagtggaatactctctctttaccaagctggccgccgagttcttcggcaccgccattctgatgatcttcggcaacggctccgtggccaacgtcgagctcaagaacaccaagggtcaccacgccggctggttgaacatcgccatgggctacggcttcggcgtcatgttcccggtgcttatgttcggtagcgtctccggcgcgcacatcaacccggccatgaccatcgcccaggccgtcaacggcctgttcccgtggagcgacgtgctgccgtacatcgtcgcccagctgctcggcgccctgctcggccagttcatcgtctacctgacctactacccgcactacaaggagaccgaggacgccgacgccattctcggcaccttctgcaccaccgacgcggacaaccagaaggtcaactacttcctcaacgagatgttcggcaccctggtgctcgtcttcggcgccctgtgctgcctgtccctggcttggggcaagcaggactacgccgcggcctccatcgtcgtcggcttcattgtgtggggcctcgtgacctccatgggtggcccgaccggccctggcctgaacccggctcgcgacctcatgccgcgtctgctgcacgccattctgccgatcccgcacaagggctcctcccgctggggcgaggcctggatcccggtcgtggccccgatcatcggcgccatcatcggcgcttggctgttcgtgttcttcttcgccagctgattcgttgattgattcatatatgcaaatggcctccactcgttttgggcggaggccattgtcgttgaatcaggtaaacgcagaggctactgctccaggaacacctgcggggccttcatgaagttcgtggcacagtgttcgccgcagaagtaataggacttgccctcatactcgcgcgtgatcgcgtcggcgttcaccgccacggtcatgccgcacaccgggtcggtggcggtttcgccgtccgcgggggcggtgtggtgcatgtgcattcccatatccatagtgttctccttgttggttggattattggattggtcagatgcgtgattggtgtgattcagcgtggtgcgatcgtcgatgatgatggttggctcgtgaggcgcgttggatgtggcggagccggtgatgttggcggcgttggctgattcggccgatccggctgattcgacatccgccgtgctgctgcccgagccagcggtgccatcgacaacgcccgcgttgatgttcgacccatgcagcctgttcgcgttcagcaccaggcacactgaactcaacgccatcgccagacccgcgatcatcgggctcaacagccagccggtgaacgggtagagcacgccggcggccaccggaatgccgatgacgttgtaaccgaacgcccagcccagattctcccgaatgttgcgcatcgtggcgttggacaggttgatggtcttgatgacgccgcgcaaatcgccgctcatcaaggtcacgtccgccgactgcatcgccacgtccgtgccggtgccgatggcgatgccgagatccgcctgggccagtgcgggggcgtcgttgatgccgtcgcccaccatcgcaatcagagtgcgggattgcgcggccgtgcgggaggtgccgtccgtggacttggcggcggcctcgtcgcgttcgcgctgcagtttggcgatccagtaggccttgccgtccggcttgacctcgcagatcaccgtatcgatgccgacttcgcgggcgatgcgcccggctacctcggccttgtcgcccgatagcatcaccgtgcggatgccgcgtgcgcgcaacgccgcgatggcctcgcgcgagccttccttgactgtgtcctgctcgtagctcggcttgtcccagtcggcggccgcgtccaccacgccgcgcgtgatggtgccggtcttgtcgaacaccacggtgccgatgcgacgcgcctgttccagcgccttggcgctggtgaccagcacgccgttggtggcgcccaagcccagtgagaccgtcaccgacagcggcgtggccagtcccagcgcgcacgggcaggcgatgatcagcacgctgaccgcggtgaccagcgcatgcgccagttgcggcaccgggcccagtgacacccagatggcgaacgtccagatggcgatgatcatcaccgccggcacgaaataccgggcgatcttatcggccagctgctgcaccggcgccttggtcgcctgggcgcgggccaccatcgccgcgatctgcgagagtaccgtgtccgcgccgacttgggtggcgcgcatcacgcagtcgcccttgagcagcacggtggccccggttaccggatcgccgacggttttggaaaccggcttggattcgccggtgatcatcgattcgtcgatatgcgcctcgccggccacgatgatgccgtctgtgggcacgcgctcgccgttcttgacgaccagcaggtcgccggtggcgatggcgtcgatgtcggtgtccgtgaaatacgccggattgcgccattcgatgccgtccacattgtctgcggaagtggcgttgagtttgtgcgcggtgcgcgggcgcagtttgatgagcgactgcaccgccttgccggtgccttcgcgggccttggtttccagaaggcggccgaccagcaccaaggtgatgaccacgccaaccgattcgaaatacggttcgcgcgagccttccgggaacacccacggggcgatgcaggtcaccagcgaatacaggtaggcggccgaagtgcccagtgagaccagcgagttcatgtcgggggagcgatgcgccaacgcggggaagccgaccgtgtggatcggacgcccgcagtagaacatcaccggcgtgatcaggatggcctgcaaccacgggttcaccatccaatgcggcaccagcgtgggattggccatatgcagcatggtgacggcgaatgccggcaacgtcagtaccgcggccacaatcaccagcttcgtcagcgccttgatctcattggcgcgttcagccgcctcccggcgctccccctccgccgcatccacggcggtaggtgccgtatacgaagcatcaggatgaggaaggggcgtgttctcatccgagccgtcctctccctcaaccctcaacaacccatgcaccatattcatgccgcacgcaaacggatactcgcccgccggcaacgccggcagtttcacgtcggtggtggcgttgcccggcagcatggcgtcaagtcccagatcagcaaacaccacatgcgaggtgcattcgccggtctcctgccggtcgaaggtcagtgtgatcggcgtacccgcacgcatgctcaccacggcgggggagtacccgcccttgacggtgatcgtcgcggattggcgttcgccggaagcgtccatggccccggccgttgccttctgcgttccgaagaagaaccgcaggaccagccatgtcaatgcggccgccactatcagcgccgcgacggtcgagaagatgctgaactccataactgttccttcccattcctaatgcactgaacaacagtgtataccctatacccctagagggtatatgatggggtgtgttcagctgacggataagtatcagggggttgcgatgcatggttatgacgaagacaaggccaaggtcatcgcacgattacgccgtatcgaagggcaggtgcgcgccatcacgcagatggtggaggatgacaaatactgcatcgatattctgacgcagatttcggcgtcgaattcggcgctgaaatccgtggcgttattgctgctggacgatcatctcaaccattgcgtgcggcaggcgtcggtccagggcggcgaggtggccgatgaaaaacttgcggaggcttccgcggccattgcgcgtctcgtcaaatcgtgacgagttctgccgcatgatgacgcgcgctggcaaatcatgaaaggccgtctgacgctcggatacgacacagcataataacggttgatgctcgactgtgataaggccaagcgtccaatgtgggctgctgagcgtccgtttaacggcttgaaatcgtcgagttcggtaaaaatttaccgtcattcaccatcgatgacatactgggtaccatgtttgagcaaataggaaccgtgattatcgtcatcgtcgtgctagtggttggtgcagggcttggcctcttcgccggcttcgtgctggggcgccataagggtcaggagatggctcgaggcgtcaaaagcgaggagctggaggaggccaagacctcgctggagaatgcgcgattcgagaatgctgagctcagtgctcgcaatgctgccgcacaggctcagattgaaggcgtgaaccagcaattggctttcgccaagtcacaacttgcccaggcgcagcaggctgagcagattcgcattcagcaggaacgtgagcgtgcggctgcggaggcggaacggaagcgtcaggcggatgctcgggacgccgaggccaagcgtgctgaacaggaagcacgtttgaaagaacagagcaaggtgctcgaggcgcttgcgccagtggccaaaaatcttgataccttgcagaacaaggtcacgcagatcgaagagggccgcaagagggaaatgggcgcattgggagcccaactcaaggggctcaacgaccagcaggcccgtttggacaaggaaaccagttccctgtccgccgcattgcgcaacaacaaggtgcgtggcgcgtggggcgaggcccagctcaagaacattgtcgagtccgccggattgctggaacatgtcgatttcgacattcaggtggtggtcacggatgccgatggacgtacgttgcgcccggatatgatcgtgcatctgccgggaggcaagaccattccgattgatgccaaagtgccttatgccgattaccagcgtgcctgcgagatcccggacaccgccagccccgaggatattgcccgccgcgatgatttgttacgagcccatgccaaggcgttgcgcgagcatgtacgtgctctcggcgaaaaggcctattggaatgcctttgatgtggcacccgattttgtggtggccttcatccccaatgaggcgctgttgcaggccgcgctcgaagccgaccccacactgatggatgatgcgttctctcgcaaagtggcgctcacctcgccggtcacgctgtgggccgtgctgaaatccgtggcctatgcctggcagcagcagtcgctcaccgatgacgccaagcagctgttcgatttgtcccgagaactttacgaacggttctccacgttgggtgattatgccatcaaattgggcacccagatcaccaagacagtcagcgcttacaacaagttcgcgtccagtttggaacgccgtgtgttgcccaccgctcgcaagctgcaaaaaatcgaaccgaccaagatcatcgaggaagtaccgatcatcgaatcagacaaaggcaatgtgagcgaactgtccgcccctgaagtggtgccggccgatgaaggtgatactcatctgactgcctcaggcgatagtctggagtcatgactgaatctggattccgccccactggtaccccggacctcgccgtcgcgaagagccacaatgactttgccatgctggagccgcgtgaacagctagccaccttgctgagggagcatgtggtgggccgtccgttctccgaacttgccgcggtgactttcgaccaccatgccgccaccgtcatgggccatgtactgattgacgctttggaagatgcgggctattcggttgatgacttcgatgctgttggtgccttgaccgcagcatctgtgcccatggtgtccgccatgatccaggccgccgcctctcgtggcgaggacctagacggattcgtgatggacttcgtctacccgtccatcaagggcccctccatcgaaggccgccgtgtggtgctgttggatgcttggctgtccgaaaagtcgtacgtgcagaccagctcgctggtcaccctgcgcaacggcaatgagctgagcctcgactttggcatagtggagcagctgggtgccaaggtcgtggccatcgcctcgctggtcggtggcggtgccaaagacatcaatgtggtcaacccctccaccggcgacgagcaaacgctccccttcatccaggtcttcgacgaatccgaactgcggtaaatccacctttgacttccctcgcataaagtcagccgggctgagccgcgaagttgactaagaggaaccggtgaatagcgttatcgaggagaaagattgcacgcacccaaccagatttctttggctgccaaagcttcaggtgaaccggaattccgtgaaatcggccttgggccgtggtctgagacccaccccggcgagcctcgtcccgacgatccgacttctccgaattatgacggtcgtttcgactcggtgctgttgaatgacggcgaccgccgcaacgtattggatcgttaccgctactggaccgtcgctgccattaaggccgatcttgacgctcgagggcgtcatgacttcgaagttgcggtggaaaactggacccacgatttcaacatcggttccatggtccgcaccgccaacgccttccaggccaagcgcgtacacattgtcggtccacataagtggaatcgcaagggcgcgttgatgaccgaactgtaccagcacgtcgaacaccacccctccatcgccgaactggtggaaagctggcatcatcgcatcgccggtgaaatcgcctatgaacgagccaaggccggtgccgccgccatccatgcgcatgatgtggctgtggatggagacaacaagcaccttcatgagctgctggccgaaatcgatgcttgtgatgcgcgcatcaaggagcttcaagccgcccgcgtcatcgccctcgatatcattcccggcgcagtgccgatggaaacctataccttccccaagcggtgcctgctgctcttcggtgcggaaggccccggattgagcgagaaggccctcgaattggccgacgatgtggtctacatctctcaattcggttccgtgcgctccattaatgcaggcgctgcggcggccgtggccatgcacgcatggattgcccaacacgccgtatcaggcgtgtagccatgcgccgacaatcctgccgcatctgcctaatatgggccacattagaggcatgatctacgccaccaaatccatcgccgcggcattaattcgcatttgccgccggcatcgtcggcatcctgctcgccgcaggcatcagcagctccgcgcagtccacactggccgaagccgttaaaccggactactggattcccgaatggtggcagtccggcctgattctcatcgcctgggctgccgccgcatggatcggcggtctcatcatcaccggaaaagcggatatcagatatcaaataacgcgggttactgctttggcagttctgccggttcggccatggtcctggcagtttgtcatggctatggctttggcggttctgcagtgaccatggttctggtgactctgaccccatggatttgaccaccgtggttcactgcgcttaaccagctcccatcactgttccagcatgaggtatgccggctgcccgcagcttattgagtaaaggatgttgttgcatcacctcctcataggtgaatcggacaatggtgtcgactttggcccggtacagtgccgtctcccgttctttctccgcttgaactgcaccacgaacacccttgcggtcattcatatccgggttcacatatttttcatagccatcgaattcgcccacgataagccgattctcaggtagccgccagaggaaatccacgcgatacagagcaccggtttgcgggtcggtgatgttttgttgcagttctggggctaataggccgcctgcgatgatggtgcctcgtccaagtgactcgccaccattctcactcgccggattggcataatgcagtaggcggaatatcggcgtgcaatcacgtcgcatagtgctgcacacattcagaatgtccgtgatggcgacgccgttgcgcagcgccgaatcgataatgggcagtgcaaatcggaagtcgacggacagcccgcaatccaccaccgttctggctttgctggtcaccgggagtccattggcatattctggcgtgctgcttgacgtgaagatgcgtttgacctttgcactgctggcgttggggcctcgtgatgttgtggcgagagtgatggtgccagcatgaagatgccattggtgttcaaaatcgtggatggccgctgccgtgaccccggcgaacacccaatccggatgtctgttatgaagagttcgtgcaatatgtctgatacgttcgtcgggttgcagcgaatcccagtattccgaagcggcgtacatgttggggaatacacgtttgagttcgcgcgcctgcacgcgccgagccagcgccgagcggtgtgccttggttgttccataagcgcactgttgcgttgcttcagccttcgtgatgagtatgtccactgctttgtgatgtttcatgattcgacggtatgccaatggtgaacatggtgtctatctgtctggggttatgtggttctagcttcggtgcctagatgtgtgtttttgcctgattatcaggcatctgaccgtattggactgattatgtggattcttttgggtgggtatgcaaaatgtggataactggcgaggtgcgcagggcgattgtcgttcatatgttcgatgtaggtgtgtttgggctcattgtgagcttattagggtggccatgcagatacttcagtggggcacatttgcggttgggccgtggcgttgcctcgctgcggggcgtctcatcggagcgttttattggttggaccgcggttttgttttgctgggatggctgagcggggcgtttcatcggccagctcgcggttttgctctgctgcgagtcgtctcagtaaggtgaacttgcggtccggcaacggttttgccccgccgaagaagccagcagcggggcaaatgctcgaccggcttgagcttctgattcgctgaagggctccaataggcgggaaaatgaggattcccgacaactgcgtgtcacatacggctcatatagttatggccatgccaacattttcacgtgaagaaatcgtgcatttgggcgatctggcccgaatcgcgctcaccgatgaggaaatcacccgtctgcagggcgaactgaacgtcatcgcagactccatcaacaaggtccaggaagtcgcctccgacgatgtgccgccgaccgccaacccggttcctctggaagcctacctgcgcccggacgtcgccgaaaccccgctcacgcaggaagaggcgctcgccggtggcccgaagaccgaggccggcatgttcgtggcaccgcgaatcctgggaagcgaggagtaatcgatgagcaacgaaaccgcaactctcgtcaaactgtctgctgccgagcaggccgctgccatcaagaagggcgacgtcacctctcgtgagctcgtcgaagcccacctcaaggtgatcgaagccgccgagccgtccatcaaggccttcctgaaggtttccggcgatgtggctctcgagcaggccgacgccttcgacgccaagtccgccgaagacaaggccgccctgcctgagctggctggtgtgccgatcgccatcaaggacatgatcgtcaccaagggcattgagaccaccgccgcctccaagatcctcgaaggctgggtgccgccgtacgacgccaccgtcatcgaaaagctcaaggccgccggcatgccgattctcggcaagaccaacctcgacgaattcgcccagggctcctccaccgagcactccgcctaccaaaccacccacaacccgtgggataccgagcgcgtgcccggcggttccggtggtggctccgcctccgcggtcgccgcattcgaagccccgctcgccctcggcaccgacaccggcggttcgatccgtcagcccggcgccctgaccggcaccgtgggcgtcaaacccacctacggcggcgtctcccgtttcggggccatcgccatggcctcctcgctcgaccagatcggcccggtctcccgcaccgtgctcgactccgcactgctgcaggagatcatcggtggccacgacaagcgtgactccacctccatccccgaaggcccgcgcccgatggtcgccgccgcccgcgaaggcgccaagcgcgatctgaagggtatgaaggtcggcctcatcaaggaactcggcggcgacggcttccagcccggcgtcgaggcccgcttcaacgaggccgtcgacaagctcaaggagatgggtgccgaggtcgttgaggtctcggttccgcacatcggctactcgctgggcgcctactacatcatcatgccgtccgaggtcagctccaacctggcccgttacgatggcatgcgctacggcctgcgcgtgatgccgccgaccggcgtgcctcagaccgccgccaacatgatggcctacacccgtgaggccggcttcggcgacgaggtcaagcgccgtatcatcctcggtacctacgccctgtccgccggctactacgacgcctggtacggttcggcccagaaggtccgcacgctgatcatccgggacttccacaacgccttcgagaaggccgacgtactcgtggcccccaccagcccgtccaccgccttcaagttcggcgagaagatggacgacccgctggccatgtacatgaacgacatcgccaccattccggccaacctcgccggcgtgcctgccatgtccatcccggccggcctgtccgacgacggcctgcccgtcggcttccagttcatcgccccgcagcagcgcgacgaagtcatgtacaagccggctgcggccctcgaagccgcgctggaagacagctggaacggtccgatctggaacgacctcaagaccccgtggcttgacggcctgggcaagtgagcatcggaaggaaagaaacaacatcatggctgaaaaactgatgaagtacgccgatgccaccaagaagtacgatgtggtcttcggtctggaaacccatgtggagctgtccacgaacaccaagctgttctgcccggcccacatcgagttcggcggcgagccgaacaccgagctgaccccggtgagccttggcctgccgggctccctgccggtgatcaacaagaccgccgtcgattacgcgatcaagctgggcctggccctgcactgcgaaatcgccgagtggagccagttcgcccgcaagaactacttctacccggacatgccgcgtgactaccagatctcgcagtacgacaagcccaccaacggcaatggctacctggacgtcgaactggaggacggcaccgtgttccgtgtgccgatcgagcgcgcccacatcgaagacgacgccggcaagaacacccacgtgggtggtgccgacggccgtatcgaaggcgccgatcattcgctggtcgactacaaccgcgccggcgtgccgctgatcgagatcgtcaccaagccgatcgagggcgcgggcgatcgcgctcccgaaatcgccggtgcctacatgcgcgccatccgcgacatcgtgcgcgcgctgaacatctcccatgcccgcatggagcagggcaacatgcgcgccgacgtgaacgtctcgctgcgcccgagcccggacgccccgtacggcacccgttccgaaaccaagaacgtgaactcgttccgcggcatcgagaagaccatccagtacgagatccgccgtcaggccgctcgtctggacgacggcaaggagattctgcaggagacccgccactgggatgaggctacgcagaccaccgctggcggccgtctgaagtccgatgccgacgactaccgctacttcccggaccccgacctcgtcatgctccacatcaccaaggagcacatcgaggagatgaaggcccagatgccggaaatgccgcgtgagcgccgcaaccgcctcaagtctgagtggggcctgagtgatctgcagatgcgcgacatcctcaacgccgacgccctcgacctgattgaggaaaccgtcaaggccggtgccaaggccgccggtgcccgcaagtggtggctgggcgagctttcccgcgaagccaacgccaagggtatgtccctcgaagagctgccgatcaccccggccgatgtggccgaggtcgagaagctcatcgcctccggcaagctcaacgacaagctcgccaagcagaccgtcgaaggcgtgcttaagggcgaaggcactccggatgaagtcgtcaagaagcacgactacaagatcgtcgaagacaacggtgccatcgaggcggccgtcgacgcggcgttcgaatccaccccggatgtcgtcgagaagctcaagagcggcaacatgaagccgatgggcgtgatcatcggtgccgtgatgaaggccacgcgcggtcaggccgacgccaaggccgtcaccaaggtcgtcatgggcaagatcaagggctgattagattcactggctcccgctggcgggagctgtcgaacggagtgagactgagggtggtcgccatgtacggatgaccaccctcagtccgcttcgcggacagctcccgccagcgggagcacttatttgtagggaaatcctccagttcaaattcgttggacagctcccgccagcgggagcctttattgattctgtaagaaagtcgtcgcagagcatttccagcgttcacccagtcgagtaagatatgttcggcactggaccgtgagccgaaacaagccgaaccgggggatgtataccgatgaccgcaaccaacgagacgctgagcatggctaccgaagcgcaactgaagcgcgatctgccacagagcatcgtcattccgccaatccgtggcgaaatggtgcacctgcgccccgccaccgtcgaggacctggctcgtttggatgaacttgatgccttctatggcgcatccaagatcaccggcaaggatgcggtcaccgaacgcgccatcgtacacacatgggtccgccgctcccaagcctgggaagccggtcaggcacccgccgaatccggcgtgggcgacccggaatcccgccgcaccatcgcatgggccgtattgactgacgccgaccatgacgatgacggtcagctcgatgcggccagcaccgataatgtcatcggcatgattttcctcatcgacatcgacggctggtccaagtccgcccgcatccagatcatcttgggccgtgagtaccgtggccgcggctactcccgtgacgccatgccgcgtgtgatgacttacggctttgcgcccgaaccggccggcctgggcatgcaccgcatctgggtgagcgtgccggaaaagaacagccgttcgatttcggtctaccagtcgctcggcttcgtgccgtccggcacctcgcgcgacgcgttgtgggatgtcgaaaacaacaaataccaggaccttatcgtcatggacacgttggtcgacgagtacgacccgattcgttcgcttgacgcttttggtatgcacttgattgaggacaacccgggtgtcaaggaagcgctgtccgcgcgtgagcattccatcgccatccagcagaacaagccggaacccgagccggcacagcgtggtgaggcagccgccgtcacgacgagtgacgtgcagtcccaggcccagacgccggcggccgcacagccagtcgagccacaggccgggcaccacgacgatacgcagaagaacgcgcgccacagtctcgaagaggaaagcaactggccgtacggccaggcggaacgcaagccctcaaaggaagcatggtggcgtacgctgggccgcggccgcaaacgcgatacggaaagtgagtgagtaaacaagcatgagtgccgaggatctcgacaattacgaaaccgacgccgaactcgcgctgtatagggaatatcgtgacgtcatcaagctgttcacctatgtggtggagactgagcgtcgcttctacttggcgaataaggtcgatttcaacgtgcgttccgctggccaggacgtgtatttcgatgtgcagctgactgacgcatgggtatgggatgtctaccgttccagccgtttcgtcaagtccgtgcgcatcgtgacgttcaaggacgtgaacgtcgaagaagtccagaaaaccgatatcgacattcccgacgatattcactgacaggcaatcgtctgatacagcctgtattgacaatgcgcggcattccgtcatcttacggcggggcgtcgcgcattgttcatacaacgcatagcaaaagttcagattcgtaaccttgccatcgtgtgtcttgtttgcttgcggctgatagaagatgatgctgcttgcacttgcaggaatctcgctgaatccatggaaggttcgtcgctgacgaattagcccaagaccaaaccgattcgccgcgctgtgcgtgacgcagcgttgccgaatacccctacctcacgattggatgcgtcgcctttctgctgatggaagacggcgcatcggtcgtatatcgggagaattctgtaagcattcgctcatctttcggtgtgcgattccggggcttctagtaaactgtctctgattttgcgtttataaggagcataatgaccgacaagcaatccgtagtgattatcggcggcggtccggctggacttaccgccgcatgggaactcgtcaaggatggcggcgcggaaaactatgacgtgaccgtgctggaggggacccgcgaattcggcggtatctcgcgcaccgtgaagcacaacggcaaccgcatggatatcggcggccaccgtttcttctccaaagacgaacgcatcatggattggtggaagaccgttctgccgttgcagggcgcaccctcctatgatgacaagaagctcggccgcgaccacgacatggagccgggcggccccgatccggagacggaggacaaggtgatgctcaagcgccaccgcgtgtcccgtatcttctggaaccgccacttcttcgattacccgatttcgctgagccccaacacgttgaaggccatgggcttcaagctcaccatggtggccggcttcagctacctgaagtccatgttccacaagctgccggaagacaacctggagaacttctacatcaatcgtttcggccgcaagctgtattcgatgttcttcgagggctacacggagaagctgtggggccgccacccctcccagatctccgccgactggggcgcccagcgcgtcaagggcctgtccatcatgggcgtgctcaagaacgccttccagaagcttagccccaggaagcgctccaacgcggaggtcgagacctcgctgatcgaggagttctggtatccgaagtacggtcccggccagctgtgggagaccgtcgagtccaattgcgaggccgccggcgtcaaggtgctgaccgacgccagggtggtcgaggtccgccagaccgatggcgccgtgtcttccgtggtgtacgaggattccgagggcaaccgcaccgagctttccggcgaccagttcatctcctcgatgccggtcaaggacctggtcaacgccatcgacgcggccggcgacgatcccgaggccgctgattccaagcccgccccggccgatatgaccgaggtggccaacggcctgccgtaccgcgacttcgtgaccgtgggcctgctggtcaagcacctgaagctcaagaacaccaccaacatccccaccctcggcaatccgccgatcgtgccggactgctggatctacgtgcaggacccgggctacaaggtcggccgtctgcagatcttcaacaactggagcccgtacctggtcaagaacgtggacgacaccgtgtgggtcggcctcgagtacttctgcgaggagggcgactcgttctggaacatgagcgaggaggacgtcaccaagttcgcgatctccgagctcacccgcatgcgtgtgatcaacggcccggacgaagtcatcgactcccatcgtgagcgcgtcaagaaggcgtaccccgcctacttcgacacctacgagcacatggacgagctcatcgagtacctcgacggcttcggcaacctctactgcgtgggccgcaacggccagcaccgctacaacaacatggaccactccatggccaccgccatggaggccgtcggcaacatcaagaccggcaagacgtccaagaagaacgtgtggtccgtcaacaccgaaaagtcctaccacgaagaaaagtgaataaaccttgttgagctccctcgtcacagagggagcttttttggttttcggcgggccgttttgcgttggtcgagttggcgttgtacagtaaacgaagttcgtgaaaactcagagacgcagcgaacattcatgagcggtgcaaccgcaataatcactcttaacgcctggataggcatgggtctgttcggtatggaaagggcaaccagtggcaaatagccagaatcttgaggatatgaagctgcctgagctcaaagagctcgctaaacagatgggcctgcgcggcacgtcgaccatgcgcaagcccgagctgctcgccaccctgcaggcggcgcgcaatggtggagagccgccggccggtgtgaccgtgcgcgctcccaaggccgccaaaaccgccaaggtcgtcaaggctccgcagtccgatgccgctgaggccaataccacagacaatgctgacgtggccacccagtcgccggctccggctccggcctccacggaaccgcagctcgatttgccgcttcccgtggccgacgatgccaagaaggacgagaccgaaccgcgacgcacccgtcgtaaggccgccgatgatgccgcatccgaaccgcgtgcggcccgccatcgtcgcgatgacgaccagtccgatttcgctcgccgcaagccgcgcaagaaggccgatgaggccggcgatctgctggccacgctcgatttgggagatgcagcgcctaccgagcgtcgccgcgagcgccatgaggacgtggaagttccgctgattcgccgagtccgtgatgatgaggacgagcagcctcgccgccgtcgtcgcactgcggaaaacagcgaagaaaccgtgcgtgacctcgacgatatcctggccacgctgcccacgcagaagcacgaggaaacgtccgaagacggcgagcagaacgacgatcacgagtttgtgcgtcgtaaccgccgcgaccgtagcgatcgcaacgatcgcgataaccgtaatgatcgcaacgatcgccgtaaccgccgcatgcgtggccgtgatcgcgacaacgccgatgatgatcgtcgctatgatgatcgcgataatcgtagcgatcgcaatgaccgtgatagccgccgcgaagagccgcaggaggatctggtgccggtggccggcatcgtcgacgtgctcgactcctacgcttttgtgcgcacttccggctacctgcccggcccgaacgacgtgtacgtttccatgggccaggtcaagaagtacggcctgcgcaagggcgatgccgtccatggttcgattcgcgccccgcgcgaaggcgatcgtcgcaaccaacgccagaagttcgtgccactgcaggccatcgattccatcaacggccaaagcgttgaagaagcgctcaaccgtccgcagttctccaagctcacgccgctgtacccgcaggagcgtttgaagcaggaaaccgccccgaacaagctcaccggccgtatcatggacatcgtttccccgatcggcaagggccagcgtggtctgattgtctccccgccgaaggccggtaagaccatcaccctgcagaacatcgccaactccatcgccgccaacaaccccgaggtccaccttatggtggtgctcgtggacgagcgccccgaagaggtcaccgatatggagcgcacggtccagggcgaggtcatctcctccaccttcgaccgtccggcctccgatcacaccacggttgccgaactggccatcgaacgcgccaagcgtcttgtggagctcggccaggacgtggtcgtactgctcgattccatgacccgactggctcgcgcttacaacatcgccgcccccgcctccggccgcatcctgtccggtggtgtggacgcgcaggccctctacccgccgaagaagttcttcggcgcggcccgcaacatcgaaaacggcggctccctgaccatcatctcctctgcgctggtggaaaccggctccaagatggacgaggtgattttcgaggaattcaagggcaccggcaacatggaactgcgcctgtcccgcgagctggcggacaagcgactgttcccggccatcgacatcaacgcttccggcacccgccgcgaggagctcatcaccaacccgcaggaactgccgattatctaccgtctgcgtcgactgctgggcggcatggagcccgagcaggcctaccagacgttggtgccgcgcctcaagaagaccgccaccaaccgcgacttcctcgccgccatcgtgcagcaggccaacaccggcaacgcggtcaacggcaactgaccagaccgctgaacaatagtgtaagggctgcaccccgattgatacggggcgcagcccttgccgtatatgatgcaaatacatcaactatcacattgcagttgtagtattgccgtcaacgttcacatgcacgctgacgatatatgagatgaaagatgtatcaatgggttcgattgttttgggagtgggcaatggtgcggccatgttcggcgatgcggatgccagccatatcccctacggcgactatgacatctgagatatctgactttgcgcatcgtgcaaagccgcaatcgggagtatcctcgaatctatgagcgaaacgagcagcggctggcaaaggaccaccatcgactccgcccaggcggcggcccacccggaaaccgcacaagcggtggcgcgcatcaaaacgctgcgccaaaccatcgataacatcgattcggcggccatcgcattactggccgagcggttcaaggccacctcgcaggtcggcgtgctcaaagccaacgccggattcgcgcccgaagacaccaagcgtgaggactatcagatcgaacgcctccaccgcatcgccatcgatgccgggcttgatccggaaattgccgaaatgtaccgtgaattcgtggttaccgaagccaagaagcgccaccagcgcatcgccgatgccggtggtgacccgggcgtactcgacgtattcgcctgattcgcccgcagcgaatgggcacctttcggatattcgtctatagggcaagttgccggcagcgactacattaatacgggaatggaatgcccatagtggccgactgtatgaatgggatacgtagatgagatgtggtgccgcactggtcagttgcgcattgtgcgtggcttcgattctcggcggtgcttggatgtctcgtccgactccggttgattacggtccggtgctcgctacggcaagtgatatgtacgccgtcgccgatgccgaaggggagccggtccgttggtatgtggtagggaagggcggtgccggcaatggcgccagtgccgattccggcaatagcggttccactgataccgattccgccaatagtgattccggcacgtccaaggtttctcgtatccccgcttccgccgccaccctgccatggaaagtcagcgtcacctactcgcttgacggtccaaacgtcgaggcaaacgaggttgccggcgcatctggactgatcggcgtgtatatcgatattaagccgcaaaccaaggaggccaaccgtacgatcccggttgtcgcctttaccgtgcctacgcaggtagccgatgatgtttccgctgacaactccattacggtaaccacgcaaggttccaataccgtagtcgccgcagctggaaaagccgcaaccggcttggaattcagctgctatatgaacgccaaagacttctccatgagttccgtggcgctcgccgtattgccttccaattccagcagtccggtagttggtgctaatcccgatgccgcgaatgccgccgcacagcctgctgccgatacggatgtcgcccaactcgtcgcctctgccgccatactggtcgattcactgaccgacgccggttccggggagcatcaacagctcatcgagcagcttcaaaccctgcgcgataatgagcgtgcgctggacaagtccgtagtggccgaacgcgaaaccgcccataagcggacgtttgaagactatatggccgcgtatgtgggctcatataccacgcacctgtctggatcgattggtacctccacccagttgccggcgttgatgggcacggccggcgaactgtccggggatacgcctttggcgcaagccgtactcgacttggccaacgcggtgaacaacgtcagtgccgcacatcagcatgctggtgcggtcgatgcgttggatgaggtgattcgccgcatccagcagcaaggcaccaccggactggtggatgatctgaccgccgaggcttcggaggaagccactcgaggctccaagcaatacgccgatggccagagccagctctccgccgcaatgattccgtattcgatgaaatacacggacgtctacacggctaatttgagcgccctgaccggcggcacgtcttcgggcgccaccgcttacgagagccaagccatcgccgaaaccaacggtagcgatgaactcgccgacgctcaatccaaggtcgatgccgcgatgagcacgcttgccaccgcctccgagcatacgggcaaagccacggccttgcgccagattgtattgcgattctccgatcagttcgaaggagtcgcgtcctcggcttccggcagcgatggcgatggctcgtccggtgatgtctcttccggtccggtgaccgaggctcaggcactgactggcctggtcgattcgcaatcgcaatcgttctacggcaagacccgggccgcccaagccaagcgtaaggccgatgccgcccgtaagcaggccaaagccgcgcaacagcagcagcagtcgcagcattccaaggcctcactggtcgatgacaccatgtccatgtctgctggcgatgtgatgaactatgcgggtggtcttacttcggccatcggtggtggaggtaagttcgattcgtccaagagcgatggttcgggaacgaacgactcagccaagtcgagcgatactggcgattccggcaacaatcttgacaccgctccagtactgttcggctttggcactggcggcacgctgctcaagcatgacatgagcgcgctgatcaatgagaccgtggagatcagcgatgctggcacgctcttggcgcaggccgtcgcgcagctcgatagccccaatacgcaacaaaaaaccgccgaaacccgatacctcatcgtgattccgacggtgtgatggtgtatgcgggaaaatccgcatgcgacaggtgcccaatacgcgtaaagtgcgttatcggtgtgggacgccgcatcaaaaactggctttttcgatgcggcgtcccacacccttttgtgagtcagagctaactatattttgaagaatggctaaattccaaggatttgttgattcggtctgtgggacgccgcgtatataaaacgtttgacacgcgtggtggcccacgctattgtgggccgccagcttacaatgcgggatatttgcgtgccgtcccacagtcgtgtcatccgaacgtcaaaaaacaaaagaggggaacctcaataggaggttcccctcttttgttgttgtgcgcaacgctcagtgctttggcttcttggctggccgagccgttaagcgggaagcccggtgggcttcccgtaggctcggaacgagcggcattgccgtgagacctactgttgttgtgcgcaacgctcagtgctttggcttcttggctggcggctcaccgagctcgctggcttcgacggcgacctcggtttcgggcgcgtcttcggcggcggattcctcggcgtgcttggccaccaagtcgaacttgccgaccacgcgaccggcctgcgcgatatcgcccaaggcggcgtgaatcgcgttcacaccttccgaagcagcggacagtgccacagacaggattggggtcttcatggagaccttggcctcggacttgatcttacgcagctgctccacggccttgccggcccaagtcagcagctcgggggaagcaccggtggcggcctcgacatacgggtccacgaccggccaggcggcgcgatgcacggaaccggaaccggcgtgcatccagctccacacttcctcggtggcgtacggcaggtacggggccagcagacgtgcgaaggcgtccaagcccagacccagagcggtgcgggcggacttcacagccttctcggacggcacattgccgtgctcgtccggagtgccataggcgcggttcttgaccagctcgatgtagtcgtcgcagaactgccagaagtaggattcgatgacttccagcgccttggaatgctcgtaggattccagcgcctcggtggcctgacgcaccaccaaagccagcttggccatagcggcgcgatccagcggttcggtcacatcggccgggttccacgaggtctcggcggcagcgcccacgtgatggttctcgtcctcacggccgatggccagcgcgaacttggtggcgttcagcagcttgatggccagtcgacggccaatcttcatctggccgatgtcgtacgtggcatcgaggcccaggcgagcggcggcggcccagtaacgcacggcgtccgcgccgaacttctcgatcggctcgttcggcaccacgacgttgcccttggacttcgacatcttcttgtggtcggggtccagaatccagccggacagcgtggcatgggcccacggcagacacttgttctccaagtgcgcgcggtccacagtcgagaacagccaggtgcggatgatgtcctgaccctgcgggcgaaggtccatcgggaaggtggaagcgaacagggccttggaggcctcgtccggctcggcccagtgggtcacgatctgcggggtcaccgaagaggtggcccaggtatccatgatgtccttttcggcggtgaagccgccgggcacatcacgctgggactcgtcgtagccttccggcacatcgatggtcgggtcgatcggcagacgatcctcgctcggggtgatcgggcgatcgtaatccggctcgccggaagcgttcaccgggtaccacagcgggaacggtacaccgaagaagcgctggcgggaaatcagccagtcgccgttcaggccgtgcacccagttctcgtagcgcacgcgcatgaagtcggggtggaagttcagttccttgccgcgctcgatgagctcggcgttcagtttctcgtcggtaccgccgttcttcaggtaccactggcgggaggtgacgatctcgagcggcttgtcgcccttctcgtagaagttcgtcatacgcttggtcggcgtcggctcaccgtccagatcgccggactcgcgcagcttgtcgacgatgatcttgcgggcggagaacgtggtcttgccagcggtttcggcaaagacctcacggccggccgggtcggtgatccaatccggggtgtccatcacgatacggccgttgcgctgaatgatcgggcgggtgggcagcttcagatcgcgccaccactcaacgtcggtcacatcaccgaacgtacagcacatggcgatgccggcacccttgtccatttcggcggccgggtgagccagaatcggcaccttgaccttgaacagcggggagtagacttcctggccgaagtactgcttgtaacgttcgtcattcgggttggcgatcagcgaggtgcaagcggccagcagctcggggcgggtggtctcgatgtagattggggtgccgtcctcaaagcggaaagccaccttgtggtagaagcccgggtattcgcgggactcaagctcggcctgagccactgcggtctggaaggtcacgtcccacaggccgggggcgtcctgctggtaggcctcgccacgagcgaggttgcgcaggaaggccttctgagccacgcgccgcgggtgctggccgatggtgtggtaggtctgcgaccagtcgatggacaggcccagcttgcgccacagggcctcgaacagcttctcatcctgagcagtcagacgctcgcacagctcgatgaagttcttgcgggaaatcggcacctgatccttggcgtcgatcttcttgccatcggtgccctcgaacggcggcttgaagtccgggtcgtaggggagggacacgtccacgcgcacgccgtagtagttctgcacgcggcgctcggtgggcaggccgttgtcgtcccagcccatcgggtagaacacgtcgtagccgcgcatgcgcttgtaacgcgcaatcacatcggtgtgcgtgtaggagaacacgtgacccacgtgcagcgaaccggagacggtgggcggcggggtgtcgatggagtagacggccttgcggtcgcgggtattgcggaatttgtaggtgccgtcttcatcccagacggcgcgccacttgtcctcaagtccgtccacaccgaccttgtcgggcagcggggtgaggttggcgttgatgatggatttgccttcagtcataaagccaaagtttatgcacgttgcatgacaagccgaactgtacagtaaacagcccagtaggctgttcgcaggcgagatacgaacgatcgaacgatagtgagccaaggactatcgggcgtagcctgtccgtgactgaaggttgcctacttcaccgtcaacccggccagcggcatgcgacgattgatcatcgaggtcgggtagccggagaccttggtggacgccacagtgaagcatttgcgggtatacagccaatcactggccgcatcctcgctgatcagccgggcgtacgccttcattcgtgcctcataatcggcgtcattagtggcggcgcgagcatccgcataggcctgttgcgcttcggtatggtcgtaatggaacatggaatcggggtcggcgaatatgccggcatcatccgtgccgtccatgctcatcacggtcagttcccatttgccgtccttgattcgtttggcataatcctcatcggagagcacttcaaggttcaccgtggggcgcggctgccgctcgatctgctgcttgatggtttcggccaacgaccggtattcttcgggaaccaccagattcaccgtagtcagatattgcgcaccgaagtaggagaacatctgcccagcttggttttcgtcatgcggatacagtccagtcaaatcttcgtatccgggttccagcgggctgatggggccgcccaatgctccggctgcgtcgggttgggcggaggcgatgccggctgcgtcgatttgatagcggaaggctttacgcgcctgttcgtcggagagcagcgaatcgatgccgttgttgtaggccagcagcaccttatccgtagtggccccctccttgacggtcaggccatccttgccgttcaaaccggtggccgtcgaagccgaaaccggtgccgccatatcgagactgccgtcggtcagggccttgctgagcgcatcggcgtcggagtattgcataaattcaacgatattgctggccgctttgatgccatggtaggtatcgctgcgcgccagcttcagggaatggccaggctggaaattggccacggtgaatggtccggaacctatggccttgcgttgataatcggcactggacgactcggaatcgtagacaatgccgagtttgccggacagcgctcgcagcagcgtcggattgggcttggcaagcgtaatgaccaccgtggtggcgttcggattggcgaccgacgtcagatcgcccaattcgtcgacgtccgccaccttgttggtcacgttctgttgcaacgaccacacggcgtccgaggcgtccaacgtatgaccgttcgagaaggtgacgcccgattgcagtgtcagggtgacggtcagtccgtcatcggaagtcttccagcttgtcgccagtcccggctgaatcttgttgtcttgatcgacggtcactaatgtctcatacacattgtcgacgagcaggcgctcggctgccgcagaggaatcggaccgaatatccaaggattgcggcatatcgtcgatgccaatggtcacatcggcatcgagggatgatcccggctggaaccggttttgcatgaacgtccatcccgcaaccacgagtgcgccgagtgccacggcgactccgagaaaaatcccccacttggaccatgtattgttccgcttgctgtgctgcatggttttcagtctagcggtggattcagcctagaatccgcaattcaccatgatgaggtatgagttagcgcttggacgtgctcttgccggcgggcggcgcatagctagggcaggtgtcggacagcgggcagttggcgcagtcgggggtacgtgcgtggcaggtggcccggccgaacagaatcagtcggtggctgagattcgtccactcttcgggcggaaaacaggcggtgatttccttctcgattttcacgggatcagggtgtgcggaccgccaatccgaccgccaacgcagtcgtccggttacgcgcatcacatgcgtatcgaccgggaatccggggatatcgaacgcgttgccgagcacgacgttcgcggttttgcggccgacccccggcaagctggtcagttcatccatcgtgcgcggcaccacgccgccgaaccgttcgtccagtgccgtggccagtccgatgagatgctgggttttcgaacggtagaaccccagcggatgaatgatgtcttcgacttgggccgggttcgcggccgccaagtcacgggcggtggggtaggtggcgaacagttccggggtgaccgtgttgacacgcttgtcggtggtctgggcgctgagcacggtggcgatcagcaattcgagcggattcgagaaatgcagtgcgcaagcgggtgccggaatcacctggcgcagaatgtcgtattcgtcatgcatgcgcgtgagacgcgcggatttggtttctctcatcgtatggacctaagcggcgtaatgtcgatgattgatggtttgtggcgctgctggtctgtcaggcggcggtgttgagatcgggggtatcgtcatcggtgccgatggcggcagaggatgctttggcggcctgctgtgcggcggcagtttccttatccgtctccggcgggtcgaatcggtagcccacgttgcgcacggtgccgatgaggtgttcgtattcgccgccaagcttggcgcgcagacgacggatatgcacgtcgaccgtacgagtgccaccgtagtagtcgtagccccatacttcctgcagcaactgggcgcgcgtgaacacgcggccggggtgctggaccaagtacttgaggagttcgaactccttgtatgccagatcgatggggcgtccatgcagggaggcggtatagccgttggtgtccacaatgaggtcgccggagcgaatctggccatcttccaccgtggtggtggattcggcgggagaaccggctgctgcggctgcgggagcgttgccgcgctcggagaccaatcgcaatcggccctcgacttcagccggggaagcggtggcgaccaccacatccgcaatgccccactgggagttgaccacggtgaagccgccttcggtcagcaccagcacgattggcgtggacaggccggaagcgtggatgagacggcacaaggttttggcggtcgccagatcatcgcgtgcatccagaaacagaatggtgttctccggcatcttcaccaagctggctgcatccatcggcagcacgcggacgcgatgagaaagcagggcgagtgatggcaaaacggtggcggggtcgctggcgaaagtcatcaacgtaagatccgtcacgctaatccccctttatcctgcaatgtgttacgcaattgcttggtgtggctgtacgagtcgtcagcggcgttatgccgctttcgcgcggtttttcattattctacgcgcttgtagtggacacatgggttacaagtttgcggaatatggaacggcagacgtccatcaaccgatgacacggccgagcaccagtgcggttgcggcgatggtcacgcccatcagcattaccggcatcaggccggtaccgatccacggatagcggatatccgggtccggatcggcgtcacgcacccacaacgtggaggccacggccaaggccagtcccaaaacgatgaggatgatcagggcaacggttcccgcaacggtgcccttggcgagcatcgcgcccaaatcaggcaggaagcaccagccggccacggcgagagccgccacacctgaagtcacggcgtgagagagtgcgcggataagatgttcgcgcttctcacgagccatctggcgcccgaaggagaagaccaccagcaccaccagcagcaggcccatggccagtgcccatgaataccaaggaagtaccgagccatccgcagcggtctgatccggcggaaccttgccggtcgggaaaggtacgatgacgaaaatcagagaaatcgcgccaaacaccaaagtgacgatacgatccagcatgctgccgcggaacggccagaacacgacaaatgcggccaacgtcagagcggcgataatcaaagggatgatggggacggtgccaggggagggaatgaccgtggctgcgatgagcagtacataggacgtcagttgggccaacaacatgctcagggctttgttcttccaaccctcctgggtgatctcggtcatgatacgcctctcagataatcgaatttccatcccaatcctacgtcgggcattggaacggtgaaatcaaacaaaatagccctttctggtgaaggggcttatgacactaaatcagaacgcgataacgcccaaatgctccaacagcactttgacgccaagtagaatcagcaccacgccgccggcgatctgcgccggctcctgccagcgggagccgaacgcgcggccaatgtacaggcccgcagcggagaacagtccggtgaccacaccgatgctgaggatggcgaatgccatatgggctttggtgaacatgaaggtcaggctcacgcccacggcgaacgcatcgatgctgcaggccacggccaggggaagcatatgcttccaatcgaactgggcggtctccttggagttttcctcatcttcttcgaaggcttcgtgaaccatgttgccgccgatgaacaccaacagggcgaagatgatccaatgatcgaatcgggttacgtatttgctgaatgtagatgccgcgaaatagccgagaatggggaacagcatctggaatccgccgagccagagggcgcttttcgcggcgtcttgcactcgtacgcgggatacggccagacctttgccaatggatacggcgaatgcatccatagctacggaaacagaaataagcaggatttgaatgattatcggaatcatggtgcgacagaaggttcatcgccggattaccgtgcgatgggcctcgaccagcgttcctacacgccgcctacgcctagctgaaaaatacaccagcactatatcacgcgatgcacgtcgaatcaaaaaggcgggaggcctccggagaggtctcccgccgacgattcggaatcgaatcacttgccttcgttggcgaggcgttcgcgtgccgcgatgatttccttctcggcggcgtcagcaccggtccagtagtcgcccggcaggacttccttgcccggctccagagccttgtactgctcgaagaagtgcttgatttcagccttgtggtactcgttgacgtcgtcgatgtccttgatgtcatcgaaacgaacgtcggcgggcacgcacagcaccttgtcgtcgccgccggcctcgtcgaccatgtggtacaggcccacggcgcggcactcgaccacgcagcccgggaacacggagttcggaatcatcacgagagcgtccagcggatcgccgtcctcgcccagggtgccgtcgatgtagccgtagtcatccgggtaacccattgcggtgaacagggtacggtccaggaagacgcgaccggtctcgtgatcgacttcgtacttgttcttggagccgcgcggaatttccacaacgacgttgaaggtttctgccatgtcatttctccttgaaaatcgacagttacgttatcgtctcaccacaataccctgtttgcgcctgcaaaacaggtgcggaactcaagaaaccgtgctgagattatgccgacactatgtctaaacagacgaaatcctcccctcaaggggaggatttctagcggtttacgcacacgataaacccatgcacgtcaacggcattaccgttgcactaccgcatcactgcacggacaggatgtgggccacatccgcccaaggcgccagagacacgtagttgtcccaaccccactggaattcgcggccggtcagctcgtcgtgcacgttgagcgggcggtcggtgggcagacccagctcgccgagttccaggtgaatcatcgactggtgtgcgttgtgtccatcgaggttcacgaccacaatcagcgtgtccgcttggccggtaccggtcagttcggccggcgtgtggcgtgcgaaagccagaatattcgggtcggacgtaggcagcacggtgaggttgtggtagctcaacgcggccgggtgggcgcgacgaatcttgttgagcgcggtgagcatctcggccacgccgtactgcttggccttgctccaatcgcgaaccttgacctcgtacttctcgttgtcgatctgctcttcgaagccggggcgctgcttgttctcgatgagttcgtaaccgttgtagataccccaggacggcgagcccatggctgccagcaccgcacgcacgcagtggccggctacgccgttgtctcgcacgtaagcggtgagaatatccggcgtggtgggccagaaggtgttgtgctggtagtagccgtcgtcgccattggtgatcggcagatactcttccagttcgtccttggtgttgcgccacgggaagtagcagtgggactgggtgaagcccacgtagctcagggcacgcatcatgcccgggcgggtgaatgcctcagccaggaacaggatctccgggtgcttcttggtcacggcggcaatcacgtcctgccagaaacgcaccggcttggtgtgcgggttatcgatgcggaagatggtgacgcccgcctcgatccacagattcatgatgcgttcgacttctttttcgatgccgggcatgtcggcgttgaagtcgatcgggtagatgtcctgatacttcttcggcgggttctcggcgaaggcgatggagccgtctggcttgtgacggaaccagttcgggtgggccttgacccacgggtgatcgggcgagcactgcagtgcgaaatcaagcgcgatttccagacccagttcatgtgcacgctggcacagggccttgaaatcgtccatggtgccgagcagcggatccacggtgtcgtggccgcccagctcggagccgatgccgaacggcgagcccgggtcatcggggccggcgaccagcgtgttgttgcggcccttgcggttggtcacgccaatcgggaagaccggcggcagatagacgatgtcgaagccttcggcagcggcgcgttcgaggccggccatcgaggtcttcagcgtaccctgaatgatcttgccggtgttcggatcgatggtggcgccttcggaacgtgggaagaactggtaccaagccgcgaagctggacttcgggcgttccaccttgaaacgctggggctggctgggggagatgccatcgcgcagcgggtgagtctcgtgcagggcggcgatggtagggttgtcgccggcggcgaggcgatcctcggcgctcagcgtctgatcggccatggtctcagtggccttctccaaggtcttgcgatcgcgtgcggtcaggccggcgtccggggttgcggcccaacgggccagcagctcggcaccggaattgagcgcgttgtccacgtcgtccatcacacgcaccttgatacgggcgtcatgcagccaagaaacgtacgtgtcttcccaaccttcgatggtcacggtccattcgccgagctgacgcttgacggccgcgtagccatcctcccaaggcttcagatcgctgtgctcgccgcacttgaccatcacggtccaacgatcgaggccgggatttacgcaggtcatggcctggcgcatggtttccttgccgcgcgggttgcgcacgatggcggtggcacccaccttggtacggccttcgatgaacacttgggcggtcatctcaaacggttcgccgagttccacacgggcagggaagatgccacgctcctcggtgggagtgatgtccatgacattgatgcggccgaactggccgggctcgtttgcttcgatggacggtgcgggggcttcgacagccaggcctttcagcgctgctgcggcgcgtgccgtttcggcgctgactctcttgcgcttggttgcggggctctttcgggcagaagtcgtctttgacttcgtcttcgtggtgttgttatcggtattactagtgcgcgtggtcgcgcgatgttgtactgctgccataaggccctattctagaggcttttgaacatatgttgcacattgtggataacttgcaggtaaacgttcggtcaaccgcatgaggtggataactcggcggaagagttatccacaactcgccgacaaacggcaagctcggaccacataggccgaaaaatcggctgtagcgaatgaaaatctgccatgatcgtggcctacccgcacacagtgcagtatgcggggaacgtaccaggaaaggacgaatgatgataacgacatggcggcaacggggcatggccatcgtagcgatgctgaccggtctgataataatggtgggagtggtgttcggctcggcgaatacggcgtatgccgcgacgttgacgcccgccgacgaaagatatcacgtgacgtttccatacaacgatatggaatattacgtcggtgtcgcggggctggacgcttcgggcaacaagtactactgcatcgaagcggggaaactgagcgactatgtgataggccccaccacggtgcttgcctccgatgagaacgcccggcgtatggcatggatccttgaccggtaccgcgacacggatgccgccacccatgcggcgatcggcatcatcgtgcaggatcacttcgggcgcgatcgggacgagtgggcgagacagatggcggtcattcaaggccggtatcccgagatcgtggcgaaggcggcccggatatgggatcaatcggccggcaagacgcctgcgggcacgacggtggaacgcaccgatgccgaggctttgcgcagcggttccatctcggtgaaagtggtgaaccgcgacggtgacgcgatcgcgggagtgccgttcactgtcaccttgcaggggccggcgcggttcatccaaggcggcaacacgttctcgggggtgtcgacgagcgccggatcctcgatcgcgtgggaggcgaccggcgccggcgaggtgacggcgaacaccacatacgagtatgggcggatgcacgtcatggacagcactcaggacatgctggccttcgattcgatggcttccgccggcggttcgtcgtcgacgttccaggtgcgcaaggatttcgttccgtcggtgtccacgcaggtgtccgataaggtgcttgatgcggcttcgccggtgttcgatgatgtgaccagcggcgtgggggacgagggcagtcattgggtgcccggtctgaagctgcaggcgcgtggatactatttcgacgggctcggcaaggacgatctgggcaaggtcatcgcgccgaacgcacgggagagcgcggacgcttttctcgcccggctggcgtcctcgggtcataagccgagtgcttatggcaaggcgtccttcaccggtgtggggcagcgggttcgtgtgcgggccatggccaagccggacggtgacgccgcctatctgactccgaagaccggcggctttggcacctgggtgtgggtgttccggcggagcgagcaaagcaaacgggcgcaggaataccttaccggcgactgggtgagcccgttcatggaggcttcggaaagcaacgtggggcgcgggaaggtcgaagtcatgtcgacggttaccgaacattcggcggatatcggcgccgaactcagcgacaccatcaccgtatcggggttcccggcggaccacggccagttcatgggtgatgaaacctatggtttcgcggcggatcagccgtatgcgacggtgagcgtatggtggtccggcgatcccgacaacccctccaacgatgaggcgtacaagccatccgggggagaggtccccacggaagacgacaaccaccggttgctggccacctgggagattcccgcgatgaacggcacgttcaaaatcggcgccggggcgttggacgcgcatggcgctcccatgcatctgaccgccgaacggcatgggtggtacgtgttcgtttggcggttcgagggggatgaccgtgtttccccggcgtccagccggtatgacgatgcctgggagcgtgtgcgggtgttgcccccatgcgagtcggagaaaccgtgcgaaccggagaaacccgagacgccaccggcgccggcggaggcaaccacgcccaaccctcgcccgtcactgcccgtcacgggtggcgatgtgtcgcttgcctcggttctggccgtgtcagctctggcgataggcgccatactgtccatcgtcgttcggtggcgtcgttgctatgaccgatccaagcactggacgatgcgctggccgatacgttgacccgctgcggcatgatgccgatgatgtcggctggatggtgaaccgcactccgcttctgagcagaaggacgggagctgggcacgaagtcgattgtgacatacgacttgtgcccggcttccgcttcgttgagaaacttcacgcctgtcgtctcccgtggattagacaactgaaggtccgcgatgaaaacgacgagacgtttatgatcgccgacttccctgggcaccgtagctgcctgatcgcctttcatccatatcgccccggtcaggtcgtcacctacaacggcggcggcagcgtcgccaccggcagcaacgccccaccgtcccgtaccgtgaccgtccgtgcagaccctcggccccgtatggggctggacgtgggccgatccggccgcgacgaccatcagcgccgtcgccctgaccatcggcgtcgtcatcggcgccagcgccctcaaggccaaggcatccaaggccgaataacaagaagcccccgaacctgaaccgtatcacgcggcaggttcgggggcttttcgccgtatatgggtcaggccatcgcgggctgtgcctgattggcggtcaggtatgcggccagtgccttgcggatcagagcgctcttgccgatgtgctctcgttcggcctgtgcccgcacctgtgcgtccatgtcgggcgtgaggtatgccttgtagagcacgtcggccttccggcggggctggtcggcgagggggcggccggcgaagatgtcgtcgatgtcatccatcgtgatcgccctttgcgggcggatggtctcgccgatgatggcgggggtgtgctcggtgtattcgtccgagagctcgtcccagtctgtttcgttgctcatgatgtcctccttggtgttttttagtcgtcgaacttgtagagccattcgcggcggcagtccatcgcgtggaacaccttgcgggtgcgctgggataccagcagctccacggggcgttccctgaactcgtccgggtgtccgaggatcgccatgaccctgtcgccggcgtgtctcgactgcacctcgaacacggccaccggatgccggaatatgtagtcgatctgtggctgtgtgaaccagtgcttgaaggctgacggttcgcattcgatcatgcttattatggtaccataatttagtaccacaatcaatttagtaccacaatcgagtcggggaaacggaacatcgtgatcctcctaggcggcgaggcgcgtggcttccacggcggcgcgcagctggtcgtcgggcatggcgatgtaccgttgcgtggtctcgaccgaggcgtggccgctccaccggccggggaacagatagccgttggcggatcggatcagcagggcgaggtcgtcgccctccacgtccctagatcgcccttaagcgccctcgacaatgcggacatctggcatcggcgcgtgccgatcgtgttgggggagtagcccgccgccttgagggagtcgagccatagattgattgattctgcccagagcgggcttggatgttgttttttcacaggacatcatcgccccgatcggatatgcggccccgtagggcacgacggcggataaacgaaaagccgtcacgaataatcgtgacggcctcgcccgcagtagcggggcatggatttgaaccatggacctctgggttatgagcccagcgagctaccgagctgctccaccccgcgtcggcttgtctctcagacagctctatctacaataggtgcagattccagaaagtcaacatcggcgtgtcgtgtcattttcccacggttttaaaacgtgaatcggctcacgcagcgaggggtttggggcggagccggagtcggggtgataacgcgccataaatggccgttataggaatgccctgaaccgttatcccgaatattgacataataggaacatgcctatcaagatccccagtggcctgccggccagagatatcctcgattcggagcgcatcttcgctctggagaagcccgaggcggagcgtcagcgcgtccgcccgctcaaactggtggtcctgaacttgatgcctaagaaaatcgagactgaaacgcagctgctgcgtctgatttccaagtcgccgctgcaggtcgaaatcgacttcatgaagacctccacgcatgaggccacgcacgtttccgccgatcatctcgtcaagttctacgaaaatctcgatgcgttcaaagacaactattacgacggttttgtggtcaccggcgcgcctgtagaacatatgccgttcgaagatgtggactactgggacgagttcaagacgattctcgactgggcctccacccatgtgttctccaccatgtacctgtgctggggtgcgatgggcgcactgtactaccgctacggcatccacaaggtggattaccccgagaagattttcggcgtattcccgcagtacctgcaggacgaatactgcttcctgaccaatggcttcgacgagattgatctgcagccgcactcccgcctcgccggtgtgaacgaaaacgaggtacgtgccaaccatgaccttcagatcttgacttgggggccgcagtccggcccgggcctaatcgccacacgtgacttctccgaagtgttcgcgctcggccattgggagtacggcaagtacacgctcgccgaggaatacgagcgcgatatggccaagggcatgaccaacgtgcccttcccgaagaactacttcccgcatgacgatccgaagctggaaccgttgttcgtctggcgtgcccacgccaatctgctgtggcgcaactggctcaactgggtgtaccagaccacgccgtacgacctgaccgaggtgccgcagctcagggctgagaagaagctcggtactgatcgttcgattcggcatgagccgggcgggccgcg

SEQ ID NO: 2301 - DNA, 8606 bp, Unknown
  R119_18m  MAG No. k141_22638
aaggtgtgttcatccacccaatctgccacgccaactcgaaagtcactcaaccgttgtgccgcaaggcctgaccggccattccggacacacattctggccgacctcgagttccccgcccatacaactcgaacaggaggaacgtccaccgccacaaaggaacacaagacaaaacggacacacattttggcctataacccgacaacatgagacaacatgacgacggacttacctttgtaagccattcgtaatggattaaacacggacttcatcttggcgtgttattggaattatcaccgacaattcaccgcctccgccccccgtcgtatgtgtttgccccaaacaggggctagactggttcctattgatttgatgaaagggacccgaattgaccgaaataaacgataaggcccaactggatatcgccgccgctgacgacaccgacgccgtcacctcggatatccccgaagaaaccgtaaacacccccgaagtggatgagactttcgagctttcggccgccaagatgcgcgagcacggcatgagcgaaaccgccatcaaccagttccgccatttgtatgacgtatggcgccatgaagaagcctccagctggattcgtgaggacgacatcgagccgcttggccacgtgcccagcttccacgacgtctatgagaccatcaaccacgacaaggccgtggacgccttcgccaagaccgcattcctcaagctcaatggcggtctgggcacctccatgggattggacaaggccaagtcgctgttgccggtgcgtaggcacaaggccaagcagatgcgcttcatcgacatcatcatcggtcaggtgcttaccgctcgcacccgcctgaacgtcgaactgccgctgacgttcatgaattctttccgcacttcggcggacacgatgaaggcgctcaagcatcatcgcaagttcagccagcatgacgtgccgatggaaatcatccagcatcaggaacccaaactcgtggccgccaccggcgaaccggtgagctaccccatgaacccggagctggaatggtgcccgcccggccacggcgacctgttctccaccatctgggagtccggcctgcttgacgtattggaggagcgcggcttcaagtacctgttcatctccaattccgacaatctcggtgcacgcccctcgcgtacgttggcccagcacttcgaaaacacaggtgccccgttcatggccgaagtggctatccgcaccaaggccgatcgcaagggaggccatatcgtgcgagacaaggccactggtcgcctgatactgcgtgaaatgagccaggtccatccggatgataaggaagcggcccaagacatcgccaagcatccttacttcaacaccaactcgatctggattcgcatcgacgctttgaaagacaagctcgccgaatgcgatggtgtgttgccgttgccggtgattcgtaacaaaaagaccgtgaatcccacggacccgaactccgaacaggtgattcagctggaaaccgccatgggtgccgcaatcggtctgttcaacggttctatctgcgtccaagtggatcgtatgcgcttccttccggtgaaaaccaccaatgatttgttcattatgcgttccgatcgcttccacctgacggacacgtatgagatggaagacggcaattacatcttcccgaacgtcgaacttgatccgcgatactacaagaacatccgcgatttcgacgaacggttcccctacgccgtgccatctttggccgcagccaactcggtttccattcagggcgactggacattcggacgtgacgtcatgatgttcgccgacgccaaacttgaagataagggtgagccgagctacgtgccgaacggcgaatacgttggcccgcaaggcatcgaaccggacgattgggtgtgatttacaacacggtcgaacgataaaaaagatattatttttgtgaaatggcgctcaactgtggaaaaagcctctaagatagagtgagtgtggggaaactcatacgcacttataacgaaacaataactatacgtgaggactaatggcagagggcacaagcggacgtcggcgtttttccgacaaatggggcaagcacgagctggacgtactggctgtgttgtcatccgcgttcccgcaatggctcacatcccgccaaattgcgcagcgcgtcaaggcttacgccgactcgtatggagagctggcagatcaggccgccaaggccgcgttcgccaagcagttccagcgtgatcgcgccaagctcgctgcgatgggcattgccatcgaatcacggcagcctgagtactcgtccaagtcggaaggccaggacttcgcatcctatcgtctgcagttgggcgacgaaccgcgcatccgcctgatgttcgagccggaagatatgccggtgcttgccgccgccaactatctggctcgttcgatgtcgatttcttccgagccggatcagtcccagctcacccagcatgtgtcgcgcactacgccgcgtgtgccgcagaccccgattcccgggcttggcttggattcgattgcgcctggcttggggacgcagcccattccggattcactggtcaaggttattgattcgcgtcgtttcgccgccaccgttgacgtggatggcgaacacctgaacgtggcgtacaccgattccgacgatttggccatgtttgtgcttgagcatccgggggccacgattgtcagcccgcaagaggctgtggacgcttatcatcgccgtttgcacgccgccagccggttcactctggccgacgaatccgccagtcctgtgagcgcttcggtggtttccccgtcgattagtcgcgatgtgcgagagccgggtgatcccgagtctatcaaggctcagaacaagaagaacggctccgctttccaaacgggcagtgaggttgatcgtcgcctgcgtctgatgctgttcctctccgctcatctgggtgaggaattctcgatgagcgagctgggcgaacgctttatcggcaagccaaagaacgatgatgaactcaagaaattcgtcaacatcatccataaggacatcaacaccctgaccaccgtttccgacgatggtgagatggccggcagccagttcttcgatattgactggccgctgctggatgccgagggtattgtttccgccaccaattcgctgggccttgaacgtcttgccggcatttcgccgcaatacctcagcatgctcaccgcctcggtcagctacctggcgcattcgccgttgctgccggacaagcagcgtgggcaggccgaatccctgtatgagcgtttgcgccgtcatgtcagtcccggtcagaccccgtggctgagcctgaccggctatgagctggagccccgaagcttctccatcgtcaagcgtgcgatcaacaccgattcgctgttggacatggagtacaccgacggtacaggtcgtacccgccgcaagctggtggcccccgccaagatcttcattgacgaaggcgtgtattatgccgccgtctacacggacgttggttccgccgcacccaaggacaaaaaggcctacgtctccaaagacaagaccctcgacaaggccaacggcaagccgcgcatctggcaggtactgcgattggcccgtatcgaaaaggcggaactggtcaagcccaccaagcagatcaacatcccgaacatgccggtgagcgaactgcgcaagtggagtttcgacaacggtaccgacgcggtgttcatcaccgatcagcgcgatctggcattcatcaagacattgccgggcgctaccgtcgaacaatgcggtgccggtgaaaaggtgcatctgaccgtttcctccgattcctggttcgtggccttctgcatcgcccacgcgcgtcatatcacggcggtcgccccggaaacgttgcgcaccatgatcgtggcacgcgccgaacgcgaactgagcatcagcgagaacaagtaaggagcctttcatgccttggtggatatggctgattctggccctgttcatgctggccatgattgttgccggactcatctatgcagcccttcatggactccgtgccttgaaagacatgtccgacatcggcggccaactcggtgaacgcgtggccgcgatgggggagcccggcacctctgccgacaccagcgagccgcctctgttcactcagccgctcagcgtggcacagaatcgttatgccgaggcccatgcgaacgtgattcgcagcaaggccgccaagcgcgaacgccacacccaggcatgggcccgctggaagcgattcaacaactaacggaaagcagcaatggcacgtcaccaacaccataagggcaatgccgattcccagacgctgagcccttcgcagcggtacgcatcattccaaaaggtccaacgccatcgggcgtccgcagcagcgcgattcgccgaatccctgcctttcgaactggacgacttccagaccgaagccaatgacgcgctcgaagccggcagcaacgtactggtcgcggccccaaccggtgccggcaaaaccgtagtggcggattttgccatttacctcgcccaggaacgcaacgtcaaagccttctacaccacaccgatcaaggcgttgagcaatcagaaataccatgatctggtcgacgtgtacggcccggacaaggtaggcctgctcaccggcgacacctcgatcaattccgaggcggacatcgtggtcatgaccaccgaagtgctgcgcaacatgctctacgagcgttccaccacgctgaacgcactgcgctacgtgattctcgacgaagtgcactatctggccgaccgattccgcgggcccgtgtgggaggaagtcatcatccacctgcccaagacggtcaagatcgtcggcctgtccgccaccgtgtccaacgtggaggatttctccaactggattgcctcggtgcgaggcgacacaaaactggtgatcagcgaacaccgccccgtgcctttggaacagcacgtcatcgtgcaggcggacgaacacaccgagcccgaggtgctggacctctatcgccgcgacggcaacggcgagcagaccaccaaactcaacgccgaactcatcaaccggctcgaccagttggaccgcaaggccgcacgccggcgcggcgaggaacgccccgataagcgcaagggcttcggcagaggccgcggcggcaaaggcgccaaagaccgtgccccgaaagcggaacgccacaccccgcgccgctgggccgtggtggacgagcttaacttcctgggaatgttgcccggcatctacttcatcttctcgcgcaacggctgtgaccaggccgtggaacagtgtatcaacgctggactggagctcaccaccgatgaggaagtgaccaggattcgccgcatcgtggatgagatggtggaggggcaactcactcaggaagacctgaaagccctgcagttctccaagttccgctttgcattggaagaaggcttcgcttcgcatcatgccggcatgattgccctgttccgtcagatagtcgaacgattgttcgaagaaggtctggtcaaaatggtgttcgccacggaaacactggcattgggcatcaatatgccggcccgctgcgtggtggtagagaaactcgaaaagttcgacggtaccggtcatgtgggcctgacgcccggcgaattcacgcagctcaccggtcgtgccggtcggcgcggcatcgacaccatcggccacgccatcgtggtcgaccatcacggttttgtgcccgccacggccgcctcgctgtcatccaagcgtgtctacccgctgcactcgagcttccgacccacgttcaacatggccgtgaacctgctcaactccagcgactacgagaccgcgcgcgtcaccctggaccagtcgtttgcccagtgggaggccaacgaatcggcctggcagctggaatcgcagattaacacactgaagaacgcgctggccggatacgaacaggcgttcgcatgcgaacacggcgacttcaaacagttcatgaccctgcgtatggagctgagcgacatcgaaaaggaaggccgccgcaaactgaagcacgaagtgttcctgaccgatcaggagcgttcacgcgctttccagaacctcgaccagcgcattcgcgatttgcgcaaggcggaacacgagcatccatgccgcaactgcccggacctccagcaacacctcaaatggggccaccgctgggcccgcgagactcgagaactgcagcgcgtcaccgatcgctacgactcccgcaccgggtccgtggcacgccagttcgattgcatctgcgatattctcaccgggcttggttacctcgaacgtcatgtcaatgcggccggccacattgacatgacgttgactgaaaaaggtctgctgctgcgccgcatctacagtgaacatgacctggaactgtgcgaggcgctgctcgccggcacgttcgacaagctcgacgccaacggactggccgctgtgctctcttcactggtatacgaggccagacgcgggggagacggcgaaccgaggcactacccgggcggcatctccgggcccatcgccatcgcttcgtccaagctcaagggcatttgtgaagacatcgatatcctgtgcgaggatcacggtctggacgagatgcagcggccagatttcggcattctcgacatcatgtatgaatgggcggatggcggttcgctgggatcgtgcctgtacggcaccgacatgaccggcggcgacttcgtgcgcactgccaaacgactggctgacgtgctgcagcagattgctgtcgcccagccgctgccgttcgacgggggagagcggctggcaggcctcgcccacgaagcggccgaccgggtcaatcgtggcgtggtggcctactccggcgtggactgacggggctgtttgacgggagtttgtcagccgacgtcggaagcttggaatagcggccaagtccgaactgttgcgtaaattagtagggttaaagatctttcaaggaggatgccgatatggcagaacgtagcctcaggggcatgagcatcggagcgaaatcgctggagtccgacgacaacgtcgatttcgccgcgcgaaacgatgtggcgtatgtatgcccgaagggccaccgcaccatcctgccgtttgccgagggtgccgaaatcccggacgagtgggagtgccgttgtggttccgtggcccaccgtgagggcgacgccgaccgtgagggcgacgaaatcagcaaacccacccgcacccactgggacatgctgctggaacgccgtagcgaagaggaactggccaccctgctcgaaaagcgcctgcaaatgcaccgtgacggttggattcccgactacgagtgatctcctactgaacaacacgtgaacttgatgcccagtcatcccgactgggcataatcattgttggaacaagtcgcattgtttgacgaccattcaaagcagtcgacatgaacaagggggagtggaatctcaatggcacagcatccgatgaaagtggtcctgttggatctcgacggcacgcttaccaagtccgacggcggcattatcggctccgtcatcaagaccttcgaagagatcggtcgaccggttccggacgccgccgaactgcgacgcttcatcggaccggcgattattgaatctctgcgtcgcaatcatgtgcctgcggaagatctggatcgggccgtggacatctaccgcagctactacggagaccgtgccgtgttcgacgatccgaacgagcccggcaacaaggtgcccggacgactggtgaacgtcgtattcccaggcatccgtgaacagctgctcaaactgcatgccgacggttactacctggcactggccagctgtaagcccgaataccagtgcatgcctatctgcgaccatttccacctgaccgaactgttggacggcatctatggtgcttccaaagacaattcccgtctggacaaagatcaggtgattcggtactgcttcgacaaaatcggttttgatgctgcagcgggggacagggccgtgatgatcggcgaccgctacaccgacattgacggcgcccacgcctgtaatttggacgccatcggctgccgctggggctacgctccggccggtgagatggaggaacacggcgcgtacgagatcctcgagaagcccgagcagatcgaagacgccgtaaaccgttatttccaaacgcactgaaacacaacggcgaggacttcttcatgatgggatgcgatggagcctgcgccgcgggcttcgacctggttttcatcggtttgccattgctgtcgctgtatgagattcccatgctgatatggttcatttggcgagcattccactggaaacgagatgacaaggattggctgaaaggcacggcgattcttgcaattgcggtggtcgctccggtgctcctttggctgtcggccttttggctgtcggcctggtatgcgtggactagttgatacaggcgactgaatcctcgtcaaggataactaatctgacataacgtacattatcggctaactattcgggaatcttagaaacggcttaatttcaacggtcttcatttcgcactggtaactgtggatgcctctg

SEQ ID NO: 2302 - DNA, 28017 bp, Unknown
  R119_18m  MAG No. k141_23003
aaggtgtgttcatccacccaatctgccacgccaactcgaaagtcactcaaccgttgtgccgcaaggcctgaccggccattccggacacacattctggccgacctcgagttccccgcccatacaactcgaacaggaggaacgcccaccgccacaaaggaacacaagccaaaacggacacacattttggcctataacccgccgaatgctttcaggcctggtcccgcgaatacgaaaagacctcggtcgctatgaccgaggtcttcaaagaagtacccccagagagagtcgaactctcgttgtcagattgaaagtctggtgtcctaaccgttagacgatgggggcgaacaactcgagttactttacgggaggttgttcggttatgcaaatcgacggcatttcggcgtgtcgcaatcagttcagggcgacggcctgataggtgaagtcgtggatcgcgcggccggcggccaggcccttcttctcgaagttggtgagcacgcggccctcgaaccgctcggattcggtgaagtcggcgtgcggcatgtcggcggccatgtcggcattgcccttgcccacgtgctccagcgggaggctgacggttatgctgcccaggttcttccagccatcgaggccgtccatcacctcgtgcacgtgcagggcgtagtcctcgatgtcggtggcgatgcgccagacgccgtctgtgaccagcgcgcgatgaatgtcgccggccatggcctcctgcacgatgcggcgcttgtggtgcttcttcttgggccatggatcggggaagaaggtccatacctcggccacggtgccgggcgcggtcaccttgaacagctcgggcgcgttgacctgggccgtgcgaatgttggtcagcccctgcttgccggcgagcagcagtgtgtgggccacgccggggtcatagacctctagggcaaggaagttcgtctccggatgggccgcggctgcggccgccacgttttctccctgcccggtgccgatttccacaatgagcggattgtcgttgccccatgaggactccacgaacgcgcggtcgagcgtgacgccttcgcgcacgtccagcaggttgccggccgcaatgtccaacagatatgtgtcggcatagttgtcccaggcgcgctgcaggcgatcgtccaaacgtccggagcggcgcacgaaggaaagcaccttgtgcagggggtgcgccggtgcctcggtgtggtccgcggccatcgcggtgacggaatcgattgctgtggattcgggatcggtcatatattcctcggattttccttgtgcgccgcaccgctgttcattcgttaggtcgatttggcgttcattaggtgggtggtgtgcgataccaaccaccatatcaagccatttacccggtgttcgtgcgggccggctccgggccgacctacctaatgaacgccagatcgacctaatgaatgcagatattgccggacgacaccaccgttttgtgcgattatgttcgtgtgatatactcaaattgtttcaaaaggtaacaaagcggaccaaaagtgaacagccgctgaactccacacggccgacacttgcaacccgcataaggaaaggccaactatgacagttctcgtcaccggaggctgcggctacatcggcgcgcatgtcgttcacgcacttcatcaggccggcgaaaaggtcgtcgtcgtcgacgatctgagctacggcaagcccacccgcatcgaaggctcccgtctgtacggcatggatatcgccgctccgggcgccggcgagcgtctggccgaaatcctcgacgccgaaggcgtcgactccgtgatccacttcgccgcgcgcaagcaggtcggcgaatccgtggagaagccgctgtggtactaccagcagaacatcaacggcatgctcaacgtgctcaccggcatgacccagtccaagaacgccaagaagctcgtcttctcctcttccgccgccacctacggtgtgccgccggtcgatgtggtgcccgaggacgtcgtcccgatgctgccgatcaacccctacggccagaccaagctgttcggcgagtggatggctcgcgcctgcgagcagccgttcggcatccgcttctgcgcgctgcgctacttcaacgtggccggctgcggcccggtcgaactcgaagacccggctattctgaacctcatcccgatgctgttcaaccgcctcaagcagggcaaggcccccgccatcttcggcgacgactacccgaccccggacggcacctgcgtgcgcgactacatccacgtctccgacttggccgacgcccacatcgccgccctcaagtacctcgaccgtgacgagcgcaagtacgacgccttcaacgtcggcaccggtgaaggcacctccgtgcgccagatcgtcgacgaagtcaagaaggtcaccggtctgccgttcaccgaggctgtcatggcccgccgcgccggcgacccgccgcacctgatcggctccccgaagcgcatcaacgaggagatgggctggcacgccaagtacgacgtggaagacatcgtcaagtccgcgtgggatgcctggcaggccaaccccgaacaccatatcgacgtcgacacctggaagcaggctgactgagattgacgattgctttgcggtggatgccgtgaagtgcttctgttcataagggcgtgaccggggttccggtcgcgcccttcgtcgtttgtggatgtttatggcagacgtgtccgtgtgctggtgatagcaaaaaccttgaaattacgcggaacacgccgaaatttgcacgaccggcgaatttcagtaatatatacatctgttgcctcacgcaagtgagaacaatggccccgtagctcagttggttagagcgccgccctgtcacggcggaggtcaccggttcaagtccggccggggtcgctggaatggttatgaaacccggattatccgggtttttgactgttcatggctctgtagctcagttggtagagcgagcgactgaaaatcgctaggtcaacggatcgacgccgttcggagccaccacaatgaagccccgccttgtgcggggcttttgcatatccgtcacgtacctactccggcgggctggccagtcaatgcaaaggctcgcgttcgccaacaactgtcctcctcgccgcaactacgcacgccaacagcaccaatgcgaacatcgggttagggttaaataaagaaacgtgggtcttatccgcgcgtgtcatggtcggtgcgatcgtccgccccagccgtttctggggctgtggcgctcatagagtcagtattgcagaaaaagcacctgcgaaatgcgcgtgcgaagggaatcgtgtgggacggcacgtgattttgccgattttcgacgtgccgtcccacagcgttcgaagaacgccctcagagctgagggcaaagaatggctctattctgcggttctcggcttatgtcatgcgggatagcagatacgtcaaacgattgatgtatctgctatcccacacttctgtgggacggcagatgaacaatggtaaaaaccgcgtgccgtcccacagaaacggagtcaggcctgccaccattggcgcagagggtaccacttgccgtccgggtggcccacgcgatccggcttgacagccaggaactggtgaatctggatgccgtcgagctcgaagttcagagcgcaggcggccatgtacataccccataccttggcgcgttcaaagccgacctgcttgaccgcgtcgtcccaatgctcggagaggttctggttccagtgatgcagggtgagcgcatagtgctggcgcaggttctcctgatgcaccacgttgaagccggcgtcatggatgcacgattcgatgaagccgggcgcgccgaggtcgccgtccgggaagatgtaacggtcgaggaattcgtcggtgccgggcttgccgtgaggcttgtcatggctgatggtgatctggtggttcagcagtcggcccatcggcttcaggagacggaacatctcttcgaagtagctctggtagttcttgacgcctacgtgctccatcatgccgatcgagcagataccgtcgaagtcatgctcgggcacctcgcggtagtcctgtacgcgcacttcggccagatcctgcagcccctcacgggcgatccattcgttggcgtacgcggcctgttccttggagagggtgacgccgagcgccttgatgccgcgacgggcggcggtgatgaccatcgaaccccagccacagccgatgtccagtaagcgctggccgggctgcaagtccagtttgtcgagaatcaggcgcagtttgttggcctgtgcgtcttcaagactcatgtgctcgttgtcgaataccgcgcaggtgtacgtcatggaggggccgaggaagtcggcgtagaactcgttggacatgtcgtagtggaagctgacggtttccgaatcggccttttcggtgtgcggcatcaggccacgcttgatgcgggcgaacttgctcgggccctcggtggcgggcaccggcggcttcttgaagccgtgactcagaatgccggcggatacgcgggcaatggatgcgggagcgagcgggcgaacgtatttggccagcgacaccagcttgcgcatcgccggatacgggtcggcgtagtcaatgtcgtccacgtcgaaatcgcccagaatgtatgcgcgcacgatgccgatttcattcgggtgcgcgagcagctggtacatgcagttcggcgcggcgattttgaccttcaaatccgcgtctgccgggccgaaatgcgagccgtcaaaagcgtcgatacgaacgggagtgtcggggtcgagaaacagggatgccatctcgccgaccgtcatagccttgccatttgccattatctgcctcattctcttatgatgatcaccccaattgtcgaggtatcttagtcctcttcaggagactgaaaccgttgaatacaccatctggtgaaccagttcgcgttcggctgatgaaacacgaatggaattaggcatctcgcatattgattgtgtacgcgcgaagtaagcagatgagagacgagtttctcggagagcaccaagcgactccggaaaatggtcttatcgttgagatctcgggcgattgaactggtttggtcaatggacaataattcgacaagtgcggaattccgccatttcttgccattattttcagtgttgttctttcagcgtgttttcaggtgaatgctcatgcgcggagtagactggggaaccgttggaccactcaaagagtgagtggaccaccagttaagacactagctcaaaaggagagtccctatggtataccgcatgattttcaaccagactgcatacttcggacgtggcgcgatcaaggaaattccggccgtcgccaagcagcacggcttcaccaaggcatttatcgtcactgatccggtactgctggagaccggcaccgccgagaaggtcaccaaggttctggatgaggccggcctgccctacgaagtgttctccaacgtcaagccgaacccgccggtagagtgcatcaaggacggcgtcgccaagttcgccgagtccggtgcggacttcctgatcggcctgggcggcggctccccgcaagacacctgcaagggcatcggcatcatcaccgccaacccggagttcgccgacgtgctgtccctggaaggcgtcgcggataccaagaacccgtccgtcccgatcttcggcgtgccgaccaccgccggtaccgcttccgagacgaccatcaactacgtggtcaccgataccgccaacaagcgtaagttcgtggctgtcgacccgcacgatatcccgatcgtcgccttcgtggacccggatctgaccgactccatgccgcgcggcctgaaggttgccaccggacttgacgccctgacccacgccatcgagggttacattaccccgggtgcctggagcctgtccgactgcctgtccatgcagactattcgcatgattgccaagaacctagccaagtccgccgacggcgacattccggctggcgagcagatggcgtacgcctcctacatcaccggtatggcctactccaacgtgggcctcggcctggtgcacggcatggctcacccgctgggcggccgtctgggcgtggcccacggtgtggccaacggtattctgctggccccggtcatggaatacaacaaggactacacgggcgagaagtaccgcgacatcgccgacgcgttcggcgtcgaggacgcctacaccggcgacctggagaaggtgcgcgaagaggccgtgcaggccgtccacaagctgaccgtggatctgaagaacccgaccacgatttccgaagtgggcgccaccgagggcgaccttgagccgctggctcacgacgccttcaacgacgtgtgcacccccggcaacccgcgtcaggcaaccgaagaggacatcctcgccatctacaagtcgctgatgtgattcgtcgatgacgccgacgatgccggtgggttcccctcgtcgggaacccaccggcatcgctatctctcgtgcctttcgtcgtagacttcgtcggtgggggtctcgtcgtacagctgcttgccttgcgcctccgccagtttcatctgctcgttgatccacgcggcttcagcaggattgatatccgcggaattcagcactttctgccacaccgggtagaacatatgcatcgccggatacatggcggtgaacaacacctccggcttatgcgtgcgcgtatgttgcggatgcgcatcaaacgtattcttaaaacgtcgcatgtagttcaggaatgaactcagcgacgtgtccatccgtcgcgcgctcatcgcggcgatcatgcgcggcgagtacacggttttcagattcttgcccatcagatgcagggaaatatcgatatcctcgtgcatcacatcggccttatctcggcagacctcattcgcggtctgatgccaggccgaagcgcgcaaggccatattcgagccgaacagcagcggctggccgccatcggcacggtagattcgcttgcgtaaggaattgtcgcctttcaacccgaaatgacgtgagggcatgtcgtaatacatcaccggaccagtggcacccatcgcggccgggtcttcggtgaagatgccggagaccacctccacccagtcaggccggatcatacagtcggcgtcaaaacggcccagcacatcgccggtcgcggcgttcaggccaaagttgcgggtgggaatcagcccctgttcatcgttctggtgcaacagtttgaccggggcctcgggatgttcggcgatgaactgttcgacaatcgcgcaggtgttgtccgtagaacgattgtccaccaccagcacctcatgcggcatgatggtctggcgagtggcgttcagcagacagtcgcggatgcgttcggcttcgttccacgctgggatgatgatcgaaacgttgagcataacatcaacaatagaaaagcgggtgtacgccgccggcgtatccgagcttcaaacccctcgctacaatggggagccatgagcgaacgcgcgcgaaacataaacagcaccgacacgtcgagaagcggtgccgcagaagccggggcagacccggacgacgagaatcgtatcgactttggtactttgttccccgccaagggagattcccgcaggccaccggaatggttcggtcgcgcgctgctgtatgtggccctcgccgtcatcgtattcatgttctgctggcgctcgtggggcgacatctcctatctggtgttcgacatcatcatctcgctgttcctggcgctggccgtcgaaccgctggtggtggcgctggtggctcatggctggaagcgtggcgtggcttccgccgtcagtctggtgggcgtggccgtggtcgtgggtgtgctgctcacgctgttcggcaatatgtttgtacagcagatgattgccatggtccgcggtttgccggcaatgtatgggcagattcgtgagttcgtggaccagcacgccacgttcaagatgccggaaatcagcaatcttggcatggaaatcttcaacaatatccagacctcgtgggtcaccgatttcgccggcaccgccatgagtacggtgggtggcctgttctccttcctgctgaacctcatgaccgtggtaatgaccacgtattacatctccgccgccggcccaaagctgcgccgctccttctgccagtggctggcccccaacacgcagcgtcgattcctgctggtgtggaccgtggcccaaggccagatttcgtccttcctgttctcccgttcgattctggcgctgatcaacgccacctgcaccgccatcttcttggagatcctgcatgtgccctactggctgccgttggccctgttctgcggcgtggtatcccagttcatccccacggtcggcacctatatcggcggtgcgctgccggtgctgttcgcttggggcaaccgcgggtggacgtacgccgtggcggtgctggtgttcatcatcgtctaccagcagatcgagaacctgattctctcgccgaggatttcgcagcgcacgatggatatcaacgcggccgtcgccttcctctcggtgctggcgttcggctcgctgttcggcgcattcggcgcgttcctggcgctgccggtcaccgcatcgctgcaggccatcttccgtgcgtacaccaagcgctatgagctgattgactcaccgctgatgaacgatccgactccggagaagaagtccaagatcgtcgaggcgtccgaggcgttcggcgagcacgtattgcagccaatcggcgagcacatgccgcgtgcggccaggggatccaccaaccgcgtgccgatgaatgaggaactgcgtttgctgcaggaacagatttatgcgattccgtcgcacgagacgaaagaatccgatttggacgattccgccaccgtggcgattccgaagaacgtgctatcctccagcgctcgcaagggattacgcggcactgagccggatacggcggcgattccgcagcgtggtgccgcggatacgcagcagtctgagcagcccgagcagcctgagcggtccgccgaacagcctgagcagcccgagcagcctgagcggtccgccgaacagcctgagcagcccgagcaacgcaagcaaaccaagcagtctgatcaatctgcctccagcaatcctagggcagggtggcgctgatgactctgctttccgtactcgatattcttctgatgatcgtcggcggtgccggcatgatatatcagggactgtgcatcgtgatgtccctgttcgccaagcccgtgcgcttccccgacgccccgatgaccaaccggtatgccgtgctgatctccgcgcgcaacgaagaaaaagtgatcggcaaccttattgggtcgattcgcgatcagacctacccgtccaacctcatcgacatctggctggtggccgacaactgcaccgacaacaccgccgacgtggtgcggtctttgggctgccatgtggtggaacgccacaatcttgagctggttggcaagggatatgcgctgacgtatctgttggggcatatgctcgacatcggtgtggccgatgattatgaggcctacttcgtgttcgatgccgataacaagctggacaagcactacttcgaggaaatgaacaaggcgttctgctccggattcaagattctgaccagctaccgtaattcggtgaatctggcggataactgggtgtcttctggttctgcgctgtggttcatccgtgaatcgcgattcctgtctaactcgcgtatgattctcggttcctcttgccatgtgggcggtacgggattcatgttctcccgcgaggtgatgaagcggaacaagggatggaagttccatctgctcactgaagatcttgaattcactatggattcgattctgcatggcgaccgcatcggctattgcggtactgcgattctctacgacgagcagccggttaccttctcgcaaagttggcgtcagcgtttgcgttggagcaagggattcctgcaggtattccgttattatggctcggcattgctgaaacgcgcggttcgcgaacgtgatttctcctgcatcgacttcaccttgatgctgtgtccgtttaccgtgttgggcgtgattcgcgcggtaatgggcttgctgttcgccgcgtgtggcttcgtgagttggccgagccagctgcaatcgctggccagttggtccagtggcatcatcatatcggtgttgggcctgatggcattggctgcattgaccatcattgtcgagcgcgaccagatcggtgccacgaacaaggagctgctcgcctatgtgctcagcttcccgatttacattctcagctacgtgccgatctccttccaggccctcttctccaaagcccagtggaagcccatcgcgcataagggttgaccgagtccgctagttggagctgctcagcggggcaatccaacagcaacccgggggtttgcttcgctgagggttggctggtggggtagagtggatgtatgagcttagacaatactcaaaggaatgtcggatttcagccgccgatgatgccagctgccgcccccgcgcctgcacagccgtcgcaaccgcagccacaagcatggccgccgaatccgaatgcggcggtgtccattcgtggcctgttcaagcacttcgaccggaagatcgccgtcaacggactcgcgctcgatattccggtcggctcgttctatggacttgtaggccccaacggcgccggcaaaaccaccacgctcaatatggtgaccggtctattggtaccggacgccggcaccgccatgattttgggccatgacgtgtggagcgacgtgaacacggccaagcgcatgatcggcgtcatgccccagcccgaccagatcttcgaccgactgaccggtttgcaattgctcgtctactccggcatgctgcgcggcatgagccgcgatgagaccacgcgtcgcgcccaggacctgctcaatgctttcgacttggccggggccgccaacacgatggtcaccgattattcggccggcatgaccaagaagatctgcctggcctccgcgatgattcatagcccgcgcattctggtcctggacgagccgtttgaatccgtggacccggtgtccagcgccaacctcaaagacatcctcatcgaatacgcgaagaccggcggcacggtgattatctcttcgcacgtgatggcattggtcgaaaagatgtgcacgcatgtggccgtaatcaacaacggtctggtgtgcgcggccggcacggtggacgaggtcgccgccggcgaagaactcgaagaccgcttcctgcaactggtcggcggccgccacgaagccgcccatctcgcatggctcgacggcgggcaagcccaagcccaagcaccaacttcggtccagccggtccagcccattccgcttacaaccgccacgcccgccacacccaccgatgaggcccgccgatgatcagcagcgccatcaccctggtccgcctgcgctggacgctcacgctcgccaccctgcgaaaatcggcgtggcagaccgtcgcctatgtcttttccgccgtactcgcggccggcaccatcatcggcaccggcgtgctcgcatggttcatcggcatactgccgcccttcaccgtgaacgcggatggctttccgctgaacatccttggttccggaggcatcgtcaacatagtcgtcgtgctggtcggcgcgaccatgaccatcttcatcggcttcatccagctcatgatgcttggcgaaggctccaccatgaacccacgcaaattcgcgctctacggcatcgccgaccgcaacctgcaattcggcttgctgctttccggcctgtccggcatccccgcccttaccggcgtggcctcactgatgctctggacactggcctatcggcatatgggaccagccgtaatcatcagttccctcctcgccgcagtgctggccgtcatcaccatgatgagcatctccaaactgctcatcgccctatccaccacgctggtgaccagcaaacgcggcaaaggcgcgttctatatcttcatcgtgctgacgttcgttatcatctgtcagttgccgaacattctggtcaactccggcgtggccttcagcctcaacaccgaaacctggggcgcggcgaccaccatcgtcgcatggacgccgttcggcgcggccttccaactaccgttcgacgcgcttaccggagcctgggcggtgctgctcgcccgcatcgccatccttgccgtcacatggattgtctgcttcgccgtctgcacctggtgtctgagacatgaacggctcaccatcggcgcaaacagtccgtccgagaccgccaaaggcatcggcgcattcgcatggatgcccgattcggcatccggcgcggtttccgcacgcctgatcacctatctcaaacgagacccccgccaagccacgaccttcgccatgccggtcctgttcctgatcatcttcgccttccaggcacacggcatcagcgcggtcgtctggcagtcgctgatctggtgcggctggttcatgtccgtcgtggaaagcaacgggctcgcatatgacggccgcggcttcaccatggaagtcatcgccggcgtgcgtggccggaccgacagaatcggccgcgtacgcgtctacgtcggcatcatggtcgtctacatggtgctgctctatctcgccggcatcgtgctggtcggcgcactgaccggacgctgggcgcagcccgatgacctcgctaccggcctgatcttcctcgccacgggcatgggcatcgccttgagcggactgggcgtggccgaagtcacctcctgtgtactgatgtacccggtcgcctcaatggacaagccgttctccgcgcctcaaggccgcgccatggcccaaggcttcttcccgttcgtctacatgcttggcagcctgctgctcatgctgcccactggcatcgtggcgctggtcatgctgctgacaggagccgaaggcggcatgtggctggcgattattccggtcgcgctggccaatggcatcggcattctggcactcgggacatggctgggcggtaagctgatggatgcgcgaatgctctcgattgtggcaacactcgactcgttcgcctcattgcagaaatgattgccttggcataaggagcacgatggtatctacagcggtatcacgccgtcagcgacgtgaagcgcaacggcggacccaacgatcgcatcgccgaacactgaccgtcatcatttccgcactgaccaccatcgccctgttcgcggggtactgcgccgccgacatcaccgacgtggcccccggattgttgacgttaaaacctgtcaccgcacctgttttcgccaatccggccaccgccaaatcaggcggcaccatcgccggtgccctgaacgcgaacaaggccattgattccacggccgcttctgcactggtcaacgaattgctgtccgcgcaaggcgtgggaaacgatacgtcggtgatcattgaagacgcccaaggcaccgtcgctgccgaacatgagtcgaacactccacgcgagcctgcatccacactgaaaacgctgaccgcgctcgccgcctcatccaccctgaacatggcatccaccttggatacccaagtgttcctgacccaatccgatgacggcaccaatacgttgaccctcaaaggcaatggcgacatgctgctgtctgcaggcgattccgacgcaaaccataccaacggacgtgccggtctgaacaccttggccaaggccaccgtggccgcgctcgcccagcgaggcatcacttccgtcaatctcgagtacgacgacaccctattcggcgactcacgcattcccgcaggtctgtcggaaggcggcgcggtcttaagcgactacaccgtctacttcacgccggtctcatcaatggcgattgatggaggccgccaatacaccgccgatacgcctgcgccggccgaccctgatgattcggccggatacccggaactgtcccagcacaccgccagcgacgtggccacgaaattcgccgaactgctccaatcgaacggtgtggccgttaccggagacgtgacggcaaacaccgctccatccggcgaaacgcctttggcctcggtgagttcggcaacactgtccgaaatcatggcatacacgttgcggcattcggacaatacgctggccgaggagttcggtagactcaccgccttgacgaaatcagcgacaaacagtcctgaaggcggcacggaagcggtcaaatccactctgaacgatctcggtctcgacacatccggtctgaccatggccgattgctccggcctgtctcccggctcccggctcaccgtacgcacgctggcggccgtccaacaacgtaatctgaccaccgagagcggtgctgctggtgcggaaggtctatccatcgcggggttggtgggcacggcgcaggatcggtatacggatgatgccgtggccggtctgctgcgcgtcaaaaccggcagcctcggcacggtcacgtcgatggccggcaatgtgtcccgtaccaatgggggagcgttgtcgtttgccgtggtggtcaacaatcctgaggattatgccgccgcgcgtagcgccatcgactcgttcatcaccaagctcgcggggctgtaaaagaggcatcaagggccatcaagggctacaaaggccgtaaacgtccataaacgcacgagtgcctataaccagaaaagggtggtgagtacatggcatattccgcacgattgcgcaaggccgtaggcgcggtccgaacaacgctgagcgccgtggaactatgcgatgtgcaggctcccgaattcgcgcagcatggggaccatgccgttgcctccgatgcaccactcgtgctcgtggcctgttcaggcgggcgcgattcgatggcgctggccgcggtaagccatatcgtatgcacgtccatgggcgtgcgttgcggtgtcgtgattgtggatcacggcttgcaggagggttccgaacaggtcgccggcgaggccgcggatcgttgccgtgcgttgggactgggcccggtcatcgtgcgcaacacaaccgtgcaggcacgcggtgagggcctcgaagcggccgcacggcaggcccggtacaacgagctgtgcaccgcggcgcgtgaatcaggtgccattgccgtgctattggcccacactatggacgatcaggcggaaaccgtattgatcggactgctgcgcagccgtggcgtggatgcgttggccggcatgccgcaggtcttcacacgcagtggcgtgacttttgcgcggccgctgcttacccttactcgagacgaaaccaccggcctctgtgaagacttgggtgtggaatattgggatgaccccaccaatggcgatgcggtagacggcgagttgccggacgactatccgttgcgctcgcgggtacgccacgacctgctgccggccatcgaacgattcgctggattcaatgtcacccgccatttcgccgaaagcgcacggttggccagaatggataaggagtatctggatcagcgatccgacgaggtgatgggggaggcggttacgacagttgattggccggcatcgtcggcagcggtatcgaccgatacgccacgagcctgtgctgcagacgataccaacgattcgggccatggcatcggcctgatgatcggcgtcaaacgtattgcacgtgagccagaggcgattcggttgcgggtcatcgctcacgcgctgagccaggccggtgtgaacgccagtgccgcccagattgccgccatcgaccggctggtcgtcgattggcatggccaaggcggcgtctcacttcccagaggttattcagccaatcgcaagaaacacgtcattcgcgtgtgccaagatggagcgcatgcgaatcgctgacgttgaggaagatattgaccacgagctggtcagcaaagaacagatcgatgccaagatccacgagatggccgctctcgcgagcgaggattaccgcgataagaatccgctgctcgttgcggtgctgaaaggggccgtgaatacgctggtcgcgttcacccaggccatgagcattcctgtacagatcgacttcatgagcctttcgagctatggctcgggcacagtgtcgagcggtgaggtcacagtcaggcaggatttgtccgccgatgttcgcggacggcacattttgattgtggaggatattgttgattcaggacgcacgctcgcgtggctggtcgcagaactgaaacgtcgtggtgccgcttccgtggaggtcttcgctttgctgagcaagccttcccgccgagaagtggacgttgatgtgaagtacgccggctatgagattccggacgagttcgtcgtcggcttcggcctcgactttgacgaacgctaccgcaacctcgattcgatcgcggtcctcaagccgtccgtctaccaaggagtgcaagcatgagcttcccgcaagggccgggtaacggcaataatccgaacccgaacaacaaccgtaacaacggcaacccgttcaccaacccgttcaaccgtggcaataacgggaacaatggcaaaggcaacaacaacgagaaccggccgatatggcagtccccctggctgtggggtgccgtactcgtggtcatggtcgtgctgatgttccagatgttcgccggcggtggcaccaaaaccatcgacaccaaagatggtttcgcgctgatcaatcagggcaaggccacgtacgccgagatcacggacaacaagcaggtcgtccgccttaagctgaagaacgactacaccaagaaaaacgccgacaccggcaaggtgaccaactacggcaagaacgtgcagttctactacaccttcgcgcagggcgcacaggtggccaaggccgtggagaacggtgatctcgaaaagggctggacctcgaatatcgagcagaccagcatgatgagctacctcatcacctcgatcctgccgttcgtcatcttcttcgccctgttctggttcctgatgagtcgcatgggcggtgccggcggcatgctcggcatgggcggcaggaaaaacagcggcaagctactcgatggccagacccccaccaccaagttcgccgatgtggccggtgaagacgaggccgtggccgaagtcgaggagatcaaggacttcctcaaggatccgtccaagtacaaggcgctgggcgctcgtattccgcgtggcgtgctgctgtacggtcctcccggcactggtaagacgttgctggcccgagccatcgcaggcgaggccggcgtgccgttctactcgatggccggctccgacttcgtcgaaatgttcgtgggtctcggtgcctcccgtgtgcgtgacctgttcgatgaggccaagaagaacgcccccgccatcatcttcatcgatgaaatcgatgctgtgggccgcaagcgtggctccggcatgggcggtggccacgacgagcgcgagcagacgctgaaccagctgctcgtcgagatggatggtttcgacaacgacaccaacctcatcatcatcgccgccaccaaccgccctgacgtgcttgaccccgctctgctgcgtccgggtcgattcgaccgtcaggtgggcgtggccgcccctgatctggaaggccgtgaggcaattctgagggtgcatgccaagggcaagccgttcgtaccggacgtcgacctgcacatggtcgccgtgcgcacgccgggcttcaccggtgccgatctggccaacgtgctcaacgaagccgcgttgctgtgcgcccgtgccggtgcccagttgatcgacaaccgcgccatcgacgaggccatcgaccgcgttcaggccggaccgaagcgcaagtccaagggcatggctctggaagagctgcgcaacaccgcataccacgagggtggccatgcgctggtggccgccgccctgaacaacaccgacccggtgaccaaggtgacgattctgccgcgaggccgcgccctcggctacaccgccgtcatgccgacctccgaccgctactcgcagtcgcgcaaccaactgctcgaccagatggcctacgcgatgggcggtcgcaccgccgaggaaatcgtcttccacgacccgaccaccggtgcctcgaacgatatcgagaaggctacgaacatcgcccgtacgatggtgatcgaatacggcttctccgacaagctcggtgccatcaagtggggttccgacgatgaccagaccactgtgatggacggtctgcagccgcgcaagtactccgatcgcaccgccgaagtgattgatgacgaggtgctcaagctggtggagaccgcgcacaccgaggcgtggaccatcatcaacgacaaccgcgagatccttgacgagctggtccgccagctgttggtcaaggagaccctgaacgagaaggaacttgcggcgatcttcgcgccgatcaagaaggctccggtccgcccggtgtggctgtccaacgaccgtcgccccgactcggacaagccgccggtggagattcccgaaagccttaagcgctcggtcggcatgaagccggaagagtagacacgatgacgattcggcccgacctgttcatgtggtttctcacgtacgcaggccgggccgacgtcgttgtggacaatgacaagggagagatgagatgaacgaatatatagagtcttgccagcgggagaaacgcacatacgacgaggaaggcgtgcgcgaggccgtacgtctgttcctgaagtcgattggcgaggatcccgagcgcgaggggctggtggaaacgcctgaccgtatcgcccgcgcgtgccgcgagctgttcgccggtctgcaggcttccccggccgatgtgctggagaagcacttcgacgtggataccgacgaactggtgctggtcaaggacatcgaactgtattcggtgtgcgagcatcacctgctgccgttccacggcgtggcccatgtgggctatattcccgccaaggacggggtgatggggctgagcaagctcgcccgactggtcgaggtgtatgctcgccggccgcaggtgcaggagcgtttgacccagcagatcgccgacgcgctggtcgagtatgcgggcgcacgtggtgtgattgtggtgaccgaatgcgagcacctgtgcatgtctatgcgcggcatcaagaagtcttccgcccgcacggtgacctctgcggtgcgcggcatgctgcgcaatccggccacccgagccgaagccatgagcctcattttggataaatagtgtctactaagctccctcatcatagggagctcacttgggacctacatagaaggggaaacataatgactgatttgcaggcgttgcatgacagtacgcacaccatggtgatgggtgtgctcaacatcaccgaggactcgtcctcggacggcggcctgtggctggacccggccaaggcggcacagcacgggcgcgacatgatggccgccggcgcggacatcatcgacatcggcgccgaatccacgcgccccggcgccaagcgcgtgtccgaggccgacgaactggcccgcatcaccggtgccgtcaagacattgattccggccggtgccatactgtccatcgacaccacgcgcgcatccgtggccgccgctgcgctgagcgagggcgcccagatcatcaacgacgtctccggtggcacgctggatgccgaactgccgcatgtggtcgccgaccacgactgcctgtacatcgtgcagcattggcgcggttggctcgccggctccaagggcgcgaaccccgatcaagacacctccgtctacgagcacggtgtattgaccgacgtacacgacgaactcatgcgccaagtcgacggtgtgctggccgccggcgtaaagcctgagcgcattatcatcgacccgggcctgggcttctccaagcccggcatcgagcacaacctgccgctgctgattggactcgagaccttccgcgccactggatatccggtgctgatcggccagtcccgcaaacgcttcatctcggcgatgcttaccgaggcgggcgctgccggtgctgatgggccgatcatggcccagcgcgatgacgtgaccgcagccttgtccgccctgtccgccgaacatggcgcatgggccgtgcgcgtacacgacgtggccaaaagccgcgccgccgtcatcgccggcaacacctggcgcgaatacgtatgattcccctggctccctgttttggttgcttctaggccttggctcccctcgggcgaggggagctggcgccgaaggcgactgaggggagcatttgagcagaaagccttaccaatggacaccatcacacttaccggcgtacatgccaacggcacccacggtgtgctcgccttcgaacacgaacggccacaaaccttcgtcgtggatgtcaccctgcaccttgatctggccgcagccggtcaatccgacgatctcaacgacaccatcgattacggccgtgtggccaaggacatcacggctgtcatcgaaggccctcatgtggacctgatcgagcgtctggcccaacgtatcgcggataagatccttgccgatgcgccggccgtcgcctccatcgacgtcaccgtgcacaagcctcatgcgcccatcgtcgtggcttttgcagatgtatcggtctctatctcgcgcgtgcgtgccaccgataatggacgcactgctgaagagcatgccatccataacgcggtggtggccttgggcggcaatgtgggcgaggtggaatccaccttgcgagccgccgttcgggagattgacgcgctgctcggcacacaggtgaccggtatttcgccgctttaccgcacggccgcgtggggcatggccgacggtacgccggatttcctgaacgccgtggtggagcttgaaaccacaatgggcagccacgaattgctcgccgcgttgcaaagcatcgaggcgaaccatgggcgaattcgtgagaatcattgggattccaggccgttggacttggacattatcgactttgatggcatcaccagcgcggatccggatctggcattgccccatccgcgtgcttggcagcgcgcgtttgtgctggctccctgggcggcgctgaatccgaacgccaaacttgccggagcccatgaggggcctgtagccgatttgctggccgccgcaccggaccgtaacgccgtgcagctcgagagcgaagactggatgctcggcgggcatgcagtcaagcaaaaatcagcgtcggagtcggcacccgtctcacgcaaggcgattatttcgctggattccacctcgcaggatgtcgaacggctgttccgcgaaaccatcgtttccatcgacagtgttcctggcaatcaggtacagggcatctcgccgctctaccatgtcagccatttcgacggcccggacgcgatgagcgcggtcatccaaatcgaaaccaagttgccgcccgccgacctgattgccgtattgggcagcatcgaaagtgttcatgatctggcagtcgaccttgaccttgtcgacatggaaggcgtgacttccgacgagcccaactgcagcattccttggccgtcggcccgtaaccatgcgtcggtattggcaccttggctggatatggacccgaatgcttctctgggcggcgacccggtggctttccttttggccatggcaccggatgccggacaggtcggattgctatcggacaactggatactgtcgaacagttgagctgatggcagaaccagttacgaacggtaggctagaaaccagacggtgacggaccagtctccggcctcgaacagccgggcacggcagtgacgaaaaccaaatcaagatgaacagcccaggcgcgagggccgttcgcaaacagcaaacagcaacgcaacgataaggaggccggacatgaaaacacggcgaacaccatggtggcagtatgtgatcggtgctgtgctgggcctgttggcgggtatcggtctggcctcctacggcgaaagctcgggactgtcgctgattggtgcgccttggattgtgaccggattgctggccgtgctgggcgttatcgtgctgatcttggccctgcaagtgcataaatacgcgaataccgaccccaagaagcgtccgcatagcttcatcaatcccactatcgcggtgtatacgctggtgctgtctaaggcactgggattggcgggcgcaacgctcgccggctggtatggcggtcagattgtgatgagcctgagccatatcgaggcggatttctatgcacacgccgtcaccgagtgcgcaatcgtggccgtggtgtgcatcgccgacatgatcatcggcattatcggcgaatggttgtgccagttaccgccgaacgaaggccccgaaaacccgaaaatcaaggaagccaagcgccgtagcgacatagcccaggcctacaaaagataatccgtgataagccccctctgacgagggggccgtaggcgtagccgactggggagagaagaagaaaaaccacaccatcggccaagccgattcccactattcctgcggcacgcgaaccatagcttcctgagcgatggccgccaccaagtcgccattctgcgcatacactttggcgatgccgagtccgcgtccgtgcgcggcgataggcgtatcctgcacatacaaatgccattcgttgatatcgatatcctgataccaccacatcgaatggtcgatggacgcataggaaatgcccggtgtggaaatcgacagtccggcgcggcgcagcaccggctccatcatcacctgatcgcagccgagtgccagcatcgcacgatgcatgacctgcggcacatcgacgtggccatcggccttcatccacaccatctgcttgccggaatcatgctcggcggaatccttgtctgcgcgcagcatcacggtcggcgtcacgtggcggatatcgaatggtgatttctcgacatagaaattggcgaacggcgacttttcggcgaacggctgcatgagttccttggcggaagtcaacgtttcgggatcgggcaggttttccggcatcggatcggcaaattccacaccctcctgaccggtctcttggaaggaggcgatggccgtgagaatcgacccctcggcttgggtgacgttgacccgacgagcggagaacgagcggccgtcgcgaaggttctcgacgtcaaacagcaggtcttgacgaatatcgccggcggcaatgaaatagccatgcaccgaatgcggcaggcgtgaagggcccacggttttggacgcggcgatcaccgactgggcgatgacctggccaccgtagacgcggccagtggggaagtacatactctcgccattgatgtatgtgtgattgcggtaagcggaaggctcgcccaacttcagcaccttcaccagatggtccaatggagttacggtggttgcctgagccatggcgttcctcgattcctgttctgctgtgttcgatattcggttatcgtattccaacctatggttggcagtctatccggtgggggttaagagttccgggagcgaaatgtaacgagactgtttggaaggtaaacggttggttatgcggtgcgttgccgctacgttgctgctgcactgccggtgtgttgccggtgcgttgccgtaggtgactgtgggattttatgggatgcggggcggggcagtcatgggggcaattatgggaaagccgcccctgagggacggctttcgacgtataaagcgcgttgtggcactaatgccggcgtatctcagccgcgcacaagcttcttgtgcaggcggtgcgggcgggccgcatcctcaccgagtcgggccaccttgttctcctgataggcctggaagttgccttcgaaccagtaccacttggccggattgtcgtcgtcgccttcccacgcgaggatatgcgtggcgacacggtcgaggaaccaacggtcgtgggagatcaccacagcgcagcccgggaactcgagcagcgcgttttcgagggattccagggtctcgacgtccagatcgttggtgggctcgtcgagcagcagcaggttgccgccctgcttcagggtcagggccaggttcagacggttgcgttcaccaccggacagcacgccggtcagcttctgctggtcggcgcccttgaagccgaagctggccacgtaggcgcgggtcggcacttccacgccggccacctcgatgaagtcgaggccgccggacacggcttcccacaggttcttgttcgggtccaggccctcacggttctggtccacgtagctgattttgacggtgtcgccgatcttcagctcgccgctggtcagcggctccaggcccacgatggtcttgaacagcgtggacttacccacgccgttcgggccgatcacgccgacgatgccgttgcgcggcagcgtgaaggacaggtcgtcgatgagcacgcgatcgccgaaagccttatggatatggttggcttccagcacggtggagcccaggcgcgggccggccggaatctgaatctcggagaagtcgagcttcttgttgttgcgtgcctcgttctccatctggtcgtaacgttccagacgggccttgttcttggcctgacgggccttgggggaggagcgcacccagtcgagctcgttcttcagtcgcttggcgagcttggcgtccttggctccctggatctccagacgcttggccttggtctccaagtaggtggagtagttgcccttgtacgggtacaggtggccgcggtcgacctcgcagatccattcggccacattgtccatgaagtaacgatcgtgggtgacggcgatgaccgcgcccttgtactggtgcaggaactgttccagccacaggatggactcggcgtccaggtggttggtgggctcgtcgagcagcagcaggtccggggcctcaagcagcagcttgcacagggccacacggcggcgctcgccaccggagcacacgttgaccggggtgtccggatcggggcactgcagggcgtccatcgcctgctcaagctgggagtcgaggtcccagccgtcggcggcgtcgatttcggtctgcagcttgcccatctcttccatcagcgcgtcgaagtcggcgtccgggttggccatttcttcaccgatctcgttgaatcgggcgaccttctcggcaatcgggccgaacgccatcttgatgttctcgcccacggtcttggtgtcatccagcggcggctcctgctgcaggatgccgaccgtgaagcccggggtcagcgtggcctcgccgttgctcacggtctccaggccggccatgatcttgagcagggtggacttacccatgccgttcgggcctacgacgccgatcttcgcgccgggcaggaagctcagggtcacgtcatcgaggatcacgcggtcgccgtaggatttacgggccttgatcatctgaaacacaaattcagccatatgttaccttatcgttcaagaaacgctgattttccaacgttttgcgggacccggaccccgcaatgacaccaatggaaaacgacgcaaccgtttacgggggtgtcccggacggcccgttgtgcgtcattcgctgttgtggttgtcccgtgtcatcgccggcgccatggtcctacgcaaaaacaccttgtggattatcccatatcccatcgtcatgccgcaacggtggattgacgaggtgcggggcaggttgcatattgcggtgatcggtttgtagcgcatggcgcaggtgctttcgatcgcggaacacgccgatgctttgagcattgcatagaaagtattcgtctgatataaaataattatcgtaaaacgataaaaaattatcaaataataaatattttcattattgtcaaaggaagtgataacgatgaaggcaacgaagcttaacgcggcggtcaaggtcatcgcgaagattgtggaagtgatgctctggatcgcaacggcggtgtatgcgggcatgctggtcgccctggtcgttgccggtgctccgctggtgcggtgggttcaggaaggcttggattccgggaatctgtttatcgttggggacccgaatctgctgcctgtggcatcggatgccactgtgctcgcccgtggtttcgctgtcgccgcaatcgccatggtggcgatgcttgggatgatggctgtggtgttcagaaacatccatctgatcttcagtaccagcgaaaccgaatctcccttcaccaaggccaacgtgcaacgcgtccgccgcatcggcgaactatccatcatcgcccccatcatcaacgccattttcatggttgtcgtcgatctcgtggtggggagccgcaaggtggaattcttcgtgaatatgcagccgatcgccttcggtctcgtcgtgctgtgcctggcgcaattcttcgcatacggcgccgagcttgagcatgacgtcgacggcctgctctgatgattgcgcgattcagggaaggttgatatgggcaaaattgttctggaactggatgtgatgatggcgaagcggcacatctcactgggcgatctcgccgagcaggtcggtatcactaacgtcaatttatccaagatcaaaaacaacaaggtcaacgcgattcggtttaccacgttggccaatatctgccaggccttggaatgcgagccgggcgacattctcaaatacgatcccgacgcaggggagtaggcgagatgtagctcgtgggttgtgccgctgggggcgattccgtccaattcctcacgcttggcattgccgatgtgttttgctgatcgtcgtgatgccgcgtccgagtaacgggacgagctgttgccttgtcgtccacaccgcgtcgctacggaatgtgatgggatgcgagggtgctcgttcggaactcggcagccgtgccctattcagtcgcgttgacggttctgaagagttgcggctcgtatcgttgaaggtcgtcgagtaggtagcgcgcgtcgagttgttcgatgccgtaggagccgtcggccacctgttggctgagttggctggaataatagagtttcatcgcatcggcggctgtcatgtcgtattggtcggctatcagcgcgatgagatcggattcgagatgctccttgcgtagcgtttcgagcttcgtcagggtttgtggcgtgatcgtcattgtttcacctcgtaggtctcgacgtatcgcagggctgcgatcgaccggggtgtgaggaagcggtactggtcgtttcgttcgtagaaggcaagggcctgcagggtgcgttccatgtcccatagctcacgcatgtacatgtctatggccgcgtagaccttgtcatccgcaacgcctccgatgatgaggtcagttcccaggggaggctgcccgccccgacgacagttgcatacgaatcgaacccgttcggcgtcgttctcgttgaaacgcagaatatggagattcgccgtttcgccgaattcgtacacgttgaccagcgctttgccatgcgagcgcaatgaacgtcgcaaggcccagcgttccgcctgcttcggataactggtggcgtagaaccccgagccgaaatcaaggttcttgcgtaagtggatggcgtcgggcttttcgattgtgacgtcggaaccgtggtacagcctcatatgcagattccccgctcgcgcacgtagtccgtcaggtcgttgacgaggtattcgctgccgagtgtgtgcagcatgtcgtagcaggggacaaggtagccgtcgatagcgttggccttatcgagaatgcgataggtgtcgggcacggacttgccccaatgctcggcgagccgatacagcataaacgtggagaaatcgatctggttgcgttcgagcttcgtcatgtctcgcctccttgcctcatcgaaagtgaatgaatcttccgtgatgtggaatgccgtcgcgtcggcatcacttacatcgattctagcaatgctgggtctcggattagcgtcggatgacgcaactttgacacaagccgattcgtagccgatgagtgacatgctgttgtgtcacgggacatgcgggaaaaacgttggaatagcaaggctcagtgactacgaactatctggtggataaactcagccatat

SEQ ID NO: 2303 - DNA, 21274 bp, Unknown
  R119_18m  MAG No. k141_23451
ctttgacttctacggcaaggtgctctccggtgccaagaagcagcgcgatcgttggaagcgcgcggtgagcctggtcaacggcgtctgcggtgaagatgtgggccgcgagtatgtgcgcctgcacttccccgaaagctcgaagcgccgcatggaagagctggtcgccaatctgattgacgcctaccgcgtgtccatcaccaattccgattggctgggcgaggataccaaagccaaggctctggagaagatctccaagttcacgccgaagatcggctacaccaaccactggcgcgattattcggcgctgagtgtctccgcggatgcgctacccgccgagaacgccaaggccgcgaacctgtacgagaccggctatcagctggccaaggtcggcaagtcggtcgacaaggacgaatggctgatgaatccgcagacggtgaacgcctactacgagccaagcatgaacgtcatcgtgttcccggccgcgattctgcagcccccgttcttcgacccgaaggccgaggatgcggcgaattatggcggtatcggcgcagtgattggacacgagatcggccatggcttcgacgatcagggttcgcagtatgacggcgacggcaagctcaacaactggtggaccgacgaggatcgcaagaacttcgaggcccgcaccggcgcattgatcgcccagtacaacagctttgtgccgctgcagctggcagagaagtacgctgacgagtctgataaggcgccgcacgtgaacggcgcgctgaccatcggcgagaacatcggcgatttgggcggcgtgaacatcgcgctcaaggcgtatgcattcgcgctcggcaaggcggcaggtaagcccgacgccgaagaagacggctcccccgccgccatcaaggcactgctcgataccgcccccgaaatggacggattcaccggcctgcagcgcttcttcctgagctacgcctccatctggcgcaccaagaaccgcgacgagctggccgaacagtacctgcagatcgacccgcattctccagccgaattccgcaccaacggcatcgccagcaacgtggacctcttctacgatgcctttggcgtgaccgaaggcgacgccatgtggctcgcgcccaaggaccgtgtgagcatttggtaatccccgttatgtaagagaaaaccgctgtgcttgcctcgattacaggcgaacacagcggtttttcatgatgtatggttggcactcagaattcggattcgccgggatcggaagattcggcgaaaccgtcgacgtaggtttgttgggctgcggactgtggctgattagcgccagcgtccggttgcgacatgacggcatcggccatggacgcagccgctgactcggttgatggcgacggcgattggccggaatcggaggtgaccccaaattcgacggggccagattccgacgaggtcgcatacgggtccatacccacaccggatgcggcaccgtccacactatattgcgttggcctcatgtgcggtgacgatgctcgttgcccgtttccgccatccatgccttcggcggcaccgttggcattgccgttaccgttgccaccattgcctccgttcccattaccggcacgctgtggcttgatcagcgacgtggtgccgaaggtcaggtcatgcccaatgttggtggcttcgagaacggttctactgcgcggttcgccttgctcattggtccactgctcggtgatgagtgagccgaccacaatgatgcggtcaccgcggcgaaccgaactggcggcgttcacggccaaagcacggaacgctttgacgcccacccatgcggttccgtaatcctcccattgtctggtagtcgggttgagtcgactgcgggtgctgcccatacggaatgtcagcacgcggaaactctcagttccgcctagtgtcggatcaccggccacaaagccggtgacggtcactgctgcttgttgatttgccatgatcggtcctttcctcggcctgctggcctgttgtttggatgtggaccgccggagcctgtctccggcttcattgccggcttgcacgccccagcggtacctccactgtgaggcatgacgtttgaagtgcacaagggcaactggcaaatgtggatactgtgacgcagttgaaattttaagaatgtggataagtttcggttatccacaacaaagcgccattctgcgactgggcagaatggcgcttgatgcgattaacgccgaggctgagtaagtgggactcagctgagggcggcgaagcgctcggcgagcgcgtcggcggcttcggcggcgggcacggcgaccttgttttcgccgttgcggtcgcgcagttcgatggtgccgtcgttgacgtaatcgcggccgaccacggcgaccagcggcacgccgatcagctcggcatccttgaacttgacgcccggagacaccttcttgcggtcatcgtaaataacctcaaggcccttggcctcaagctcggcgaccagcttctcggcaccttcaaacgccgcagcgtccttgccggtggccaccacgtgcacggcagccggggcaatcacggacggccaagccaagccggcttcgtcgtggtgtgtttcggcgatgcaggccagcacgcgggaaacaccgatgccatagcagcccatccacaccggcacggccttgccgttctggtcgagcaccttcaggtccagtgccttggagtacttgagacccagctggaacacctggccgatttccacaccacgctcgaagctcaacggaccggaaccgtccgggctcatgtcgccgtggcgaacctcaacggcttccaccacgccgtcggccttgaagtcacggccgtacaccaggttgtagtagtcgacctcgttctcatcggcaccagtgaaccaagcggaacccttgaccacgtgcgcgtcgaccaggtagcgaaccgggttcttcacgccagcagcctcggcctgcgggccaagcaccatcggtccgatgtagcctggcaccagttcggggtgctgcttcaggtcttcttcagtggcctcctcaagctcggcgggagcgaactgggcttccagtcgcttcatatccaccgtacggtcgccgggcacgccgacgacaatcacttcacgccacggctcgtcatgctcttcatcctcagggtgcttgacggtaatcaccacgttcttgaggatgtcggaagcctgccattcacggccatcagtacgcgggtggtcggcgttggcacgctcaatcatgttatcgatggtcttggcatccggggtggcttccttggaagcggcgggagtggcggaagcatcgatttccggcagctccggagtgctcagggcctccacattccatgccttgccggaaggtgccagcgcgaaggtatcttcgccgatcggcatcggagccaggaattcctcggatgcggagccgcccatcgggccggacatggcgaacacaggtacgtacttcaggtcgaggcgctggaagatgcgctcgtaggcgccgcgctcgtcatagtaggccttgcgcatgccttcttcatcgatggtgaaggagtaggcgtccttcatgatgaattcacgaccacggatcaggccggcacgcggacggaactcgtcgcggtacttggtctggatctggtacagggtgacgggcaggtctttgtaagaggagtacatgtccttgaccagaagggtgaacatctcctcgtgggtgggggccagcaggtaatcggcctcgtggcgatccttcaaacggaagatgttgtcgccgtactcctcccagcgatgggtggcctcgtagggttcgcgcggcagcagggccgggaagtgcacttcctgggcgccgatgccgttgatctcctcgcggatgatggcctcgatcttgttcagcacgcgcagaccgagcggcagccaggtccagataccgggtgcggccttgcggatatagccggcgcgctgcagcagcttggccgaatcgacatcggcatcagcggggtcctcgcgcagggtgcgcaggaacatggttgacatacgaagagtattggaagtcatgtgttccaagatattcgcgtgaaccgacaagcccgcctgctattcgcactattccggccttcatcttggcattcggactcattcgtacaacaatgatggctagaagggtaggagggcacgatgacgcagccgaccgagcaacaggggaatcagccggaacccgcggagcaaccggtgtatcaaccggcccagcatgggccccgcaattttctgctgcaaccccgcaattcccaacggcagttccgcgacaaccggtatcgcaacagccaatggccatgccaccatttgcgcaatcgcctatgtcggtcccggaacaagcggcctgtccggagcggccgcgctgattgtgggtgtgcgtttgctgcaagcaccgttgatctacggcacggtgattcttatcgtcagcacggtgactgtgctgtggccatggagggccgaattctcccgccactaccggtgggtgtggcttgctttgggcggcatcattctgattgtggcagccgcgcgctatgaggcgagcctcaaatcgatgaggacgatcgccgcgcgtattggcgatctgcgctaaatcgcgcgggcgacctgaggcagattaccaacgtccggcgatagcagtcctgcatacggggcagtgcccattgccactgtatccggcagataaacggttggcaatgattcgataccaatcgcgttccacgagcttggccctgcattcagggtttgggcaatatgtggtatcgccttcacgatcatgcacgttgccggtgtacacataattgagtccctcttcgagggcgatgcctcgggcgcgggtcagagtctcgtgcggggtgggcgttacgtccatcatgcggtaactggagtggaatgcggaaaagtgcagcggcacgtccgggcccaagtgctcgcgtatccatgtacattcagcatgcagctgggcgtcgtcatcgttgagtccagggatgagtagcgtggtgagctccacccacacgtgttcgccttctggtgtgcgtgcctcgttgaccgcatagtcgatggtttcgagcacatcggccagatgcgtgccggtcactttccaataaaattcttcggtgaagcctttgagatcgatgttggcggcgtccatggcggcgtagaagtcgggccgggcttcggcgctcatgtatccggcagtcacggcgatgggatgaatgccgagcgctcggcaggcttcggccgtgtcgatggcatattcggcgaacacgatcggatcgttataggtgaacgccaccgaatcgatgccccggtcggccgcgacctgcgcgattttctccggactggcttccacgccgagccggtcgaaactgcgggctttggcaatatcccaattctggcagaatcggcaaccggaattgcagccagccgtgccaaaactcagcacgctggaaccggggtggaagtggttgagcggcttcttttccactgggtccacggcgaagccggagctgcggccgtaggtgtcggagacgatgagtccgtcgtggtttgagcggacgaagcaaaagccgcgttggccgggcttgaggacgcagcggcgcgggcatagttcgcagcgagcgcggttggtaccgtcgtggaattgcgtttgccagcgggctatggcggggttacgaacatctgtgactgacgccgtatgaccgcacgattcccggtggccaccctctgattctcggtgaccaccctccgtcgcttcgcgccacctcccgccagcgggaggggacatggttgctgcgttagtgctcggcataggcggtcacctcgtagcgttgacagtcgatttcgccatcgttccagtcgtaggacgggcggataccggctttggcgagcaggtgagcgacgaaatcgtgcgaatcgggcagctcatcccacacttgtggcaggaatgtggcgctgcggccacgacggtcggcgagaatcagaccgtctttgccggggcgtaatacttcctcaagttcagtgcgcgaacgtaccgggcgttcgacgttgctgccgtcccgtttgacggcgtcggtctgaggtccggattgcagcgatgccagagtcgcggtcttcgagccggtatcgcgcgaatcggcgtcacaggagttcgcggtaatcggctcgggctcgcctaagacggatatttccacattgagtaacgggtattccgcggcggtgaccgggttgaaacgtgggtcacgggtggcggcgtccaccgcatgtgcagctatgtccttgccgagcgagcggtgggcggccagcgaaccgatgcacccgcgtagccggccaccctcggtcagggtaacgaaacaggcaccgggctcgttcagccatgggtttgcggcaagaatggacgcggtcgaatcggcggctgttggatgctcgatatgcaaccgttcccggatagcggcacgggcgagtttcagcagcacatcaccatgggctgttcccgattcgcctaagtcatctgcaccggctggagcatctgcttctggtttggattcccacgcggcaaacgagacatatcccactaccggctcgtcggcgtctcgcattgcggggcgaggttggccggcaagcgccaccacgccgtcgtcgccggaagtggaacagccgagctcgaagagcttcatgtccttgcggccttttaacacatccagaaggccgttgatcgggtatgcgccacaggcctggcgagggtgaatcggcagatgcaaagccgcaatgtccgcaatggtctggtcatccaacgcgcgggcgacttcgtgcggatgatagtgcgagagatccgaactaatcacgatgacggtttccgggccaccccacaaagcacgcaacacatcacccgcctcttgtggcgtggcatcgcccgcgttcaacggcacaatagtgaggtctgggccgagcacggtttgcaggaacggaatctgcacttctaccgcatgttcttgtgcgtgggttgggccattgacgatcattgcgggagccgacgcgcccggacgggcatgtgtaccggagcgcaatggctcattgacagacaggcccagagccttacgctcggctgcaatgtctaccggcacagtgcccagcggcgtttcaaacgccgctgccgtggaacaggcgacgcctcgcacggccacacggtgagtcggtcccacgattaccgcgcgagtcacactcccccgccctcgttcgagcaaagcataggcaagcgcggccgccgtgccggaatacacataaccggcatgcggcacgattacagcctttggcactcccgctggaagcgtgggctccaactgttgcagaacctctcgactgtaatccaattgatgggtaatgagttgcttgagcgttgtgcggtcagcggggtagaacgaaccagccaccgctggcggacgtattgcgccagtgattttgccgctgccgtctgccgcgcttgctgcatctgacgcactagccacactaaccgtatcgatttgcacaccggcccgggcggcctcgcgaacctcattgtttccacgaaatatctcggatagcaccataactaccacctcttattccatggtagccgttcagttcctcaatgaagacaagttcgcagtgtcttcttcggcttcaaggggccgattccgcctcttggagacatctacttgcgtttcgaggggctggtcatccgctcaatcgcacatagaaacggcttcataccaacgtcattccgccgtttttaagcgttgtctacttgggcatcagccccttgaaacggaagtagatgtcccgaaaactcagaatccgcccctcgaagtgcagaaacactcaaattagcggtcgttcgatatatcgaccgtcagaataacgcgtcctgggcgaagtcatcatcgggattgacaccgaattcgtccggctcggcgggtttgaacgcgcttgcaccttcatcggccaactggtcggaagccgaggccgaggcttcgcgcaggtcgccgtcgagcaccacggcatcgggcgagacgaggaacatgcgttcgttgacgccagtcaaatacagtccgcccagcgattcgacgcgggacaacgccacatatcccatgcccggcgcgaaggtgcgcttcagatccatgaccgcacgatcaagcgtcatgccttgcgacttgtggatggtgatgccccacgcgcaacgcaacggcacctgcgagacggaggcgagcacggtgtcgccgtccatcatttcccatgtggcctgtttcatggtgacgatgttgccgttttcgaattccacgatcggccagccgcccttgttctcctgcgcgaagccgcgcacggtgccgagcgagccgttgacgtactggcgatcggtgtcgttgcgcagggccatgacagccgcgccctccttgagtaccagtcgctcgggggccagcatgttcttcttgagtcggtcgaccagattggcgggacccgcggtttcggcgtggaactcgtgcggctcaagcatgatctggttcaggcgcatgtcgttgagattgtcggcctgccggttcaccgggaataggtggacggcgacctggccgggctcgggcagtttgcccagacgggtgacgagcacgtcacggtcggactgggtcacgtcgccttcgcgaatgtcggtgagcacggtcagcagttcgccggtgtcctgacggtgctgttcggtcagatagcagattaccgggttgagttcgggccataccagcgattcggtgatgaagccttcggggttcaagccggcacgggcataccgttcgcgactggcgatgaattcgggggtgggggcgatgaggtcgcggttgcgcccggacaccgaaaccggcggcagttggaagaagtcgccggacagcacgacctggatgcctccgaacgagcgtgggtcgcgacgcacttcgcggcagacttggtcgaccatgtcgaacagccatgcgtgcagcatggagacctcgtcgatgacgaggatgtccgtagcctgaatcttgcgtttgcgccgggatttgatgagtttgagcagactcgggctcagggcggtggccacgccgacgccgctccacgaatggatggtttggccgttgatatgcgtggaggcgatgcctgtggacgcggtgactgccacgctggcgccgtcggcccgagcctggcggatgaactcgttcaagacataggtcttaccggcaccgggcgcaccggtcagaaacacgttcgcgccggcgttcagaatggctagggcttcggtttggcgcatatcaacctctctagactcccctcagggaggggagccaagtacggcggactacttattgagaatgctggtggccacgatgtcggcggcgatggccttggaggcggcatcatccgggccggggacgggggccatgaaggccttacggtagtagcgcaactcgtccaaggactcgatgatgtcggcgagggcacggtggccgccgttcttcggcggacggttctcgtagacggccgggtaccagcggcgggcgagctccttcaaggtgctcacgtccacgctgcggtaatgcaggtggctcatgaggcccggcatgtagtggtcgaggaacttcttgtcggagccgatggtgttgccggccagcagcgggcgcacgccttccggcgtgaagcgcagcacgtattcggtgaccttctgctcggcctcggccaggctcaggccattctcccactcgttgatcaggccggaacgggtgtgcatctggcgcacgaaatcgttcatgtggttcacagccttctcggacggcttgatgacgtaatccacgccctcgtccagcacattcaggtcaaagtcggtgggaaccacagacacctcgacgagttcgtcgccgccgaagatgtcaagtccggtcatctcgcaatcgatccaaatcaggcgcgagtccttcgcgctgtacgtttccgcgtcatggctgtcgaccatggtgtgcctcttttcttcgctggtcatcgcttatgcagaacagttcagactataccccagcgcatacaagctatctcgagccacatacgcgaaaagggcctgcataagcagacccttttcacaaggaatcaacccctaactagcgcaagctagcgggcatcaaccgatcagttgttgtggaagccggagtagttcggggcttcggcggtcatcacgatatcgtgcgggtgcgattcgcgcagaccggcgtcggtgatgcggatgaacttgccacgctccggcatctcggcgatgttgtgggcgccgatgtagaacatggactggtgcaggccaccgagcatctggtagagcacggcgttcagcgggccgcgatacggcacttcgccttccacgccttccggcacgaccttatcgctggaggtcacgtcggcctggaagtagcggtccttggagtaggacttcttgccgcgcggggccatggcgccgagggagcccatgccacggtacagcttgtactgcttgccgtgcaggagcaccttctcgcccggggcttcctcacagccggcgagcgtgccgccgagcatcacggaggaggcgccggccacgagggccttggcgatgtcaccggagtagtggatgccaccgtcggcgatgcagggcacgccagcggcacggcaggcctgggcggcctcgtacacggcggtgagctgcgggacaccgacaccggcaacgatacgggtggtgcagatggagccggggccaataccgaccttgacggcgtccgcgccagcctcaatcatggcctgagcaccggagcgggtgccgacgttgccgccgatgatctgcacgccgtcgaaggcggagtcgtgcttcaggcgggaaatcatgtcgagtgccagacgagcctcaccgttggcggtgtcgaccacgagcacgtccacgccagcctccatcagagcggaggcacgctgccaggcgtcgccgaggaagccgacgccggcggccacgcgcagacgaccctgctcatccttggtggcgtccgggtactgctcggtcttgacgaagtccttgacggtgatcaggccggtcaggtggccttcctcgtcaacgagcggcagcttctcaaccttgtgctgagcgagtagacggtgagcgtcgtccttggagatgttggacgggccagtgaccaggttctccttggtcatgacatccttaaccttcagggtgtcgtaatcctcggaggcgatgaagcgcatatcacggttggtgatgatgccgacgagcttgttgtccttgtccacaaccggcagaccggagatgtggaacttgccgcacagcttgtcgaggtcggccagcgtgacctcggggttgacggtcagcgggtcggtgatcataccggactcggaacgcttgaccacatcgacctgagcggcctggtcgtcgatggacagattgcggtgcaacacaccgatgccaccgttacgagccatggcgatggccatctcggactcggtcacggtatccatggcagcggagaggaccggggccttcatcacgatcttgcgagtcagatgagtgctggtgtccacttcggagggaatgacatccgtctcgttcggcaacagcaacacatcgtcataggcaaggccgagcttggcgaaaatcgggggaaggggagcatacgccgactgggcgtttaattcatcaaggtttgtagccatgtaaacactatatgaaaatgcgctgaccttcacgacacacgcttgtgagcgctcacttatccgctgccgggtcctgcacctcacccacctgcgagtcccgcgaatttgcaggcgaatcagtcatcgaatccgctgcctgagagccaatcgaatcccggctctcccctactgcagactgcgatttaggcactgtatgctgcgcgtttttacgtgcggattcgaacgtcaggttctcggcttggatctcgggaatacgatgccgcagataggggtacatcgtggctatggtcagcaccaccacagcgatggccatgcccacggccacgtgctgcgctttgaagaacagaatcgtcagcgaaccgaatgcgatcaacgcggcccatccccacaggatcagcacggcgccacgcaccgaatgcccgatcttcagcatgcgatggtgcaggtgcatacggtccggatgcatgggcgactggcctttggccaaacgccgcacaatcgccagacacatgtcgagcacaggcaggaacaacaccagaaccggcagcagaatcggcatgaacaccggcagatagatgctggcatgaatcgaggccgggtcaagacgtccggtcatcacaatcgaagcgcaggtgatgagatagccaagcagcatcgaaccggaatcacccatgaacagtttggcgggatgccaattatgcagcaggaagcccacgcagatacccaccatcatcacgtcgatcagcgtggccaacgaagcataactcggggaagaccgggcgatgatatacgaataggcggcgaacgctatgccaccaatcgccacgataccggccgccagaccatcgaggccatcaacgaaattgaccgcgttgatcgaggcgacgatcaggaatgcggtgatcgccatggacagactcggcgaggcggtaatcagcgaaccacccaaaggcagtgagatgatctgcaatccgtcccaagccacgaatacggaaatcagcagctggccggcgagtttcagcatccaatcgagatcccacaggtcgtcggccatgcccagcagactgatcatgatgccgccggcaagaatcacccacatctggtaattgccgttgaacaatcccgagagaaaaggcagccgactggcgaatacggtagccacggcaaaaccgatcagcatgccaaggccgcccatgcgcggcgtgggaatggtgtgcacgtctcgggcacgcacctcgccaaccgcaccgatttcgatggcgacgtggcgaatcagcggagtcaccagccaggtgacgccaccggcgatggcggcaatcagtaggtagattctcatgcgccgagtcccccgccgttgaggtggagggccttgcgaatcacgttttgggcgatgacgccttcacgcaggatctcgatgccgtcgcgcgcgtacggatcggctttgacgacggtgctggagacatggccttgggtgggaccgccgtccagatacaggtcgacttcgttgccgaacgcgtcaaccgcctcctggacagtctgtgcgctttcgtcgccggaacggttggcgctggacgcggccagcggaccagtggccttgagaatcgcgaggcacagcgccgaattggggatgcggatgccctgcgtgccggggcgaccatcggcggtgtcggccaaagtctccaacgtgcagtcgggccgggctacggcaatcggcgagaacgcgccgggcaggaacgccgccgacaaacgattcagtggagacggcaggtcgagaccgagttcatcaagctggtcggtggatgcgagcagtacctgcaacgccttatagcgtgggcgacgcttgagccggtagatacggtcgatggcggccttattacgcggatcgcacgccactccatataccgtatccgttggaatgacgaccaatccaccatcccggatgacacgcgccgcttgtgccagcgattcatccgtgactttcagcgttgttccgccctccacgctcacgacacctccgttcgcctgtgtattcacaatctaccattgcaccattgcgccccgacttgcatagttcatcatcgctcgtttgccgtactgctgttttccgattcgccccgcacgcacagaccgtagatacaatgagttcatccatgctctttcgcgaaattacaggagtgttcaatgagcggaatcaatgctgaatccaccaccatgcctcccgtcgaactgcgtatgccgcgcgccagcgagcgcgtgttcgccaacttcaacttcactgtgctggattgttgcccggtgacgattggcgagggttgcgtgatcggtgccggctcggtggtgacgcgcgatattccgccgcacaccgtggccgtgggcaatccggcccgtccgattcgcgaaatcacggacgcggacacctccgccctgcagtattacgcgcagtagcagcggcggccccgcgcctgtggctacttctcggcgaagagatagcggtctcggccggtccaatctttgccggtggaggcggtggcgaaacctgtggccttggcataggccactaatcgctcgccttgggtgagatcatgctccataaccaatacgccgccgggcttgagcaggcgccaggcgcgctcaataatgcgttcagggatgagcgtgccgtctgccgaaccgccgtatagcgccagttccgggtcccagtcgcgtacttctggttgttcggggatgtcggtttgtggcacgtagggcgggttggtgatgacgatgtcgatggtgccgtcgagttgcgccagcgtggccagtgacgtggcgtcggcgacttccagttggtaattggaggcgatggaggggtatcgtttcgcggttaccgccagattgcgccgggtccattcggcggtacgcggggataattcgacggcccatacttggctgccgggcacttcgctgactatcgacaggccgatggcaccggaaccggcgcacaggtcgaccatgcgcgggtggatcatgctgtgccgggtcagccagtcaagaccggcctggactacggtttcggtttccgggcgcgggataaagacgccggggcccacctgcaggtcgaggtagcggaaaggcgtgtggccggtgatgtattggagcggctcgcgtttggcgcgtcgggaaagcatggcgtggaaggcggcaaggatattggtgacggggtcggcctgaccacccccagtcgctgcgcgacagcccccgccggcgggggccagcgaatcgaggccctcccccatcagcatggccttgtcgatatcgcgtagctcggcgtccacggcctcggccagcaacagtttggcatcatgttcgggcgtctcgatgccggcttcgcgcaactgcgcggcggcttgacgaatcaggtcggctatcactgctggttggccagacggtcggcttcgtcggcttggatgtcggaatcgatgacggcctgcaggtcgccatcgagcacggcgtcaaggttgtaggccttgtaattcgtgcgatgatcgacaatacggttttccgggaagttgtacgtgcgaatacgttcggagcggtcaagcgaacgcacctgcgagtgacgcatgtcggcggcttcggcggcctcttgctcatgtttcatggccagcaggcgagacttcagcacacgcagcgcggcggcgcggttctggatctgcgacttctcatcctgcatgttcactgtgatgccggtgggcaggtgggtcatgcgcacggcggaatatgtggtgttcacggactggccgccggggccggagctcatgaagatgtcgattttcaggtctttcggatcgatctcgatctcgtcgtcatcctcgtcggcttcggggaacacgatgacgccggcggcggaagtctggatacggccctgcgattcggtgacggggatgcgctgcacacggtgtacgccgccctcgtacttcatcgaagcccacacgccgtcttcgggagcgggcgtgcccttggcgcggatggcaatctgtacgtccttgacgccgccgagctcggtggtgttctcggactgtacgttcacgctccagccacgcttctcggcgtaacgggtgtacatgcgcagcaggtcgccggcgaacagtgcggcttcttcgccgccggtgccagccttgatttccatgatggtgtcgcgtgcatcatccgggtcacgcgggatcagcgcggtacgcaacttctcctcggcgtcgggcagttcggcttcaagacgcttggcttcctcggcgaagtcggcgtcctcgccggccatctcctgagcggctgccagatcgtccttcacctgcaaccaggttttgtaggcgcccacgatggcacccagttcggcgtgacgacggcccagcttgcgcagcttgtccgggttggacacgacttcggggctcgccatctgttcttcgatggactggtactcctcaagcgcggttgccgccgccgggaactgttcgtctgccataacacgctttctttcgtacggtggtgtctattcggttgtgcaggtcaaaaaaaaatgtcaaagaatacaaaaacgccagtcctcgatcgggtatgccggagcatgccgaatcgaatcggactggcgtgaagtatgctacttgctcttcttgccgtagcgcttctcgaagcgagcaacgcggccaccggtgtcaagaatcttctgcttgccggtgtagaacgggtggcactgagagcacacgtcaacgaacatgtgatcttccttgccagcggtgcgggtcacgaaggtgttgccgcacgagcacgtcacctcaacggggtggtaatcaggatggataccctgctgcattttacgtctcctatggattcgggggacccgggtcgtcatgcccctatggcaggacgtgaaccggaacctaagggattgtacgcgcctatctggacgtgaagacgcgctgtgccgccgcaggaggcgacgcaaaagagtggggccgcaggggcttgaaccctggaccgggcgattatgagtcgcatgctctaaccgactgagctacggccccacgttcgctgcgtaaaacagccaacttgcaaagtgtagcatgaacccaccaacgccggcacacgcgccatgcacccatgccatgcacccgccagcacaacaagcggcatctcccggcgctacttctcccccatgtaccccaacgggttctcgatgaaccgtcgcaagcccatttcggccgcgccatatagcgagggatgcagcgccaccggcggcacgaacacgcggatcttcacattcgggtatcccagaatttccgaacgcagccggccttcaagcacggtggccagctcgtcgccgaagtgcgtccacagtccgcccaacagcaccgtatcgacatccaccagattcacggcggaagcgatggcggaaaccagcgcatcagcggcctgatcgaccactttggccacgtctggatcccccgcacgccaacgctggaggaatgtatcgatggcctcgctgctggtggcatccccatcctcggcaatgccggcagcctcgaccaaggcgcgacggcccgcaaacgcctcaaggcacccgtggcgcccgcagctgcacaacggcccatccatcgccacggacagatggccgatctcgccggcgaatccgtgcgagcccatcaccacttcgccgtcacgcaccaccgcgccgccgatgccgatatcggtagacaggtaaataaaggaatccgtgcgatccaccacattcaggaaggacgcacgttcggtggcataccccggaatctgagcgatggcggccatcttcgcttcgttaccggccaccacatccagccggcgtaccacgttgaaccgggtgaggttgacgttttcccaacccagattgcgggccaccaacagccacatgtcgtcggtgacgatgcccggcagcgcaagcccggctcccaccactttgcagccacgtcgtttgagtcggctttccaacggaaaggtcatcgcatcgagcttggcgaagatctcgtacgggtcagtgccggtcatatcctcactcacccactcctgaccgagagtgtcgccgttcagatcgagtgccaggcaaccgtagccatcggtgttgatctgcaggccgatgccggcgatggacccgccatgaatctccagcggcgtgctgggccgcccatatgtggtggagacgaccggctcgccttcctgcaccacgccactatcgatcagcatcgaggccaacagcgaaagcgtggccttggtcaggcccgtttccttggccaagtcggccctgctcatgggtttctccgcgcgcaacaaagtgtcgagaaccaccgacaaattatggttgcgcagatcctcctgattgatcctgcgtagacttgccataggctcctacctccttgcacccctagtctcgaacgccgcacaggcgctcacatccgtctatcgcacaatgatattgtgcgtcaaacgattgaaccagatacgcaccctcgcgtgtttccgtttgcaatcatacactgcaatacagtatagtttaatcgtctaacttattggttgtggcgcgccgagacttgcaagcgcgaccctcatcgaggaggaatgcatgacgagagtactggttgccggcgtagatacgtcaactcaatcaacaaaggtccgcattacggacgccgccaccggcgaacaggttcggttcgggcaggccaagcacccggatggcacctcggtcaacccggaattctggtgggaggccttcaccaaggccgccgagcaggccggcgggcttgacgatgtcgcggccctcgcggttggcggccagcagcatggcatggtcattctcgacaagcagggcaacgtgattcgcgatgcgatgctctggaatgacaccagttccgccccgcaggccgccgccctgatcgacaagctcggtgcaactccggccgagggcgacgaaccggacgacgtgaccgcccgcggcaagcagcgctgggtcaaggccgtcggatcctcccccgtcgcttcctacacgctgaccaaggtggcgtgggtggccgagaacgagcctgagaacgccaagaagattgccgccgtctgtctgccgcacgattggctgagctggcgtatcgccggctatggcccggtggccgagggcgaggacgctcatctcgaagccctgttcaccgaccgttccgacgcttccggcaccatttactacgatgccgcgcatgacgagtaccgccgcgatctcatcgccatggtgctgacccccgccgagggcgaggaagccgccaaggcccacgccgacgccattgtgctgcccaccgtgctgggcccgcgtgaggcagccgccgtcaaggccgaccccgccattgccggcaaggacgttgaaggcggctgcatcatcggccccggcggcggagacaatgccatggcctcgctgggcctcggcatggccgtgggcgatgtgtccgtatcgctcggaacctccggcgtggccgcggccatcgctgaaaacccggtgtacgacctgaccggagcgatttctggctttgccgactgcaccggtcattatctgccgcttgcctgcaccatcaacggttcgcgcattctggacgccggtcgcgccgcccttggcgtggactacgacgagctggccgaactggcctttaaggccgagccgggtgccggcggcatcaccctggtgccgtacttcgacggcgagcgtacgccgaaccgtccggacgccaccgcctcgctgactggcctgaccctgcacaacaccaccaaggagaatctggctcgtgcgttcgtcgaaggcctgctgtgttcccagcgcgactgcctcgagctgattcgttcgctgggtgccgagatcaaccgcatcctgctcattggcggtggcgcgaagtccgtggccatccgcacgctggccccctcaatcctcggcatggacgtgacccgtccggccaccgacgaatatgtggccatcggcgccgcccgtcaggccgcctgggtgctgtccggcgaggccgaaccgctgacctggcagctcaccatcgagggcgtggagaccggcgagcccaccgaagccgtgtacgaggcatacgccaaggcgcgcggctgatacgctgccagcacaatccatgagataacaactgaataacgattcctgatgaatgccgccatggcaagcatcgcgaagagccgctgttataccgcgctcctcgctgaagcacacatggcggcatttttcgtttcccacgcaatccacaaatacggctataatcaagtcgtttgaacaagtctggagattcttctatgaacgaccgctcccgtatgatgctgtacgccctgaccgccgtcgcatgcgtgatttggatatggcaatccgccaaagaagcaatggccgatggcacgatgatcagcacctcaaacatcatctttttggtatgcatcggcattgccgccgtctactgcgccgccaacgcattgatattgtggtggcgtcaacccagcaaggaggatgcggagaacgatgacgccgcggatacgcctgacggtaccgataccgacaccgcagatgccgagggatccgaggacgacaccgatgacgatgtcgaaaccgacgtcgcaaccacggatgccgatgcaccgccaaccactaatcgccagtaaccatcgttatcgttcgcccgaatcaagcgaatcatcccacttcagcaaaggaacattatggaagtaacaaccgtgtcaaccgtgatcagcgtggtgctgggcgtcatatgcgcgccttgcggcctgtttctggggctcgttcccatgaaggccgatctggtgaccgccaagcagtcaaaggcctcgcagatggtgagcttcatcgttgccatagtgttcatcggcttgctggtcgcaggccatgatctggagacctgggccatggtaatcggtctggtcatcggcttcgccgttgccaagattcccgcgctgcatgcctgggctttgcacaagtggccgttcttcgagcccaagaaagcggctcccgctcccaagcgcgtcaagaaagccaagaagaagtaagctctggccttacctattcgctgaaagcgggatatcgacatcggtatcccgtttttcattggccgtacatatccgctgaggcacatcgccgaatcatattgtctacaccccaagtcagggctgatttcgcgaagaacgtacaccgggatccatccatcgcgacaaacggaaaagggacgctgcgtgcaacagcgtccctttcggaggaggaatggaactcaggtccatccccgtggccaccgggcgggcccggaggccaggtttagctcagcctttctttttcttggagagcaggtcgtaggcgacggcggcgatgacgacgaggcccttgatggtcttgacccaggcggcgtccacgcccatgatggacaggccctggttgagcacgcccatgatcagggcgccgaccatggc

SEQ ID NO: 2304 - DNA, 24001 bp, Unknown
  R119_18m  MAG No. k141_24422
cttctcccagcgggaaagcgcctgttgggtgacgaacagctcgtgcgcgaactgcgactgcgtaagacctcgctcctcgcgcacgactttgataacctgaccgatcgacatgactacctcccgacatcggaaaacgattcgcgcgtctcgctgtgcgcttgctgattccagtctaagggcatgtcccgttcgccaagcgcgggtacaacaaaccgttgttcgcgcttgtatcccggaggaagaaacagctcggtcgaacctatttcctctccacccccttcaagtctcccggttcctctgactcctttgcgagcgccgcggatgggatgagcacgcttacgtatggggttgcgccagacaggacgtcgtcgtagaagcgctgtttggcgtcgatgaagtcgatggaatcctggatttccgcgagctgctcgaccagccgcgcccgcttgccggcgagcatctacttgcgttcggggatgctcggctcgtggaggagcgtaaggagcgcgagtaggggttcgcggctttgctgcggtctctccctcacccggctatactgggagctccctcgtcagagggagcttaaattcggtctggttataggcccatgggcttcttgggctttttgtcgctcatgagcatgaggaagctgcgggactgggcggtgatcatgaagcccgcctcatagctcagttccggcccattcgggttgtgcgtatccacgaccagctgccatttgcggccgtatcgctcatccggcagggtgaacataatcggctcgtaatgcgcgttgaagatcaggatgaagtcattgtcgaccatccggttgccgtaccagtctacctccggaatatccgaaccgttcagatagatcatcatggagaacgcatgcgtgttctgccagtcgtccatatccatgatcgaaccggtgtggtcgaaccattcgacctgcggaatcatgttcgaatcgtcgccgggctcacggcctgtgaagaagcgacggcggtgcaacaccggatgatccaaacgcagatgaatgagtttggaaacgaaggcgagcagttccttgcgtcccttgtcaagatgccagttggtccaggagatctcgttgtcctgacagtaggcgttgttgttgccctgctgggtgcgggccacttcgtcgccaccgcaaatcatcgggataccctggctgaacagcaacgtggcgaacatgttgcgcatctgacgctgacgcaagtcgttgacgtccggaatattggtcgggccttcaacgccgcaattccaagagcgattgttgctctcgccgtcgcgattgccctcgccattggcttcgttgtgcttttcgttgtagctgaccaggtcgttcattgtgaaaccgtcatgcgcggtgatgaagttcacggacgccaccggtcgacggccgttgacctgatacagatcggaactgcccatcaggcgcgaggcgaattcgggcagcgtggagggctgcgagcgccagaagtcgcgcacggtgtcgcggtagcggccattccattcggaccagctggacgggaagccgcccacctgatagccgccggagcccagatcccacggttcggcaatcagcttcacgcgcgagatgatcgggtcctgctccacgatgtcgaagaacgcggacagcttgtcgacctcctggaactggcgtgccagcgtggcggccagatcgaagcggaagccgtcgacgtgcatttcggtaacccagtagcgcagcgaatcggtaatcaactgcagcgcgtgcggcgagcgcataagcagcgagttgccggtaccggtggtgtcgaagtagtgctgctggtcgccttccaccagtcggtagtaggaggcgttgtcgatgcccttgaagctcagggtggggcccatatggttgccttcggcggtgtggttgtacaccacgtcgaggatgacctccatgccggcgtgatggtaggccttgaccatggacttgaattcgttgacctgctcgccgcgttccccggaggaggagtaggcgttgtgcggcgcgaagaagccgatggtgttgtagccccagtagttcgacaggcccttctcctgcaggaaggagtcgttgacgaactggtggatcggcatgagatcgatggcggtgacgccgagcttcttcaggtattcgatgacgctcggataggccaggccggcgtaggtgccgcggatgtccggcggcacgtccatgttgaggttggtcatgccgcgcacatgcgcctcgtagatcaccgaatcgtggtacgagatgtaggggtgctggtcgttgccccagtcgaaatacggattgatgacggccgacttcatggtgtgggcggccgagtcaaggtcgttcatcgccgaggtgtcgtccgggcttttgaaccagtaggagaacaggctttcgtcgccgtcgatgttgccttcgatggccttggcatacgggtcgagcagcagtttgttggggttgcatctgaggccgtgcatcgggtcatagggaccgtagacgcggtagccgtagcgttggccgggctggaggccggggatgtagttatgccatacgtatgagttctgttcggtcatttcgatgcgcgtttccgcatcgtgctcgtcgaacaggcatagctcgactttctgcgcaacctgtgagtacagcgcgaagttcacaccggcgccgtcatagctggcgcccagcggatacattgatccaggtctgatctgcatagttttcagtatcccactttcttgtgtcactgatgtgccggggagttgaacgtcaggagaacagcgacggcttgtctttgtcggagttcctggcgatgagtctgcgtaacgcctcatgctggatggcgatcatcgaattggatgaggtgatgcgcgtggcggcaaggtcgctccacggaatccacgcggattccacgtgctcgtccgcgtcgaaatggcgctgctcccgtctgaacgggcccaaatgcaacaccatgatgtgggccagttcgtcggtcatgccttcggacgagtagaaatcgcccacgaagtcaacacccatggtgtcacggtccggcaccacgccggtttcctcggccagttccctcagggccgcgtccatgatgtcctcgccctcgtccatgagaccggcgggaagcccgtaggcgaacatgtccgatccggcacggtattcgcgttcgatgaggtaacggtcggtggacatgtcgtgcacgagcatgaccacacagggggcgtgacgcagcacctggcggccgatctcgtgttccttgccctgcttgtcggtcagagcgatgcgcatgtcgtccacgtggaagatgcgcccggtataaacggtttcgctactgatcactttggcgggcacgtccatgtcgatgccgtccgaggaggcgttcagcttatggtcgagccgatgctccagttgttcctgcttgcttcccccaaacatgtcatctcctcggaaaaaacgttttcgccacgtcactatagcgccttaatcccgatgcgcggtaatggacagcgtccatggatcggtcgtgtcgtggaaccactcgacttcaggccttgctccggtcgcttgttcgatggcggctggcacgtcatcgatcgcgtagttgaaccacatggattcgatggcggcatgaggggtgttgatgaagcagggacgcacatggctctcccccgccattccacggccgagcatgatgccttgggccctcatacgggcttcataccgggcttgttcgatggcgtcggtcaccgggtggtgacgcaaatcgctggttacgtacacgtccgcaccggtggcacgcacctcgttgaacagggagtcaccggagccaggcagaatggccacatactgaacaaaagtgtccgaatcgccgcatacctggatgccgagcgcggtggtcatgccatgatcggacacttcgtcgaatacacactgagcgaaatccttcagggcaacaggcttcggcaaacgacccacacgccccaagccgaccggatgagaggcgttggcatcgtcaatcggcacgagtggtttctggtcgatgagtccgaagtagtcggccgccgcctgccccacgccgcgatacgcagcgtcagcattggtgtgccctacccacagcccgcagccgtgctggtagagcctgcggacgatgtcgccccggaaaccgagtccgctcgtctcgtgtacggaacggaagaacaacgggtgatgggtgatgagcaggtccgcgccggtggcgatggccttgtcaatgatggcggaggtcgggtcggcggcgaacacgatgcggtgcacgtcgtggctcagatcgccgacgatgagacccggctcatcccattcctcggcgtagcgcaatgggtacagggtctcgagaacgtcgatgacttgcttgagattcggcatatgtcccattgtagtgggctattgcggcaagggactcattctgcaattgcggacaagccatgctcgtgctcttcattgctcgactatcggctcgtcttcgcctacaaacaatccactggactgtttgctcaacggctcagcacccctcacccgaggggagctagaaattgtcagtgtgcggcgagctgccagtcggaaccgatgccgcacgatacgtccagcggcacggcaaggtcgacggcgtgttccatggcgttgcgtaccagttcggtgacctggtcgccttctcccggcgcgatttccactaccagttcatcgtgaatctgcagaatgatacggctcttgacgtgggcctctgccaaggtctgctcggcgcgaatcatcgcgatcttcatgatgtcggcggcagatccctgaatcggtgcgttgagtgccgcacgttcggcggcctcacgcgcaacacgattggtcgaatgcagggccgggaagtagcgacgccgtccgaaaatggtttccgtataccccttctctcgggcattggccaccagcgattcaaggtaatcgtgcaccttgccgaaggtatcgaaataccggtttttcaacgcttccgcttcacgtggcgcgatcttgagctgctgggcgagaccatacgtgctcagaccataggccaatccgtagctcatggcttttacgtggctgcgctggtcgccggtgatctggtcgaccggcagcttgtagaccatcgaggccacgtatttgtggaagtcggctccggagcggaacgcttcgatcagcgcctcatcaccggacagatcggccatgatgcgcagctcgacctgtgagtaatcgcagctcatcagggcctcgtacccctcccccggcacgaacacgccgcgaatctcacggccggcggcgttccgattggggatgttctgcaggttcgggtccacggagctcaatcggccggtggccgcgacggtttgctcgaaagtggtgtggatgcgctcatctgatgtattggtggcatcgatcagcgtttggacgatctgcttgagcttgttgatctctcgatggcgcagcaacgccccgaggaaaccgctggcccgctcattgtccactgatttgacatacagatcctgcaatgcggccgcattcgtggtgtatgagccggacttggtgcgtttggtgggtttcaaacccatatcttcgaacagcaccttctgcaactgcttgggactttgcaggttgatttcggtgccggcatactcccaagccatttcctgcgcctgacgagcctcggcggcaaactggtcacgcatggaaacgagtcgaacgctatcgactttggctcctgtgtgctccatgccgtgcaatacgcgggaaacaggaagttcaatcgcgcgcatcagccagcattgttcgcgctcgtcgataatcggcccgagcgtgacggcaaggctgcggataatggccagatcacgcagacgatgttcgttcggatcttcttcgacctgatcgtcatcgaagtccaacgtgccttgcgaaggctgttcggtttcggtgaagtggatgtcgaggaagtgctcggccgcctgcttgaggctatcggcgtggaaatccggttgggtcagatacccggcaagcttggtgtcgaacatcggcaggtccatgtcaagatctaccgcgcccagaagatgcagcaattctttatacccatgcacgatggtgcgggagtgttcgcttttcaggaaccgcgcaagctgtgctcgcagggtatcggtgattggaaggggcactatggccgctgatgttgccgtggcaacggcaatggcttgtgccgtggcacgacccggcctttcgtcgccccatgcggccacggtccaagcgtggccgaccgcgtcgccgcagacggtatgccgctgcgatccatcgccatagtcggaaaccgtgaaatcggcgatttcaccgggaactttgacctcggcgcgatgggccttgacccattcgtcgaactgctccgaagaggtgatgctcgtgggttccggcaggttcagatcgagactgttatcctgctcgtcctgttcattattcgtagactcgccggctccgtatgtgttggaaaccttggcaccggtattgaaggttttcagtacacgactcctggtacgcggtccgaattcaagctccttgaacagggcgtcgatttgtgccacgtccacggtgccgaatgtcagatcctcgatatcgacgcctagatcgacgtctcgtaccagtgcgttgactttgcgattgagcttgacctggtcgatattggccctcagcgattcgccttttttgccgccgatttcatcggcgtgctcgcaaatgccgtcgagggaaccgaattggttgatccacttggccgcaaagccatcgcctacaccgggcacaccgggaatattgtcggcggtttcgccgcggagcgccgccagatccggatattgtgcgggagtgactttgtatttgtcgacgatggactgcggcgtcatatgcttcaggtctttgaagtgatgacccgggtacaacacggtgacgttgtcatccaccagttggaaggcgtctcggtctccggacaataccagtgtgtggtagccggccttgtctcccatggtggcgagggtggcgatcacatcgtcgccttcgaatcccggcttctcgatgtaggtgacgccgagggccgtgagcatgcgttgaatcaatggcagctgggtgagcagctcttcgggagccgcctcacgggtgcctttgtattgcggaagcatctcattgcggaatgtgccgcccttcacatcgaaggcgacgcccagatggtcggggttctccgcatcgatcacctgcgcgagcatggtggcaaaaccccagacggcgttggtggcctggccgctggaagtactgaagttgtcgaccggcagggcgaaaaatgcacggaaggccagcgagtggccgtccaccaccagcaatgtttcattggtgggtacggtcacgctggcctctcccatagtgtgtttgtgttgctttacgactcagcacggtgatgccgataatcagcgttcgcccgaatcagaaggcttcggatcgccgtacttggcgatgatggcctgagccaggcgcttcttggggatgcgctggtccatggaggtcttctgaatccaacggaaggcaccctgctcggagaagtcagccttgtccatcagcagacccttggcgcggtcgacgagcttgcgctcctcaagcgtgtcttcggccttcttgagcttctcttcggtttccttgagctggtcggtggtttccttgagcttgcgttcgctgcgctccacgttgtccagcaaatcgttgatctcggcgaaacggcccatggccacctcgagggtcggcagcaacttggattcctcgtacggcttggtgacgtatgccatggcgccggcaccggtggccttcttcaccagatcggtctgggagaatgcggtgagcatgacgacaggggcgatgttctcatcgcagataatgccggcagcggcgatgccgtccatacgcggcatcttgacatccatgcacaccacatcagggcgatacttgcgggtcagttccacggcttcctcgccgttggcggcctgaccaacgacctcataaccgttgtcttccagcatggcgaccagatccatgcggttcacggcttcatcctcggccacgacgacggtacgcggaccatcctcggccacggccttgcgctcagcaggttcgctttcatcggccacggccttgagttcttcgtcggtcagcacctcatcgacgttgatactcggttcttcggacttcttccttgcagccatgccaacctctttcttgaattacccaacaatggggttcgtaataatttcagcgaactcctagctaaagtgccctcggtgggactcgaacccacactgcgcagattttgaggctgcttcctctaccaattgggatacgagggcgtgcctaagcactctgaagagagtagcataccgattcgactcctgcgacacaagacacgcgccagtcctccatttccccccggtaaaacaggcgaaacacgtcgatatcgtggacggcgtacccgtgtgttgcccgttcttctgcgtggtttcaccgcttacaatgggctgtagtttcgatgtatcgcttttgttaggagggcttatgagcaacgaaacttaccgtcagttcgatccctggcgcccctctccggtcaaggagatttcccgtagacagattgtggagacgcattatttcaatgtcgatcacgtctcctatgagtcgaatcagatcggttcgtttgaacgctactttgttcaggagaacaatggcgacactgtggctgtgctggccgtcaccgatgacggcatgattccgctggtcgagcagtatcgcatcgccaaccatcgttggacgttggagattccggcaggccacgccaacaacccgtccgaacgcccgaccgatgtggctaagcgcaagctggccgaagaggctggtttcgatgcctccaagcttacgcagttcacccgttttatgaacacgccgagctattccacccagcacaccgcaatcttcttcgccaccggacttaccccggcttcccgtcaggaaatcggcccggagactccgcgttccgacgtgcgtatggtgtcggtggacgatgcctatgagatggtggtcaatggcacgattgtggatgccaagaccatggtcgccattctgcgtctgaagagcggcacgctcgatcatctcaacgactagtcaccacgctcgatcatcgcggtgactacgtgccattgcaatcaccgcacaatcgcaacataacggataacgaaagcccccccatccactttctggatgggggggctttcgcgtgctatgtgctagctgtcagcagctaccagcggcctgaaatcagtcgcaagcgccaacggtgtgcacgtagatggagtcggtgcggcccggctggtgatcgccctgagcagagctcaggatgacgatcttgtcgccgtcagcaaccttgccggcgtccttgaggatcttgtccgtgtagatcatcagatccttgcgggacttgtcgtggtagtcctccttgagcaggaaggcttcggtgccccaggacagagccagccagtggtaggtgtgctcgttgctggtcaggccgtagatcggggcggccggacgctcacgggagacgcggtgcacggtggcgccggtctgggtgtaagcaacgatggccttggcgttgagcttgtcggccaggtccacggcggcggaggagacggcgccggtggaggacatgtcgaggttcttgagctccgggatgcggtcgaagccgtggtcggtggcgtagccggagatgcgcgacatggtggccacggtcacatccgggtacttgccgacggcggtctcgttggaggtcatggtggcgtcggagccgtcgaggacggcgttggcgcagtcggaggcctctgcacgggtcgggaccggggagttcaccatggagccgaggacttcggtggccacgatgaccggcttggcatactggcgggccagctcgatgatgcgcttggtggccagcgggacctcttccagcgggcactcaacggccatgtcgccacgggcggccatgacaccgtcgaaggtcttgacgatctcttcgaggttctccagagcctgcggcttctcgatcttggcaacgatcgggatgcgacggccttcctcgtccatgatctcgtgggcgcggtcgatgtcggtggcgaaacgcacgaaggacatggcgatgatgtcggcaccggtgcggatggcccaacgcaggtcagcctcatccttctcggtcagggccggcagggagacggcgacgcccggcaggttgatgcccttgtgggaggacacaggaccggccacgacgaccttggtgtacacgttgttgccctcgaccttggtgacctcaagacgaaccttaccgtcatcgatcaggatcgggtcgcccgggtggcaatcgcccggcaggcccttgaaggtggtggaggtgatgtgctcgtcgccctcgacgtcatcagtggtgatgacgaattcctggccgagctgcagctgaaccttgtcttcgccatcggcgttcttcttgaaccaaccgcagcgaatcttcgggccctgcaaatcaacaagcgcggcaacgttgcgaccagtggcttcgctggccttgcgcacgttgttgtagaccttgaggtgatcctcgggggtgccgtgggagcggttcagacgagcaacgtccataccggcttcaacgagcttcaggaggttgtcgtaatcctcggtggaaggaccgatggtgtctacgatcttggctttacgcatgaatgcctgcctattcttgttcaatttggttcgaggcacgattgccccatttgccgaaacccagtctactagcgcgagccgactcatgacaagttttcttcacggtgtgttgtgagcgctcacattgttgtgttgactaggtttaagggctgtattctctaacggtttcaggccttctcggcgctttccatgctcttcatcttgatcacggaagccacggatgcgccgccaattgcgaccacaatcacagccagcgacagccatgtgggcacttccggcacccaatggatgccttcgccgccgttgatgaacggcaaggtattgccgtgcagggcctccatgatgagcttgacgccgatgaagcccagcaccacggacaggccggcaggcaggtagacgagcttgtcgagcagagcacccagcaggaagtacagctgctgcaggccgagcagggcgaacacgttggaggtgaacaccaggaacggatccttggtcaggccgaagatcgcgggaatcgagtcgaaggcaaacatgacgtcggtggtgccgatggtcaggaacacgatgagcatcggggtccagtaacgcacgccgttcttggtggtgcgcagcttctcgccgtcgtagtcgtcggtgatcttgatgatcttgcgcagattacggatgatgccgttttcgtgatattcctcgtcctcatcgccgccgagcaccagtttgacggcggtgtagatcaggaaggcgccgaacaggaagaacacccatgtgaagcgggtgatcagggccgcgccgatcagaatgaaaatgccacggaagatcaaagcaatggtgatgcccaccgaaagcacatacttctgaatctgcttgggcaccgcgaagttcgacatgataatgacgaacacgaacagattgtcgatggacaacgagtattcggtgagccagccggaatagaactcgatggcgggcctggagccggcgaagaaccagatgcatccgccgaagatcagcgccatgaccacgaagaaggcgatatgctgcacgcattccttggtggagggcacatgcggtcggcgcccgatgacgaacaggtcgacgatgaagaacagcgcgagcaccacgaaggtgatgatttcaaatgcgagtggggtttctgccatgattccctacactaacttatgtatgtgacggttttgggggccgttccggtagcgctgatcgccaggcagtcaggggatgtgttgttcgacatgctccgggccgctcaggccaagtctttacggtcgaacaacgcatcccctgactgcccgcctcgggtatgggaatttggttacttgttggcttccgtcatttgacggagttcttttttaaggtctcggatctcgtcgcgcagacgggccgcgagttcgaactggagttgttcggcggcggtgtgcatctgttcgctcagctggcgaatcaggtcggcgaggtcctgcgcgggcaggccggccttcaggatctcctcgtggcgtttgtctgcctcgttgggatcgagtaccggcacgcccaggtgtgtgttgccggccttgcccgcgttgcggtagccaccttcaagcaaggtctgggtgtccacatcctccttggcgagcatgtcgttgacatcgctgatcttcttgatcaggggcttgggatcgatgccgtgttcccggttgtaggcaatctgcttggcgcggcggcggtcggtctcgtcgatcgcctgcctcatggcctcggtggtctcgtcggcgtacatgatcaccacgccggacacgtttcgggccgcacggccgatggtctggatgagcgaacgataggagcgcaggaatccttccttgtcggcgtcaagaatcgccaccagcgatacttccggcaaatcgaggccctcacgcagcaggttgatgccgacaatcacatcgatcttgccttcgcgcaacatgcgcagcagttcgacgcggcgcaacgtatccacatcggaatgcaggtattcgaccttgatgccgcgttccagcagatagtcggtcaaatcctcggccatcttcttggtcagggtggtgaccagcgcgcgctcgttcttggccacacgggccttgatctcggcgagcagatcgtcgatctgccccttgaccgggcgcacgtcgatcttcgggtccagcaggccggtcggacggatgatctgttcgaccaccccgtcggacaagcccaactcgtagtcgccgggcgtggcggacagatacacggtctggccgacgcgctgcaggaactccggccatttgagcggtcggttatccatcgcggaaggcagacggaagccgtgttcgaccagcgtgcgcttgcgggaggcatcgccctcgtacatggcaccgatctgcggcacggtgacgtgtgattcgtcaatgaccagcaggaagtcatcggggaagaagtcgagcagcgtgtgcggtggggtgccggcggcgcggccgtcgaagtggcgcgaatagttttcgacgcccgagcacacgcccacctgggtgagcatttccagatcgtaggtggtgcgcatgttgaggcgctgcgcttccagctccttgccttgcttacgcagttctgccaggcgttcgtcgagttcctcgcgaatggttttgagcgcgcgttccatgcgttcggggccggccacgtaatgggaggccgggaagatgtggatttcgttttcctcgtcgatctcgtcgccggtcagcgggtgcagcgtggagatgcggtcgatctcgtcgccgaagaattcgatgcgcacggccagttcctcgtagacggggatgatttcgaccgtatcgccgcgcacgcggaaggtgccgcgcgtgaaggcgatgtcgttgcgcttgtactgcatggccacgaaccggcgcagcaggtcgtcgcgattgatctgctggccttccttgagaaacagcatacgcccggcgtattcctcaggagtgcccaggccgtagatgcaggagacggtggccacgaccacgcagtcgcgtctggtcagcaggttggccgtggcctgatggcgcaaacgttccacatcgtcgttgatgttggagtctttctcgatataggtgtcggtctgcggtatgtaggcctccggctgatagtagtcgtagtaggaaacgaaatagctcaccgcgttgtcgggcatgagctcgcggaattcggcgcacagctgcgcggcgagcgtcttgttcggctcgatgatgagcgtgggacgttgcagccgttcgatcagccatgcggtggtggcggttttgccggtgccggtggcgcccatgagcaccacgtcgttctcgccgttctcgatgcgcgtgaccagttcctcgatggccttcggctggtctccggatggttggtacggcgatttgaccacaaacggcttgtccacacgttcgatgttgaatcccatgcgctgtttccttccgattcacgctgtatcccgatgatatatcggaatatacgctaggcaactccaatacccgtcttcctcttggacgcgcagccaaccaccgctccgcgtaattgattgacacagatgagacattccaaatcccatgcccaatgttctcggagattccgccaatgctccatccgccatcttggcgggaacgtcagccaccgatacgtacagtccgtcttgccgcacttgtatggcgagcacatacccttgttcgcgatccgcgtgcttggcgatattggcaaacgtctcttccagcaacgaccgcgtcaactggatagtcttctcgtcaaaccgactcaggagatcgaagggatcggacacaaccacctcgcctcggaaaccaagcgttgcgagttcccgccggtgccgttcgatctcggcctcgaatcgacctgcaccgatcggaacgatggcttctccggagcgacgcgcatggcatcgcgggattcgcgcagtaccgacattgtgctttgcgagaaccgctatgacatcatgcgtctgatcgagcgcccgttgagccacttcgcgcaacagtggcaagtccatcgactctccttgcgaagggtgttccgacatgatcctgtcgatgctcatgatgagatatgagagatcattggtcgtcgcatcatgcaaccttgccgccaaatccaacgattcggccctgccacgcgcttccgactccctctccccctcacgatgatgccaattcagcagcagaccgattccaacgcacgccaacgccggcatgacggtccaaggcacaacggacaccaacgccccggcatcccaacccatcggcaacccatactgccatatcagctgcgccacgcgagatacggtcacagtcaccgccaacaccacgccgcaccatatgcgttgataggagaggacgattaatggctcggctatcaccacgctcaccgacatggacagatccaccggcaaggggaacaccacgcaccatgagatcgccaacgcgatattgccgccgaacgggaatgccacgcagagcaacgacaggatgacgaacaacagacccacccacagggcccacgcatcccaaaccggattgatacacgattcgatgaccgtatcagcggctatgcacaaggcgcaggctagcgccgcgatcttctcgccatgccaagacttcccgaaatcgcggaagcgacgtctaagaaaacggctgctgtcacagaacatggtatcgctcacagtaatcaaggagttcgccgcgcctcgtcaccccgaccttgcgcatggctcgtttcacatagctgtacacagtttcgacaccgattcccaagcggcgcgcaatttcaatggtcggtacatgatgtgcatagagacgcaacaccgccagctctcgatcggagaagagcctggcaccatccgcttccggctgtgcggcatccaccgtatgcaatgtctcttcaaggctatgcaaaccccaaccatgagggtatgttcccccgtcaaacaccgatttgaccgcctcgcgtatggtcgctgcgaaatctcttttcgaaatcaacgcttgggctccgcaacacgcgatatcctcaccataggttgccaggtcatacgaagtgactacgatgacgccaacctgcacgttccgctgtcgaatacgttccgtcagccgcactccgttcagcccgtccatcatgagatcgcaaataaggatgtccggcttccgcggatcgaacagacaacgttccaaggcaagactgggattatccgtaacccatagcatatgcgcctcgggaatcgtcctgccaataagcaaagccatcatctccgcagagcaacgatcgttgtccaccaaggcaagccgaatcaggcgcccgttcttcataagtaccccctccccaaatcgcctccgtcaaacgaaatcgtaacactgtgacgattcccgtcacacagacttcgttcgctcctcattggcgtcttaccgtgttatatgcggcaaaacagccgcgcaataatgtgcggcgagcgaacttcctatcgtccgccgcacaaacacattgttaccgggaataaggtgtatcatgcactggacttataaaatcgccagtatattggccgtggctctcatcactctcgcagcaggattctatgcgcagaataacgaagaaacctatccctccggccctagctacgatattggaatttccgacgcgcacgggcagactctatcgacattgaccggtctcgcagcgacccatcatgtcggactcgcgagagtctcctatgagccggacggtcacggtaccaacagacgcgtaatttctattttcggcgcattagacggcaacggcatgcatgcgaattcgccatacccggattatgggttcgggccgcgcacacgtgtgcaacgcggagacagattcaccgacccattgggaagatggcttctctatggatcaccacgggataccgcttcagtagccaaatccatacggcgccaaggattcgaacttaacagagcaacccccatcggcatcacacaaatcaccaaacaattcttctccaattccatcgcccaagtcatattcgccggacttgctgtagtatttgtgtccggcgcgctttccgtgtcgacagcttcacgcgtttgcgcgatacaagccttgcatggcatgagaacaaccggcattattatgaggcaattcctgcggcatgcgttctttttcatcatctgcgtctgcatcggatggatgacttggatttccattggtgcgatcttctggcctttcgcttctcccttaggattcgccggtcaggtattcctctccatcatcatcgccacaacgtgcatggcattggttgccttgtcattgtcgattgctctagtaagggttctggtgccgaacgcactcaaattaatccaaggaaagcgccctttacgttttctcatggcttccggctgcatcatggcaatcatcgttctcgctctcagctctgccagtttgaacgttacgaacttcaaatggcggcaatcccaaacactgaaaacaacattggagcatcaattgtcatccaacgacggattccaattgcaactgtggtatagcagcgatcaaaaccgagctcgttccatgccctcatggaacgacttcgtcgaacaaacttcccaatcagaacatacgcgattcgcctcattccgggtaggatgcacgtgggtggatagctcgcaagacccacagccctgcatcctcatggattcccgtacggcaaggctccatcatcttatacgaaacaacacgacacttgcacgaatcagtgtgattatgcccgagaatgaacaatggaacagcgaatccattacgaacaatgtgcttcgcgcatactcattcgagcaaagtttggcggcagaagagggaaagagtctgcccgccatcaatcgcacgagcatctccattgaatccagaccaagagatgctgtcttatcggcatttgacaccccttccaacaccgatggcctttcctctgttcctgttgttgtcattgacccgtcactgctctctggcgataccactacatcgatggtgtccaccggcggcatgaccttcgattacagctcccgccatcagctgctcgaaatcctacgggaaaagggcgtggactctttggtggcttcggtcgtcaatcggcacgacgagatacaaactcgtttggcacgaacaactcaggaaatgaactatttttccatcacagcttgcatatccataacatgtctgctgggcggcgcaatcatggtggctttgacactatgcacactccgacgtcaaattatgttcgtggaatatatgcatggagcgccgtcatatctccgttttcaatcgatactgttcctagcagcggcgttatgcagtgcatctcttccgatccagttgctcataggaggttacaacgccgtttccacgacctcggtttccttactattcatcgtcgtttcgctggcaaccacagtgctttacgattcgcggctgcgcgccgacagtatcaaacatccctgatcgccatccacaaacctgtatcagcaaccgcttaccacgtaaggaacatcaagcatgagcgccttattgatcacgcataatctgacatatcgaatcgacgaccgcaccttatgggaaggactgaacctgacattcagtcccggtgacatggttgccctgactggagaaagcggatgcggcaaaaccactttgttgaatgtcctaggtcttttggaagagccaagttcaggaacaattacctatgatgggcaaacaattgcctccagaaagggccgacggctcatgcaccgcaacgtcatgggattcatgttccagaattacgccctggtggagcaatggacggtgaacagaaatctgattctggctctgcgcagcgtcggaataccatcggcagatagaagtcggctcatcagacgcgcattgcgggccgtgaatctgacgggctacggcaatagacctatctacacactcagtggaggcgaacaacaacgagtcgcaatcgcgaggcttctcatccgtcaatcgctgcgcgtcatactggcggacgagccaacagcggccctcgatgccgacaaccgcgccatggtcatgcgtcacctgcgtgatttcgccgacaacggagcgatcgtgatctacacgacgcacaacgaggagaccgcggccctcgccgaccgcatcatcgcattatgattccgccagccactgttcgtacagcgcatcgacggcttcgagcattcgacccatcggctgcgtggaatcgatcaccgcgtcggctatgacacggcgttgttccaggctggactggtggcgaatgcgcgcaagcgcatcatctcgcgtcatgccgcgggtcgacaccattctgtcgacccgtacttgttcgggcgcttcgacggtgacgatatggtcgaatcgcatgggcatggcgtccaggacttccgccaacagcggaacatcatgcacgaccacggcatccggattgtccgcgaccgcctgccgctcccgcgacagcgcaagatcatagatcaacggatgctcgatatcgtccagtttcctccgcatccgttccgagtcgggcccggcgaacacgtgctcggcgatccatcgccggttgagccgcccctgatcggtcagcgcgtcggggccgaaacattccgctatacgacgaagaccgacgccgcccggttccaccactcggcgcgcgagctcgtcatagtcgataagcgccgcgccgagctcccgcagtcttgtggacaccgtgcttttgcccgccgcaataccaccggtcaatcctattcgaatcatgctcccccatcatgccatgtttcgaggttcatgcacacaacggcaaaacccggcccgccgaagcgagaccgggtattgactatacgtcaggcgtcagtcgcccgatggcaaactcacttgccgagcagctggtcgcgcagggcggcgagctgatcggagtcggcgagggtaccggtagccggagcggcggaagagtagttggaggtctcctcgaccggcttctcttccttcgggccctggccgtcggcggctgcggattcggcagcgttctccagctccttggccacgaactccttgtgctcctcccacagctcgtgggcggcggcgtactgggactcccactcctcgcgctgcttctcgtaaccggcgatccactcgttggtgttcgggtcgaagccttcggggtacttgtagttgccctgctcgtcgtactcggccggcatgccgtagatggccggatcgaagtcctcggaagccgggtcgacggagtcgttggcctgcttgagggacagggagatgcggcgacgatcgaggtcgacgtcgatcaccttgacgaacacggcctcgcccggcttgaccacggtctccgggttctcgacgtgacggttggcgagctcggagatgtgcaccaggccctcgatgccgtcctcgacggagatgaagacaccgaactggacgatcttggtgaccttgcccttgacgatctggccgggaacgtgggtgcgagcgaagcgctgccacggatcctcctgagtcgccttcagggacagggagatacgctcacggtcgagatcgacgtcgagcacctcgacggtgaccttgtcgccgaccttgacgacctcagacgggtggtcgatgtgcttccaagacagctcggaaacgtggatcaggccgtcaacaccgcccagatcgacgaaagcgccgaagttgacgatggaggacaccacgccctcacgaatctggcccttcttgagctgggacaggaaggtctcgcggacctcggactgggtctcctcgaggtactggcggcgggacaggaccacgttgttgcggttcttgtcgagctcaaggatcttggccttgatcttctggccgatgtacggggagaggtcgcgaacgcgacgcatctcgacgagggacgcgggcaggaagccacgcagaccgatgtcgacgatgaggccgcccttgacggcttcgatgacggtgccctcgacgacgccgtcagcttccttgatcttctcgatgtcgccccaggcgcgctcgaactgggcacgcttcttggacaggatcagacgaccttccttgtcttccttggtgacgacaagggcctcgatggtgtcgccgacctcgacgacctcgtcaggatcgacgtccttcttgatggaaagttcgcgggaggggatgacgccctcggtcttgtagccgatatccaggaggacctcgtcgtgatcgatcttgacgacggtaccttcgaccagatcaccatcgtcgaagttcttgatggtggaatcgactgccttgatgaagtcctcttcggtgccaatgtcgttgatggcgaccttggtgacttcagtgttgttctctgccatgtaaatatatggtttctaatagtggatgaataattactcgatattcagttatacgtgtgcactcatatgagcacacacaagttatcaggatacctacagccatgcccaaaatgggcggaaaaaccagcgcgacacgcccgaattcggctacattttcctctcggccatctccacgacgttggcgagcagcatggcgcgagtcatcggaccgacgccgccggggtttggagagtatgcggaaaccttgtcataacaggccttgtcgacgtctcccctgatgcggaaacggccagtctgctcatcaaacacgcgggagacgccgacgtccatcagcacggcgccatccttgacgttttcgggcttgacgaacccggctgaccccatggccgcgacgatgacatcggcgcgacgcatgtggtcggcgatgtcgcgcgtgccggtgtggcacagggtgaccgtggcgttgaccgccttgcgcgtcagcagcagaccgatcgtgcggccgatggtgatgccgcgcccgagcacgcacacctccttgccgttcaggtcgatgtcgtaggcgtcgagcagttcgatgacgccgcgcggcgtgcacggcagcggggtcgtgatgtcgccctgcacatgcagcacgagttcgccgagattgtatgggtgcatgccatcggcatccttcgagggatcgatcaggccgatgatcgcgttctcgtcgacgccgcgcggcagcggcagctgcacgatgtagccggtgcaggccggatcctcgttcaggtcgcgcaccgcagcggcgatgtcatcgaaactcgcgtcggcgggaaggtcgcgccggatggaacggatgccgacctccgcacagtcggcatgcttgcccgcgacgtatttcatcgaaccgggatcctccccgaccagcaacgttcccagaccggggacgatgccgtgctccttcagtgttgaaacacgttccgccaggttcgccttgacctcggccgcgacccgcttgccatcgagtttgatggtcatgtgcgtccttccctagagttcgttcattcctcgtagcgttaggctatcgtggactcaggtcaatgacaatccgacggcggaccgtcgacggcatattcgaagaaggcagcgatatgaacattcacccgcatcgtctggtcaccggcattgccgccatcctcgccacaggcatgctgatggcgtcgagcgcctgcggcaccggcggcggctcgcaatccgagcagccctccgcgaaggagccgaccggaccgatcaccgtcgtcgcgtccatcaaccagtggggctccctcgccgagcagatcggcggcaccgacgtgaacgtcacctccatcctcagctccacgaatgtggacgcgcatgatttcgaaccgaaaacatccgatgtcgccaagctgcagaaagcgcagatcatcgtgtcgaacggtgccggatacgactcatgggcgaccaagtccgtaggccgcaactcgaccatcgtctcggccgccgagacggtcggagctatggaaggcgacaacccccacctatggttctccaaggacgcccgcaacggcatggcgaccgaactgacggaggcattttccaaggcgctccccgccaagaagaaggcgttccagtcgcgcctcaaggcatggcaaaaggaggaaaaggccatcgagaagtcgatgggcgagttcgccgccaaccacaagaacgccacgtacggtgcgacggaggccgtggcgtactacctgatgtcggacatgggcttccaggacgacactcccaaggggttcgcccgatccgcggcctcgggcggcgaacctgccccggccgacctgcaggaattccagtcgctgatcgaatcacaaggcatcagcgtgctggtcaacaacacgcaggaatccagcgacgccaccaacatgctgacagggacggccggacgggcaggcgtccccgtgttcgacgtcagtgagcagatgccgcaggcgtacacgacgctgactgattggatcgccgatctggtggcccggcttgacaagaccgtctcccccgccatcatcgacgacagcgacgaaagcggcagttccgacggcaaagacggcgccagcgccaagaacgatgccggcaacagtgctgacgacaaaagcgataccggcgccggcagcagcaactgagttcgcccgcccgctccagaccgttaccattgccgtctcttccgccgctaatgagtccgccaccgctaatgagaatgattgtcatagtcctttgcgataatgcgttgccgtacatgtcgcaccggcggacgtgatgccggtcccgtacagacaggacgatgaatcatatgcacagcaacagcggcgaccgggaacaacggcccgactgcatcgtgttcagcaacgcctcggtgaaacgcggcgaacggctgatctggcaacacggcgacttctccataccggcgggttcggtcaccgccatagtcggcacgaacggcaccggcaaaaccacgatgatgaaaacggagctcggcctcctcccactcgccgggggcaccgtgcacgtgctcggacgcccggcaggcgagatgaaccgccagatcgggtacgtgccgcaaagctacacttcggacatcgactccaatctcaccgccgagcagtcggtgctgctcggcctgaccggcacccgtttcggcgtccacttcgtcaccaaggcgcaacgcgcgaaggtgaaggaggccatgaccttcaccggc

SEQ ID NO: 2305 - DNA, 8062 bp, Unknown
  R119_18m  MAG No. k141_24647
catggggcggtaataatcccatggggcggtaaaaccctcatggggcggtatcccaaaatggctttattctgccgtttcacaatttcttcaaaccgccccatgggccttttaccgccccatgggtaaattaccgcccgatgggcagcagcaacttactcgccgcggcgctcggacgggcggcgaatcgggtcaagcagcgtattcggatcggagatgccgaacatgctgcgcccgccggtggattcagggtgcttggcgagaacggccagcgaaatcgcccccggaatcataatgatcaccgaaagggccgccaatccccagttcacgaagaatccgagccccagtacgatggccaccacaaccaccaccgtgacgataatcgtcaacagtgctcgacgtgggttggtttccctggtccaagaggtgctggctgcgggttttgctgttgaactggccgcggcgtttgtggctgttgtgccatcagccgtgccggtcgtgggccttgccgtcgcgctcgtcgcggggtcagtaggggcgtcagacacgttatcggcgacattgccggtcgctgctggacgttgttcgtttgcgtgagtcatatccaccagcatattccctgcttccggctaaagctgggacaagcctgcgcaccgctaatccagcgctgacactggccttgagctgcggacgtccaggccggatgtgaacaggagctgaacggagtctggggaaaccatgagaactcgcgacaatttttgtgaaattgggtgacgctctatgaatcgcgcgctagtgttgcgtgagcttacaagacgaggagcctggagtgcggggggcgaaggatgaagaactccgtttggaaaacgttcatggaattgtcgctggtccgcggaatcgtgccgtggaccgtgttcggactgaccgcgatcgcggcaatcatactgattgttgggctggcattgagcaagaagcgcggcccggcagcagacggcctggcaccgggcggcctggcgccggacggcgaatcgtcggcccagtcgcccgtcgacccagataaccagccggccaaccagcctacgaacgcggctgctacggcgtcatccgcagcttcgacggaagagacgtttatttcccatggcctgcgtacgccgcaacgtcgtcacttgcatccgctggccgccgcgctggccgccgccgcgctcgccggcgcgggcggactactggccacatggctgatgtccgacgtgttcatggtgttcggcgtatcgctgggctggccggtgatcctcaccgtcgcgggaggcttcgcgggcctcggcttcgtgctggccgccgccgtgacgttacggggggcccgtcgcgcgctggccgtcgtgctggtgccgctggtgctggcgtccaccgcgctcggcgtggactcgatctacggcgaataccagaccatcggcagtctcgtcggctatacgccatatcccccgctcggttcggtcaccgtgcgcaaggcctcgatgagcgtcggcgagtggcgcgacaaggcgcgcaagggcgctctgccgtccatgcccgattcgggcaaggtgttcgccgtcgacatcccgaacaccgaatccaagttcaaggcgcgcaaggcgatggtctacctgccgcccgccgcgctgtccgcccgcccgccggccctgccggtgatggagctgctcgccggtcagccgggcagtcccggtcgcctcatcgacgccggcaacatcgccgccacgatgaacgcttacgccgccgaacatgacgggctggcgccgatcgtgctcgcacccgaccagaacggttcggccatgcacaacagcctgtgcgccgacaccacccgaggcaacgccgaaacctacctcaccaaagacgtggtgaactgggccagggcgacgctgccggtagccaagtcggcccgtatgtgggcgatgggcggattctcgcaaggcggcacctgcaccacgcagctggtgccgcgtcaccccgacatctacggtgcgatgctgccggtggatggcgagcttgagccgaccgatggcagcgtcgagacgatggttcggcgatatttcgccggcgaccgcaaggcctacgacgggcaggtgccggtcaacgccatcgccgccaccggcacggccggccaggcgctgttcgccggcgccggcaaaggggatcggaagtcggtcgccaacatgcgcaccatcgccgcggccgcgcgcgcggccggcatgcagaccaccgaactggtcgtgcccggcgccgaccatgactggcatgcggtgcaggcggtctggaaccccggtctcgactggttcggcgcgcgaaccgggctgggcgaaatgacgaaatcgttggaggaatacccacaagtggaggtgttgcaatgagcgaagaacaacagcatgggaacgcgcggccggcggccatgccgcagacgcggcggcccttgcgggacgcggaaccctcgcggacgaagcccgccacgacctcccgcgccaccaaaccgcatacggcaaggtccagccatgcggcggaaagctggcgtgaactggccggtgacgtgcggcagtgggcggacgatcaccggttggccgtcaccgccacggcgacgctggtggcgctgaatctggcggcgtggctggtggccgcgatggccggattcgcgtttccgctgcggctcagcaccagcatggccgcattcaacgccggcaaactcatctgctcgctgttcctggcgcgcggcgtcatccaactcatggtcgacgccgtcctgtggctcgtcatgctgtcgatagccgaaccatggctcggccgtgtgcgcaccgtcgtcaccgcgctcgcctgcgcggccggcggcgtgctggcgggcctgaccctgtgcgcggcggccggatggatgttccaggactccctgttcgtctcccgcatgcggttcgcattgagcccgctggtgttgccggtcggcgcgctcatggcggccagcgcgttctgcagccacctatggcgcaggcgcatccgactcgtcggctatgtggcgatcctggtcacgttgctctacagcggcaaccccagcggctactgcatactcgccgccgcgctgatcggccatgccgccggccgtgtgatggccggtccgcccgcgcacgtcgaagccgaatggcactggctgcgcagcacctccttcgaggcgcggcgcatattcgcggccatcgccgtggtactggccctggggccggtcatcgccatcacctcccataaccatgcgggcccgctcagcacgatcggcctgctcatgagcccggtttccgtcgacgatggcatgctggccaaatgcctggccggtgacacgcacggcggctgcttcctgcagttcgatctgctgcgggcctcgatgcccggcgcggtgttgcgctcgttgctgcccaccgccgtgaccctggtgctggcgtggggcctgtatcgcggacgtcggttcgcggccatctgcaccgtggccatcaacctgttcacggtggccatcgccgtcgcctactatctggtcgtgccgctgagcttcgcgccggacggcatggcctccctgctgcagcacggcgcgatcgtggcctgcgtggcgaacgtcctgcccccgctgctgttcgccatcgccctgctggcggcgatgaaacacttcccgatccgcatcggctggtgcaggctggtcggcggcatcggcgccatcgtgctggcctggctggcgtgcgccgccatatacctgatatacggcatcgcccaacccgccaccttctcgccacgcgctacggcctcgtcgctgctggccgagctgccgggacgcttcctgcccatcggcttcctgagccatatgaagctgtcgttcgtgccgcgcactccgatggcctcgatcatgtaccaaggcgtcggcctggtgttctggatcgtggtgctggccgtggtgatccactggatgggcgacgtgagcgaatcgaacgagcgagcccgggcgcgcgccgaacgtctggtcgaaaccggcggcgaatcgatgagcttcatgaccacgtgggaaggcaacagctactggctgtcccccacgggcagatcggccgtggcgtatcgcgtgctcaacggcatcgccctgacctgcaccggaccgttcggcgatccggcggaatggatggacgatctgaacggtttcgcccagcactgtgcggaacgttcgctgtcgccggtgttctacggcgtgcatcgggaacagcgcgacgcgttgctggaagccggctggaactccatcgaggtcggcagcgaaatggtggtcgacccgcgcggctggaagacgaccggcaagaaatggcaggacgtgcgcaccgccatcaacaaggccaagcgcgacggcgtgaccgacgtgcagtccacattcctggaagcgtcgctcgatgtgcgcgaacagatcgaggacatctccgaggagtgggcgcagctcaaggcgctgccggaaatgaagttcacgctcggcggcgtcgaggaactgcgcgacccgcgcgtgcggctgctttacgccatcgacgcggacgggcgcgtgctgggcgtcaccagctggttgcccacctggcgcgacgggcgcatcgtcggctggacgttggatttcatgcgccatcgcaccgacagccccaacggcatcatggagttcctgatcgcgcgcatggccgagcggctgcgtgacgagggcgaagccgatcccacgcacgccgtggagttcatgagcctgtccgcggcgcccctggccggcatgaatcccgatcgggacaacgccggggaggacggggcaccggccagcgaaggcacgcaggtgctccaacacgcgctgcagatcgtggccgactggatggaacccgcctacggcttccactcgctgttcaacttcaagcgcaagttccagcccaccgaagcgccggtctacgtgtgctacccggacccggcggcgttgccgcagatcggactcgccgtggtgcgcgcctatgtgcccagcgtgacggccgccgaagtggccggcatgctcagcacgctgcggtcgtgaaggtgtgcacacgggtacgcaggttagccgattcgagcctgagacggggtatctgctttcagagaggtacatttggccccttgcggacaactaactgccttcaaagaggtgcctgaactctgaaatctcgagtatgagcgttgcaatgacaacgtttgtactcggggtttcccgtattcggtgcctctttgaacgaagatagcattctgcagaagcccgaatgtacctctttgaacggagaaagcctgacaaggagggcgcggcaagcgctatctccgtttcgaggggctgatttggtctctcccggaggtctactcccgtttcgaggggctgatgccgaagtattcacgctccaaaatcggcggaatggctttggcgcgggtgggtttttacatgcggtctagcggccgaccagccccttgaaacgggagtagacctccggcgggggtcaaatcagcccctcgaaagcggttttgccggtgcagaggtgtcgttgactgcatcgcgagccgcctcgacgtagtaacgtggggcgtatgagcgaacgtaacgaacacaatgacggaaatacgcaaaccgcatacttcgccggcggctgcttctgggggctggagcgctacttccagaacgtcgacggcgtcacggacaccacggtcggctacgcgcaatccaccgtcgaatcgccgacctacgagcaggtatgcgcgggcggcaccgatgcggccgaaaccgtgaaagtcgagtttgacccggcacaggtcagcctgcggacgctgacattgctgttcctggaggtcatcgacccgttctccgtggaccagcagggcgaggaccgcggccggcagtaccgcaccggcatgttctacacggacgagacgcagcgcgccgtgtatgtggcggctctggagcagctggtcgaccgccagccgcagcgcccggccgtactggtcgaaccgctgcgcaacttctacccggccgaggcacaccatcaggactatctggtgaacaaccccggcggctactgccatgtaccgatcgccgcaatcgcgaacgtaaaacgccgtcagaagtacgtggaacgcatctgggatctgacgcttgagcagttcgcggtcacgcagaacgccgctaccgagcgcccgttcgtcaacgagtatgacgaggagtttgagcccggcatctacgtggacatcgtcagtggcgaaccgctgttctcgtcgcaagacaagttcgattccggctgcggctggccctcgttctcccgcccgattgccggtgacttgctgaccgagcatgaggaccaccgcattccgggccgcgaccgcatcgaagtgcgcacgtcggacacacagattcacttggaccacgtgttcaccgacggcccggccgaccgcggcggcctgcgctactgcatgaattccgccgccctgcgcttcgtgccgcgctcgcgcatggccgaggaaggctacggcgactggattgcggttgtggatggggatgatcaggcatgagcatggagaatatcgcgggcgctcgcaagcccgccaagcgtgaggatgagcacacggtcgccggcgagcatcgcatgatgcgccgtgcggaccgcgaggtgaccgatcccgagcggatcgccgcgatcatcgccgcctgcgacatcgttgaagtggcctatgcggatgccgagggcctgactatcgtgccgctgaatttcggctttgattacgacgaggcgactggcaagctgacgctctggttccactccgcgccgcgcggccgcaagctcgacgcgattcgcgccgccgccggtggccgactgcccgtggctttcaccatgcagaccgactgcgaggtggtggcgggccgcaccacgtgcaattggggtgaggcgttcaagtcgatcgtcggcaatggcacggcgtcactggtcgaggatctggatgaatgccgccacggcttgcagacgctgatggcgcagcaggcgcatatgccgaatgtggaattcactgatgcgcaggtccgcagcgtcacggtgtggaagattgagtccgactacttcaccaccaaagtccgcaccaaacccgtgcccgcacacatgcatcagcgttagccggggatagcgcgccacctccccactggcgggaggcagcgcgcagcgccggtggatggcccacgtccggacccgatagacttgccgccatggcagcagtgacagtggtaattaccagctacaatcagggcccgttgattcacgaggcagtcgagtcgtcattggccccagacggttcgtccggaacggatcatcatcgtgaacgatgggtccgatgaccacgcatccgtcgagatgctgaacgccactctcgacgattgccggcacggggcgatggatgcgaatggtgtggccatcgacctcatcggccaggcaaacgccggtccttccgccgcgcgcaaccgtggcatcgccgccgccgaaacgccgttcgtagtggtgttggatggcgatgaccgtttgcggccggccttcattgagcgcacgttgtcgatgttgtccgccgacaaaacgatggtcgccgcattcggctggctgcagactttcggtgtcctggaatcagtggtccagccgactggtggcaatgccgccgcgttcgtgtcgcataattgctgcccggccacgtgcatgattcgccgtgtcgcgtgggagtgctgcggcggctacgacgagtcgatgcgcggcggcttcgaggactgggacttcttcctgtcgttgttggagtgcggattgacggtggaaaacgatatctgcggtgctggggttactggcggtactgagcatgtcggaggttttgggagtgcctgggatacagagaatcccgcaaaagacgcggcccatatcggcatcgcccccgagccgctgatcgagtaccgcacggccccggcctcctcaaacgtgaccagcatgaccaagcgcctcgatctcatgcg

SEQ ID NO: 2306 - DNA, 17181 bp, Unknown
  R119_18m  MAG No. k141_24768
acaggcagagttcttccgacgctcgagacatcagacttttgctggtatcacgtacgtcggcgttttccggataggtaaattcggattcggggccgctgaccatcagcatttgcgtttgcctgttgcgaatggcatgcagaagtcttcgcaatgctcccagatcgccgtctctatcgctgcgtggggtcagattttcggaaaagaatacgatgcgatcaaattcgtatgtgatgatggtatcgacaagggtgtcggcgtcagacatgttgacgattctgagacggtcattgccgtctacggtgccttctcgttccgctatcaccacatggtctcggggaaaagcatgctgaatccactgtttggtaatgaaatcggtattaccgaccaaaagcacttccatgctgccgccccagtgaatactcccttaaacggggttatggcatagttctgcccacaaaccctccattgttcctgccttacggtattccagtgtaatccgttaacagacaaaatcaccccctcaacgggggcaacgggggggtattagtcactgctaagtaacgcataagatggcacacccgtacggggcattgacacgctcacatcacggattcagcaagacctgagattgagagagccatgaccgaagcatctgccctttcaaaaaatgacaaattcagcgttattgtctacggcttgctgcacgcatgccaccgcacgcctgccacgatgcgtccgcatataaaaagctggctcccctcaggagagggaagccagctgtattacgccgtgcgattgcctcgcttcagcccttacttcgcgagtctggcgtactcgtcaaccatgaactgggcgatcttcttgccgccttcgcccagcagggtgggcagcgagttgatcggcatggagttgaggaacatgcgcatcatggcgttgtcgggcagcttcgtcagctcgccggcctcgccggcggcggccacggcggccacgatcttggcgccgaacggatcggcctcccactcgccgtaggtggaccattcggtgagcggctgggtcttgccgtcgccatcgagggccacggcaacggtgccggcaatgtcgcgggagctcacgcccacttcgatggcatattcgccggcctccacgtgccagtcgttgtatttttcggaccagtaggcgaacgcgcgctcatcgaggtcgatggtcacggtcttggattcgccggccttgaggaacaccttggtgaagcccttgagctcgtgcttcgggcgggccacgtcggccttgcccggagccacgtacacctgcacggtttcggaggcatccacatcggaggtgttggtcacggtggcggtcacggtggcggtgttcgcgccggtcttggcggcggcgacgtcagcgatctcgaatgtggcgtagctcaggccgtagccgaacgggtagtccacaaccttgccgtaggtgtcgtagtagcggtagccgacgaacacgccctcgccgtagtcgacgtggccttcctcgcccggccagttcagcatgctcgggtcatcgttgatgtccagcggaatcgactgggcgagcttgccggacgggctgacctggccgaagatcacatcggcgagcgccgggccaccggactggccgagcagccaggattcgaggatacccttggcgttcttggcccacggggccacggagaccacggagccgttggacagcacgaccacgacgttctggttcgcggcggcgacctgttcgagcagggcgatctgcttggcgggcatgtcgagggtgtcgcggtcgaagccctcggattccgcggcttccggcaggcccaggaacatgaggaccacgtcggcgttcttggcggtttccacggcttcggattcgagggccgggtcggccggttccagatcgagcgtgaagccgggggcgaagtcggccttgatgccgcgttcggcgagcgtgtcgaggaagctggtcagcttggtgggggtgatatgggaggagccgccgccctggtagcgcggggtgcgggcgaattcgccgatgacggcgatcttccgggccgcggcagggtcggcgttcagcggcagaatcgcatcgtcgttcttgagcaggacgatggattcgatggcggcctggtgggccacttcgtcgtgcgcgtccacgtcgaaacggtagccgtcgatgctcatcgcggcgcgggccttgttgatgaggtcgatcatgccctgggccatgcggtcgagctgggcgggggcgatgcggccatcgcgggcggcgtagacaatctggtcgtcggtgtagctcggcggcatttccaggttgaggccggcgttcagggaggccacgcggtcatggtcggcgccccagtcggacatgacgatgccctcgaagccccattcgtcgcgcagcacgtcggtcagcagccagtgattctgggcggagtgcacgccgttgatacggttgtaggagcacatgatggtccacggctgggcggtcttgacgatgtgttcgaaggccggcaggtagatctcgcgcagggcgcgctggctgatgcgggcatcgacgcgcagacggtcggtctcctggttgttggcggcgaagtgcttgagcgaggtgcccacgcccttggactgcacgccggcgacgatgccgatggcttcatgaccggccaggtacgggtcttcggaccagtattcgaagcagcggccgccgagcgggttgcgcttgatgttgacgccggggcccaggatcacggccaccttctcctggatgcactcctcggccatcgcctcgccgaccttgtggatgagttccgggttccaggagctggacaggccggccgccggcgggaagcaggtggcgggcacggagttgtcgagatcggtctcgccggtgctggaggtcagggacttgcgcaggccgtgggggccgtcggtgatcatgtagccggggatgcctttggcttccacgccctgcaggtgccaggcgtcgccgccggaggtgagggacgccttctcttccagggtcaaatccttgacggacgggtaggtggactcgctcatgttgcctctttccttgagtttcttgagttgtgcggttgtccgatatgcgttggctccgattcggccgggctgcctggctgttgttcgaggttcctccacgaatctcgactgccgttttctctcgaccaaccggttggtaggcagattatcaaaatctacggcacaacacgccgaaatcatttggaatcactactaaccgaccgtaaggttgcctgtatgaacgacccctctcccacagacaccgatcgccgtaccgcgattctcgacgccgccgtcgaatcgtttggcaaacttggctattacggcacgtctctgcaacgcatcgccaccgaagtgggactcaccaaggccggcgtgctgcattacgtgggcagcaaggagggactgctcaagctggcgctgaccgagaaatacgaccggatcaccgaatcgatcaacgccgcgatggtcgcccaggagcgcccgcttatcgcggatatgtggcgtcaggtggtggctgtgaacaacaagaggcccgcgttggtgcatatgttctccacgctgagcgccgaggcgctcgacccggcccaccccgcgcacgattatttcgccgaccgcgagcgccgcacggtcaccacggcgctcaacatcaactgggccgtgccggaagacgtcaatgtcggacatgtgctgcaggccggattctcgatgatggacggcctccagctgcgctggctgcgcgcccccggccaagatctcaataccatgtgggccgattgcgaggatgttctgatgcctttgcccctttgggagggatatcgctaattggtgcggctgcaggccatccaaccggcgtgccaaacgtgggtgaggtcccatgggtcgagccgtgacgtgtcggattgcgggtcgatggtgggcaggaaagcgcgattgccgcgcagttggtagctccagtagatctgcccggcagatgcgctccacgctttgcgctgcatggcggcgacctcgcgatagacggcattcctcgctgaaggggttcggttcaccagattgttggccacgcaccactcccctacaatcaccggcgtatagcgcgcggcccggcggatgcggcgttcgttccagcgcacgaacaagcgataccagcccatcagccaccgatccgggatcagacggaacagcgggaattgctcggccatgaccagatagacatgcgtatcgagcatgacgccccgcatgccctcgcgcacgaaccagtcccgccaacggcccagtcggaagccgtcatggaacacgatgacttgattccctgccagaatcgggcgcaaccggtggtatgtctcgcggtagaaacgcttgaggaacgccatcggaataggcccgcttcctcgcgcttcggaccggtctttcgcctgcctgctcgatggtgacatggcatacgtcagccagtcaatcggctcattcagcacttcgataccgaacagcgccgcgtggtcgcgataccggcgagccagacggaccagcacatccagcgcataggcgaccgctcgcgggctacgatgccagcgcaccacgccggtgaggccgccgttatcgaatccgttctgcgagccgggcaccgtgtgcaggtcgataagaatcttgagcccggcccgctcggcccagtcgaacgctctgtccagatactcggtacagcccgggtgaccgggcacatccccgaacacgaaatacggcactggaatacgcaccagattgcagccatgtgcggcaatgttccggaaatcggcctcggtaatatacgtgtcgcgatgccgcgtcagcaaagcctccagctcagccgacttcgtagcccgatgcagccagatctcgtccgcctcgccgctggcggcaaaaatccccggcttcatccaccgctccagcaccagccaattgccgaggttcaccccattaattcgttcgccaacacccagcgcgcccgatgccatacctgtcacgctaatcgttcaatgcttcaccgtagcgagcgaccaacccctgatttgcacgctcaaactcggggatgtaatcagcgatgatggcgtccacaagacgccgagctcgttcttcatcatagatatgagcagaatcattgcgatcgcgcagcatgcgcagccacaacgattcgtccatgaaatcatagtattgaaaagcggttttgagcacatctcgcggagagccggaagcggaaacagggtctccctcataagccagcagcgccttgaacagtttccaaccaagctcgaactgcaacccgaacttgtcaataatgccgctctggatgaaatcattgccgagatcctgttcgggagccttgcgcagcgaattcaatgcggaaacgtaattctcatactttttcatacagcacctttccgctacgctcaatctccgccctcagcgatgaagaaatcggctcatccagattgatgacatcaactttaagcagtgaccacagattgtcctgaaggttctgctccaagcgattgaaatcgggacaaccggccacggcaagatcgatatcgcttttaggccggttcacgccctttgcgcgagaaccgaacagcacgaccttgcgagcgccggcatcagcggcaaacgcgcgaatctggtcgtacacgtgctcgataggaaccatgacacctcccgccgcatccaacagtcccggaccaatcccggaccacccgcgcttccatcatacggccgcgtcccactcaccgcacggagcccgaaccacccgaacgcggcgacgtagttgcgggaggcgggctggcgctgtagggcgtgcgggaagttcctgacgtctacttttcaggaggtgaatcctcatgttcaccacgttttctctggccatcattctcgactgcaccgtacgcattgtgctcggcacggcattgggcgcgctgatagggctcgaacgccagttgcgcgcccgaagtgctcggcgtgcgctgggatgtggagcacatcaccacgtccgactgaaacgtccgactgacgctgaccagcaacatcgcaacagtacaacaagccaacaagtgggatggggcatcgagcctcatcccactttgttattatccggcgattgtcagactcactcacgccacggtgaacgtggtgcgcttcaggtcctcacggcgcgaggagtggccgatgagcagttcgaattcgccgggctcgacgatgcggttggcgtccgggtccacgatcgtgcagttcgccaccgggatctcgaaggtgacggtcttggtctcgccgggttccagtgcgacgcgctggaacgccttcaattcgcggtcggtccagctgtaggaggtcacgatgtcgccgatgtaggcctgcacgatctccacgccggcgcgctcgccggtgttggtgagggtgatttcggcacgtacggtgtcggtttcggcgaatgtgccgtcggcgttgcttgcgccgcccgtaatggtcggttcgccgtatgcgaacgtcgtgtagctcaggccttcgccgaacgcgaacgccggatcctgggtgaggtcggcgtaccggtcgccgtgctggccgcgaatctggttgtagtagactggcagctggcccgcgtggcgcgggaaggtgatcggcagtcggcccgacgggctggtcaggcccaggattatttcggcgatggcctgaccgccgcgcatgcccgggttcggcgcccacaggatggagccggtgccggtttcagggtcgctgacgcgcttggcgaacacgccgtactcccccacgatggaggcgggcaacacctgcggcttggagctgatgagcacggtgaccatcggcttgccggtttcgcgcgagacggcggcgagcgcgtcgagcagggcgttctggccaccgagcagttcgagcgtggcggtggagcaggtttcgccgaccagctggaccacgtcgccgaccacggccacgatcagatcggactggcgggcgttggccacggcttcgtcgatcattgctcgatcgacggcggcggaaacgccgattttcgggcgaggctggccgtccgggtagaactcgccggcagggtcaggcacgaggtcgatgacgttcgcgccgcgcgagtagaccacttcgcaatcgtcggaggtgagctgggtcaggccgtcgagcacggtggtaatcatgcctcgaggctggccatccggcatccaagagacctgaccggagttgccggtccagtcgccgagctggttctgggcgtcgtcggcaagcgggcctaccacagcgatgcgcttggccttgtctgcggcgaacggtagggcgccgtcgttgcgcagcagggcgacggattcgcgggcgagttccaggttggtctgctggtgttcggcggagccgatgaccgccttgatgcgttcggcatccggcaggcgcgggtcttcgaacaggccgaggcggaatttcagggccaggatgcgggctaccgcatcgtcaatcagggattcgtcgagcagaccggtttttacggcttcgatggctccctcatagaactgtggggtggtcatgaccaggtcgttgccggccttgaccgcatcggctgcggcgtgcacgtaatcgggcttgacatgctgttcccataccgagcggccgacgttgtcccagtcggtgatcagcgtgccattgtattgccatgcgccgcgcagcttgtcggtcagcagccatttgttgaacgtgaccggcacgccttcgatggactcgtagccgagcatgaacgtgccgcagccttccttggccacgcgttcgaacggcggcaggaaccaggattcgagcttgcggtgggagaggtcggcttcggaggcgtcacggccgccctgggtctcggagtaaccggcgaaatgcttggcgcaggccaggatcgcgttcttcggcagggcctcgccggccttggcgccgccctggtagcccttgaccatggcggaggcgagttcgccgatcagcatcgggtcctcgccaaaggtctcgtccacgcggccccaacgggtgtcgcgggcgatgcacagcaccggggagaacgtccagtgcacgccggtgcaggagacctcttcggcggtggcgcggccagcggcttcgactttggcggcgtcccagctgacggccatgccgagctgggaggggaagatcgtggcgcccggccagaaggagtatccatggatgcagtcatctccgataatcaacgggatgcccagacgcgtcttctcattgacggtcttggcggcacgagataaatcctcggggctggtatgcagaatggatccgacatgcttattcacgatgagatcctcaagatcgccgccgcgggcgtcaagctgcatcatctggccgaccttctcctcaagtgtcatacgggagagcaagtcggcgattcgctcaccagcgggcaaatcaggattcttgtacggtaaggtttcagcagttgcggcaggcgtggtgttgtcggtcatacgaagtcgctttcctcagtgaaatcgaacagctttttaattaccaattggtagtttatctattgacagcatacaacacgcttatgccgcgcgcatcacatacaccaaaacgaccgtatgtatgcgaccccttcgttcgcccgcatacttactgccgccatcaagcacaagcctcagttcaaggcacacagcgaatcagcgatacccgtcccatatcggcgaaggaaatatcgccggctccagatcggcccattcatcgcataagtcaatggccggcccccgtaaccacctcagttgcacaccatccatgatctccagagcatggcgcaacgtgggccggacctcctcaaacgaggtgaattcggaaggcaggttccagttgtatgtcgaatagtatcgccatattgaatcccgacgattggcaaactcgtcatgtaacggatgcgcaggattgaacgattcgacctgcaatatcgagaacagctgaacaagcatggggcgcgtggaattgcaatgtaccaagaacctcagatacgcgggtaatctgaaatcatcgggcactgaaccaggcaggccggaggccatgaagtcttccacactgccaaacgtgttgtaattctcgtgatacatcgcggcaagcaggttatctttgctaggaaaatatcgcaaaactccctgcttggtaacaccgaccgcatcggccacatcctgcacagaagtaccgttgtagccacgctcggaaatcagtcgcacggcggcatcgagaatttcctgccggcgttcccccggcgacttgcgaacacgcttatgctgcaatgaattcccagatgtcatatccgccagtctatccgcattctccccactcccatgcgcaaccacatccaatatccttggccggatatgcaaaacggcgccaaaacaaaacattctgtcatgccttcgacaccgatatcgcgcaatagatttttctgtatatgcttcttcgcttactcctggaacacgtcggggtgcttcagatcgccggggatgtcggacaaaaggccttcgagccccaggaattccttccagaagtcgagcggctggccgtacggcgtggcttcgcggccgtgggcctgaatgttggccttggcctcgaacacctcttcctcgctgatgccctcgaagtagctttccaagcggtcgcgatgctcgggcacgtagaacagagaggacacaatctccgtcagacgttcggcacgctcgatcggcaaggaatcccagtggcgaagctcgatgaagttcttcaggcgtacgtcattgaagtgcgtggagatgatgtggttgatctcgtacgggttgagttcgcggtccgggtacacctcccccgcgttctcgcggaaggccgggcgatgcagttccttgggacttgctccagaagccacagcttcaggggtatgggtcaggtcagcgaacatgagcggcgtggacagcacgtcgatggcgtaatcctcccacccatagcgcgggtcgaacaggcccggcagcacattcgtgcgctggaagtcgagataatcccacatgcgctggcgcagcaatggccatgggttcgtctcaccttcgaaatacggggtgttgcggaagaagtacgccagaatcggaccgatgacggtgcccaaccgcagtttttcgatggaatcgcgctcgtccacgtagtcgatgctgacctgggtggaggcggagcaacgcatcatgcatgggccgaactgacccacgcggccgaggtagtcggtcattgcatcgtagcgatccttggggttgaccggcacatccgcaaagctggatttgggctggtaaccgtagttgaccagtcggaagtcgagatcgtcaagaatcggggcgagctcgcgatggaacttggaatacaacgtattcaggtcggacggcttcttcagaatgccgattgaagtctccacctggccgccgggttcgagcgagacggcgacgccggggcgcgcgagccccaccagatggccgttctcccagtattccttctcctcgtcgtagtacggagccaagcgtttgagcaatgcctcgatgccattcggctcgtagtagcttacggcagtgtcgtcgctgttgtgcacgggcaggtgctcgatctccacgccgaagccgccggcgccccgctgggagcgtccattctcaaagaacttgagcaggctttcgacgtgcttggggttcggcttggcgagcaggtgcgcgtaactgattcggggagtaaccatgctttgtatcgtattcgagccggccggcgcgcgtgcccgaaagcccgtaatacgctatacgaaaaaccgatagcaggctccggcccggtttctcgctctagagactcccctcagtcgctgcgcgacagctcccctcacagaggccgagccgtaaagcggacagcccagtgggctgtgtttgtggggtttccgatttggttcgggagccccgtttttgttgcgttttacgggttttgcttggtttgtgatggtttggtgtttgtgtctcggtggctctgtttgtgtcggtttgcgcgccttggggtatcatctggggtatcgccggccgatgcgggaaggctggccccatgcgcaggagaagaggtttgagcagacggttcggttcggtggtgaagaggaagaaccacaatggcgtgcccacgtgtctgttggcgcggtatcccaatccgaaggagccgggcaagagggtggtcaggaggttccctcttggcgcggaggcgttggcgtatgcctggctggatggcgaggaggggttcgtcagggattacgagcgcgggctatccgactgggtgccgccggaggagcgcgagcgtgtcgtgaagctcgcacgcgaggatttcgccgtgtacgcggaggatttccttgactcgtatcgcacggttgacggcgggcgtctccgggattccacgatgcggctcaagcgttcggatatggccttgctggtcaaggcgttcggcggcatgccggtgagtgagatcggccggtcggacgtgggcgcgtggcttgacgatggtgtgtccagtccttatacgcggcgtcgttgctatcagttgcttcgcgccatgatgtcgcgtttggtggaggatggcgtgatcgcgtcgagtccttgcgtctttcccgttccccgtcttccggagagtcgccaggccatgattcccgccgccactcgcggggaattggctttgatctatgacgcgatgcccgacgatacggcggtggcggtgtatctgggcgcggtgtgcggcctgaggatcggcgaggtgtgcggtctgagggtcggtgatgtggatctggcccgtcgtgtgctgcatgtgcgtcacgcggtcatgcgcagtctgtcgggcgagtgggtgctcaaggaacccaagaccgcggccagcgccggggacatgccgatccccgagggtctggccgccatgttggaggcgcatatcaaggcccattgcgacgggggcggggacgcgatgctgttgtccggcgcgcgcacgggcggcatccttcccccgtccacgttgcgcggccagttcgaccgggcccgcagggcggcgggacgtcccgacctgcatttccatacgttgagggccaccgcgatcaccgccgccgcgcagtcgggcgcgagcccgaaggaggcccagcggtacggcaggcacgccgacgcccgcatcagcctggagttgtaccagcgtgccaccgaggacggtggcaggagggtcgccgaggcggtgttcgactccctcgtgcagaccggtcgcgaccgcgcgcgtgtggaggccgagctcgcccgggccggggaacgtctcgaagccgcccgccgtgacgtggagcgcctcgagaaggagctttcatcgctgggctaggccgccttcgcgcccggatcgccggaaggggtgtggcctttctgttgttcatactgcgggagtggatcgtcgggactgcccgcccagtctctcagggtggtctcgctgattcctaggaaattgtggagcgacttgacgcttcgtccgtcggtgttgatcagatgccatatggctgatcgcagttctttttgcagcgcttcgcgtatatcggggatgacgtggggctcgtcttgcgggtcgcgggacgggatggaggagctgcatgtcagggtctttgcgacgtggatcagttgcagctcctggtattcgccgatcgtgagggtgcggaccaggtcggcgagctccccctcgtcgttgtacagatccttgtatgcctcgcggtccttcagtttctttttgtggggccgcatccattccacgaacgtgaaatccagtccgagccgtgccatctcctcggtgatgcttggatcggggtcggccgcgtccgaacgcagcaccctgagcatctcctggaggcgcccgatctgggtttcggtcagcatcgccatttcccggatcacgtccgcgcggatcccgttcgcgcggatcctttcccgctcggctatccttttccgctcggttattccgtcgatctgtctgaggaaccgtgcccgttcctcccaggatgccggcccggcgtcctcgatgccgtccatctcgtccgtgtcctcgttgtggtcgtccatgcgctcctccttgtgatgtccttctcccattatccgcttgcccgcgtctcctcttccgatgacgcgcatgggtgtcgaacccgctcgggttccgctctggttacgaccgcgctttcaggcgattatcgaagtgtcaaggaaaacgaaaggagcgatcacgatgggcgcacacgatctcgacaagcggtggctctcggtggccgaggccgtccaatataccggcctgtcgcgctcgacgctcaaccgcgcgttcgtctccggccgtcttccgcgatacaaggctggtcgccgcgttctgcttcggcgttcggagctcgacgcctttatcggccagccggtcaactctgccctcctcgcccaacgcgagtaccggcggctcaacaataaatccacaaaggactaagaggactattatggataaaatttttaagttcaatacgctcaatcagccgacgaggtaccccgtcgatctcgatcggctcggtatcaacgtgtacgacgtggcacccaagtgggtctaccaggacggccggcgcaccgatgtgcaggccacgtcgaaggacggcgtgccgcgctggacgatcaaggcgatcctgaccccccagggccgcgcctccggcgctcccgccgagatcacgtactactcggaggaacggcccgaggtcatgggcgcggcgaccttcgccagcctcgacgtttccgtctggcatatgccagagcgggacatggcgggcatcgcgttgcgcggttccggcctacgatccctgggttcctccccggcggtcgctgacgagggcgaggtggagctatgaccacggatggtgtgaatttgggtcaaaaattggattctcgtcgtctcccgtcccgtgtcgaggagttcctggaggggtgttcccgtcagtttctgctgcttggcctggttttcataggtgtgttcgcggtggttgtaccgttcgcgtcccgggacggtgcggtggtggtcgcgctgctggtctcgtccgttgtgacgctgctggtctgtctgacggcgtggtgggatcgcttccgtctttgggtcggccacgtcgagtccccgatgtcgtcccaacgccgccggatccagcgtttcgccaaccgattgtatgcctcttggtttgatggctcggttccggcccaggtcggcctggtgggcgaggcccggcgcacgccgcagcaggacgccgcccttaaggaggctttcgagtcccagcgcgattcgtcgcgccggttcatggcgggccccgagctgcgccgcgtcctgggccagatcgacctgcgagaacggctcgcgaaccagattattccagggctgacgctgtattacaacgaggaaacggatcgactgtacgcgcgtgtcgtcgtgtggtcgccgatgcagaccgagcaggtggtcgccgcgatccccgacttggagcgggcgtggggcgtgtgcatcggcgattcggaatcctccggtggcgaggtcttgatgccgttgcatctgcgtgagcgtgcggggtgggcgcgatgattgggcaggtttccgcgaacgcgcccgtcagggtcggcgagaccgagtaccaagaccccgtagcctatgacttcgccacgccctcgcatatcgccctggccggtgccacgcggtcgggcaagtccgcgctggcgtactggctgcttggccagttggcggcaatgccgtgggtgcggatcgtcggctcggatgtctccagcctgttgttgcatccgttcgccggtgatcctctggtcgccttgggccaggacgacctcgacgcgcatgcgagggcgttggagggcgtcgagaagctcatgcgggatcgtctcgaccgtctgctcgccgagcggcgtgacaagatcgacgagttcaccgtcgcttgtcctctggtgcttgtggtgatcgaagagttccccagcctgctggagctggcgaagaccctggacgcctcgacctcgcccaagggcaggctcgaggcccggttgaggtcagtgttcctgcggctggtcacccagtcggccaagtgcggcatccgggtgatggtcgtcgcccagcgcatggacgcctcgatcctgcagggtgtggcccggtcgaacatcgagacccggttcctcctgcgctccgatgaagccgggatcgagatgatgatccccggcctggatgaccaacagcgctcgttcctcgcccgggcccggcccggcgtcggctatctgggcatgcccggcctggacggtccggtcctgttccgtggggtcgatgtgtcctaccagcagtatttggatcaggcggaggcgtgcgtggccttgtcgtccgcgtcgcttcccgtggcggatccgtgacatgggccgcgcatgcggcgggcggggccggcgtgccgcgaaggcggcggagccggatcccgcccccggccccgccaggggccggggtgcctggcctagtgttacccaggcacttttgtgtctgtgtctttccatcccgttcgtccccgattgcaggcccttccgacccggaggggcttgtgtcgggcagtgtgtcaaaggttgtgtccaatgagcaacagcaacaatccaaccaagcggagggccaagccccggtccgcgtccgcagagggcaggaggagccgtggatggctgatcaccatacccgtcctggccaccgagcccgacgaccccgacgacccggccaggggccggcatcccaccggcgggatccggtacgagagggacatcgccgccgcgttcgccgactggccctggtgcggccagatcgaggagggggcgcaacgcgaggacggagcgtcccacggatacctgcactggcagatctggatggagaccgggaaccccaagaaattcagcaccgtgaagaaccggctcgccaaggcgggcatgccggacgcccacatcgaacccagggaaggcaccaaggcccaggcctacgcctacgtcaccaaggaggaaacccgtgtcaaccgcaccatcgaaatcaacatcggcgaaaccaacggtcccgacgataacggcaagtgacgccgggccgttcttccacggcctgtccgccaacgacataatcgacgagcagggcaaacgcaacgacctcgaagagctgcgcggcatggtcgaacagggcatgacccttgacgagatactgctcgcggacaccgacaaccacgcctcccgatgcgtcggatggctctcgcggctcatcgaggcaagggacaggtcgatctacaactccagcagcagccgcgacatcgaggtctactacctgtacgggcagacgggcgtgggcaagacctcctacgtgatgaacagatacgcgcccgaggacgtgtaccgcgtcagcgactacctgcatcccttcgacggctacgagaaccagaaggtgctgctgatggacgagttctccggcgcgctgccgttcgaccagctcctgaacgtcaccgaccggtggcgcaccaccctggcggcccgctaccacaaccggatcgccatgtacgacaccgtgtggatcgtgagcaacctgcccctcaacgaactgtacagcgagatcgaacggccccgacgcaaggcgatgttcagaaggttccgccaggtcatctacatgaccagacaaggcggcatgcaccgctacgaccccgacgagatctccgactacctcggcgaccccgagcaagccccggccggacgcttccatctcctcggactcgacgacggcctgagggccgaggacatcatatgagcgcacaccggtccgctggttccactgtcgaacacccacgtgccccacgtgttcgcgggagccttctggtcgagggtgaccgtatgctggccggggccggtgaacgtctccgtcttggtgcccagctgcacgcctccggccgacctgatctggttgagataattattgatgccggcgtcggtcggatcgcccgtatagggcaggttcctgatgatcgcgtccttcgaaccggtgaagtaatacccccttcgccgtc

SEQ ID NO: 2307 - DNA, 70027 bp, Unknown
  R119_18m  MAG No. k141_25049
cggatacccgttgacgttcctgcagtcattcccctggcggggactgctggtctactatctgttgggattcgtgttggaatactatccgccgtccacgcgggcgcggcgcggcttgtatgcgttggcgccgttcgccctggcgtggaccgtcgccacgccgtacctgttcgccggccagcagatgcaggttggccgcacggtcacggttgcgtttgcgatggtggtaatggcgacgttcctgttcttccggtacgacgtgcacatcacgtcggcgcgggtgcgtaaggcgattatctggctggccggatattcctacacgatttacttggtgcactcaccgctgtccaaggtgctgatcggcccgcggattcccgcgcccacggacggatggtcgtatgcgggtatcagcgtgttgatgtttggcgctacgttgctggcggcgctgctatttgcggtgattgccgataccgtggtgctcaagcccgtgcagcgtctactgcggaaggtacggctgtagatttggatacggcgctatgccacggtatcaaagccaggaatcccagcagcagaagcggggtgaacgtgaatttcgacacgcccatcagcacgcctacggtcatgagcgcggtcaatcgtccgttgccggcacgcggatcggccatgcaggaaaacagcagacacgcgaacaataggcacagcgcctgtgccatggaatcggccgagatggcgaacgaatagcggaagatcaacggcggtgagaccaagagtagggccgtaggcaagcgccagcgggggagtgcggctacggcggcgaacatacaaccggcgtacaccagcaacatgattacttccgcgagtacgtatgtggtgccaggggtgagcgttgagtctgctcctatggcaaaggcggccaattgcggcagataggcgaagggtgaattaaccgctgcattgttgtagggcgtgtccacgcaggtggtgtttgcggtgctggtgctgttcgtgccgctgcccgctgcagtgctgcccgtgccgtaccgttcaagaaaatcggcattgacggcagccggatcgtaaccgtcgtaatggtcgatggagaaccggatccaatcacggctcacgcacccgcccacattgccgctgcccgaatgcaggatgctggtcgagtcgaccggccgagccagcacatccccgttaacgatgccgtcaatgcgatatgtgtgcgcccatacgtctggaatatgcccggcaggcgtcaccgcaatcagcacgaaacccatcagcagaatcaccgcttccacgcagcgttcgccgccactcgtgagaacacagtcaaaggagcagaaacagcatcagaggcatcggaagcatcagacatatgtcccactatatgtgaggtgttggtggtagtagtgatgcataaaagaaatcggcctttcgctgtttggtgtgggtgaagcgggttaggcggtgacgacggtagggtagttttggtggcatggataccacaatgctgttctttctgcttttctattgtttttcacagtctgagctagacgctaaaagatggggacacaacaaccgtaggttgcgctccccatcacgtttctatatggcgcttagtcagtgtcttttgttgtatgcgaatctgttggtgccaatgaggaaggtcttgcggtcgttcttggccatgacgtcgaggatgatgccggcgatgatgagcagcagccccgtgatgaccagcatcaccgcgccgatcagcgtggggaagtgcgtggccacgccggccttggcgaattcgaaggtgacggtgccgcacagcacaatgccgacgatgccgatgattaggcccaatccgccgaagaaggggaggggcttgtattcgcggaccatgcggaagatggtgctcatgaccttgatgccgtcacctacggtgtccagcttggacactgagccttcgtgggcggtcacggtactggatcggcatctcgtagagtcgcaggttgttgttcagcgagtggatggtcatttccatctcgacctcgaagccgcgcgacagcacggggtaggttttgacgaacgtgaagctgaacgtgcggtatccggtcatgatgtcggtgacgtgcgcgcggaacaggtggttgatggagccgcgcacgaggcggttgccgaagttgtggaacgggcgcttgttctcctggaagtatgtggaggagaggcggtcgccgatgaccatatcgtagccttcgagcaccttggcgaccatgtcgggcgcggcggcgatttcggccgtgcggtcggtggagttgttgtcgtacacgtagatggccgcgtcgggcagcgccgcacggaagtcgcgcaccaccttgccaatggtcacctcttcgttatagcaaggcaggagaacggcgacggtctcatttctgcctcaagcagggggcattgctatacgcgttgactcgtgtgatgaggacaaaatagatataatccaagcactgtaggaggggccgtccgctggccgccggcccctcctacagtgtggtttcgatgcggtaacgggggcgatgtttggattccatataaattttgccgacgtattcgccgacgatgccgagggagagcatgatgagtccgccgatgagccagatggagatcatcatggacccccagccggcgatggcgtggccgaacccgagcgagacgagcacgtacacgaacatgccaatcgctaccaggatagacagcagtccggcaccggtgacgaagctcagcggtttcgtggagaacgagctgatgccctgaatcgcgaaggcgatcatcttcttcaacgggtatttggattcgcccgcttcgcgctcgccgcgctcgtagtagactttgctggtctggtagccgagtgtgggcacgatgccacgtaggaacaggttgacttcgtggtattcgctgagcgcgtcgagcgtctcgcggctcatgagacggtaatcggcgtggtcgggtaccgtctcggcacccatccactcgaacaccttgtagaaggcttcggcggtggtgcgcttgaaccatgtgtccttcttgcgtgcggaacgcactccgtagacaacctcgtcgccgttgcagaatccgtcgatgaacccgtcgaccgcgttcacatcgtcctgcaggtcggcgtccatggagatggcggcgtcgcagccgtaggcgcgcgcggtcatgagcccggcgaggagcgcgttctgatggccgcggttgtgggagagctttacgccgccgaacaagtgtgcgtcgcgttcgtgcagattgcggatgatgctccaggtgccgtctttggaaccgtcatcgacgaacaggatgcggctttgtttgctgatccgtccggtttcggtaagatgtgcgactttggcggccagcacgtcggccgtgtgcacgagcccttccgcctcgttgtagcagggaagcacgaaatacacgaccggctggtcgcggcggtcggcgcgctcgccggaaccatcgccaccggcgctcgtgatgtccgatttctgcgtgtttgtctcgaagatcatcttcccatcctcatactcagttcgaagccgtctcatcccggtcccggcccatactcatgtgctatagatagtttacccgcgtaatgtcgtgcgtgatttcccgtgattttcttggttcggtcaatttcggtatttacatgttgatgcttgcgttcaggttcctgttgctgttcggcatgcgtgttcgtgccgcttgtcataaaccggttcttgatgtcatgagcttatcatgatgcaatcatgataagctcatcatagagtatttatcttcacgttatcatgagatttcagacgtgggtttgaagtcgattggaggcgaccgcttggatccatgtggccgcaacaaataagacaaatgagctgatcaagggggatgatgatgtggacgaatgacgatatcgccgaggtgctggaacatctacgcgtccaaggcaacgatgatgcccgtttcgaggcgaaatcctgtgctcggaccatcggcgccagcgtgtgggagagtgtgagcgcgttcgccaacaccaagggcggcgtgctgttgttgggaatcagcgaggacggggatttctcgcctgttccgggattcgacgccaaccatattgcatcgcagttcatggatggtatgggagatggcaatccgcaaggagcacggttgacgaatcctccggagtatgacgtttcccgatgcgagcagaacggctcgtcgttcctggtcatcgacatccatgaaaacggcattcagcacaaaccctgctatcttacggcgagagggccgcaaaccggtgggtaccgccgtgtggacgacaaggatttgagattgtcgccaaccgaagtgttcgaaatgacccatgccctgacgctcagttccgcggatcgtatggttgtccctgaagccgacgtctccgatctgaatgccgaggcggtggacagggtgcttgctgagcatcgtaattccaagacgctgcgcgggactgatactcgtcttgagcgcatgaccagattgaatatggtgaacaaggttggagaggtgcgtcttgcgggactgttggccgccggacagtacccgcagcagtactatcccaagctgatcattgacgtcgtcgcacatccgggtgtcgagaaatcggcggttgagggtccgcgtttcgtggatcgtgtgcaatgcgacggcaatatgccggaggcaatcgaacaggcggtggagaccatcgccaaaaacctgcgggctcccacgttcgtcgtgggggtcggagcccgtaccgatagcgagattccaaaggaggtgctgcgcgaggtcgtcgccaatgccgtggttcacagggaatatgatgcgcaattcctcggagaatccgtgaccgtggacatctaccccgatcgggtggaggtgtcgaatcctggcggattatggggtggggtcacgctggccacgatcggcagcggcgtgtcatgctgccgcaatgcgacgttgatgcagctgcttcatcagataccgtatgacgatgcgaatgatgtgaccgtggaaggcggtggctccggcatccctctggtgattcgcgagatgaaatcccacgcactgggggaacctgtgttccgcgcgactcccgatcggttcacggtcgttcttggacgctacggcgtggagcagcaggagaaccgtgactggcttgatcatgtgggcgtccccttgactcgtcatgaacgtatggcgttgctcttgttgaagaggcatggcgatatgacggttccgcagttgcatgtcgcgctgtatctggattccgacgacatcagggtgattctgcatagattggtccaagcggggttggccgatgaaatcggccctgatcggtacgcactagcggagaaggtcgatggtggggagccgaatgggggccgtaaggggcttacggcatcggaatccgcgatactgtccgtattgtcggcggatacgccacttgatgtccacgaaatcggccgtcgctcggggagaggccttcctacgacgcgtaaggcgttgagccggctcgttgagcgtggagtcgttctcgccactgcgccgccgcgcagcagaaacaggaagtatcttctcaaaagataggatgatgccgtcgccggaatgtgcggtggagttccgctgattttgtccgcttcgctccgcccgccttatccgccgcgcacattagactgagacgcggttgaaaacgttgggattacgcctattcccgcctgcctgttcccgcgtgtgagagtccggtcgaccatcggaacgcgtggcggtgtacgggtgcgcgggatgggtgcgtcaaggagttacgcatggtggaaaagaagtggctcgacggctcggattcgaagggcgcgacgggtgcggcgcgtgcgacgggcatgctgcgtgcgttgcgtgcgcgtgcggcggcgtccggtgcggggcgcggcgtgatcgcggcggtgacgtccgtcgcggcggcggcgatgttgggcacggtgtgcgtcactccggccagcgcgctcgcggatgtgaacgccgatgcggacgcgtccggcgtccggtccgcggcctccgtgacggcctccgcggccgcctcggacggaacctcatccgacgcgcgctcgcaggcgcggtccgcgacttccgcgacgcgtccggtcgcgaacggtgtgacggtcgccgatgagacggctgccgacgcgatgccggacaatccgaatgccgagctgccggataaggtgtccgccgagatctccgatgacgcgacggtggtgtccgagcaatatgcggctacgccggaaggcgagttgaaggacatcgagacgggcgagacggtcaccgatccgaagatcgtgggcacggagagcaagcagcccgatccgttggcgaagacggatggcgagtcgttcattccggtgagcgccgcggatgtgaaagagaaggtcgctgcgaacggcggtgacgtgaacgcggtctcctcgaagacgcgtgccgacaacgcgtcggtgaagctcgccgcgttgcagaacaacgagtacggtgcgcactggggcacgtacaacggcacgcaggcgttcttcgacgcgcgcaacaacctgttcgcccagcaggcgaagggcgtgatcgacgtgtccgcgtggcagaacacgattgactggcaggcggtgaagaacgcgggcgtcgagggcgcgatcatccgtctgagctacggctggggcaatggcttcgacgtgcaggcgaagcgcaacatcagcgaatgcaagcgtctcggcatcccgttcggcgtgtacgtcttctcgtatgcggaaagtgcggccgacggcgcatccgagggtgcggacgtggtggacctgctgcgccaggcaggcgtgaatccgggcgacctgagttacccggtgttctacgatctggagaactggacgtacacggggcacaagagcccaacgagtccgagcgtgtacgacggtatggtgaactcctggtacggcaaactgcaggcggccggttacaacaatctgagcgtctactcgtacacaagctacctgaacagtgcgctcaacagcggcaacatccacggcaagacccgctgggtggcgcagtacggctccaccatgcagtacaccgcgttccccacgaacgaccgcggctggcagtacacgagcagtggacagattagcggaatcacggggaacgtggatttaaacgcgttcgggtaccggactccggccacacgatatcgggaagtgctcattgacggaaagtggtattacatcgacgcgacgacgggcaagaaggtcaccggttggcagtggttgtcgtcgagcggcggcaaatgggtgtactacgatccgaccgatggacacatgctgtatggcgagcagaagattgccggcaaatggtattacctggacccgggcacgggggcgcgcgtgacggggtggacgtacctcaagggtgacgtgaacaagtggacctactatgatcaagatggtgccatgctgtatggcgagcagaagattgccggcaaatggtattacctaaacccggttagcggtgcgaggatgaccggttgggttgtattgccggacggcaggaatgtatactactccccctacatggtttatggggagcagaagattaatggtgcttggtattacctggatccggtgaccggcgctcgcaagcagggctggcagcggctgaaatccaacggcggtaagaccgtgtattacggttccgacggaaagatggcatacggagaacagacgattgacgggaaacagtattatctgaaacttggtaccggtgcacgtttcgccggatggcgacgagtcgtgactacgcgtgaccatcgtggcgataagtgggtgtactacggttcggatggcgcgatgctgcacggagaaggaaaggtgtcgggttactggtacttcttcgatgatggcacctccaagtcgaacggacgtgtgacgtacggttggaagaacctcggctccaaaatcgtgtattacagctggcctgagggcaagatgcagtatggggagcagaagattggcggtgcttggtattacctgaatccggtgaccggcgctcgtaagacaggctggcagtatctgaattccaatgggggcaagaccgtatactatggctccgatggaaagatggtgtatggcacgcagtatatcgacgggcaaaagtactacttcgacccggtgaccggagcgaagcggtaggagtgtgcaaggggttctgggccgttatctcggtttcaaaccccttgcaataagtggaattatttagattgtacttgcttaagttggctgtaaatcattttgcgattagtgaagatgatatcatgccatcctgcagctgcgtaaggtatcagcagcaagaaataggggagcacataatccgatttagtttcccagaataggtggaaagtgaatccaccaagaaatatcacaatcagagtaatttgtttagtggtcaagcccctccatctaaagataagacaataggatgcgccaatatagataatattctgtataatgtcgcaatatactatatatatggcgtgcaacctgccacgcattatctcatgctctagctttgattgtgttaggtccgcacgctctccgccggtgccgccatatgaaatccatagggactgaaatgttggctcagcccatgtagtggctacctttcgagtgaaaaaatgcgcagcatatagggggtcctgtgtgaatgcttggatgcgttgggctatagcctcctttgccattgcatctacctgattattgtcgtgaggagcttccttgtaaatgtttacaacataattgttgtaccatcctggcgcacgctcgcgagactcttgtaggcccatggcaatccaagccgttttgggggtcgggttgtccaaaggaacgttgattcgactttccataaggaagatcggtatcgccgaagccgctatatatgcgactgcccccaatatgatgaatgtgatgactagaacgcgtttatgcgcaaacaagatgacaagccatataagttcgatcccgataaggaagatgagactgttgggcttaaaccagagtgcaacgaagagacaagccgctgacaatgtgccgtacgcaagacgttttcttatgtcgtcgcttgcttgaatggcagccatctggagcaggcaggcaaggagacaaaacgcgagcgacggtatgttgccgtaaataaatgtcgcgaataaaatgagggggaggaatgccgtggacaatacaatggtcgctttggtgacggcatcattcttgaacattctctccgtgattttacatagagttttcaatgaaactataatcatcaggagattaaaaaggcgaatcggcaacatgttgttcatgccgaaaagttgccccattagagtgcagaataatatatacccggactggaatggatattgttgtaggtagtcatttgcatgcagatttcccaaatcgttgttttgtagccatattgataacgtgattgaggtgccttgatctgcgactggagatgtggttgcaattgatagccaagtcaatccgatgaaaagagctgtataggtctgtatcctatagaacgttttcaacgagggaagtctcttgaattttaaatgtttgcccgtatagtaggctgcccccgcgagaatgaagaagcctacggttcccacgatgctgtatttgagagaatttgtaggcttttcagagtaatccaaggggaaaatcatcgtatgaaatagagcggcaattcctagacaggtgacaatcagtgcggcaaggagtgtgataaatcgattgaaaatgtcttctattttaagatgcgtgttttcttgcgtcgttttattcattaatgttgctcttcacatctgtataattatcatgttgtcttataggggaacgtgttgtgtaagggctgattgggattgctgccaaatcctcgattgccgttaacctgaaccgtgttaagccaactcatggcatcgcgtttattggttgttgcgatatggtgcagcatcgcgaggcggaagaggatggggccaatgcctttttgcataggcgaacctgttggcatccactataaaggttttgcggtcgttcttggcgatcacgtcgaggatgatgccggtgacgatgagcaggaggcctacgatgacgagcatgatggcaccgatcagcgtggggaagtggacgaccatgccggtgcctacgaattcggcggtgacccatccgcacaacatgatgccgatgatgccgatgatcaggccgagggtgccgaagaacggcagcggcttgtattcgcggatcatgcggaagatggtgctcatcaccttgatgccgtcgcctaccgtgtccagcttggagacggaaccttccggcctgtcgcggtactggatgggcatctcgtagagtcgcaggttgttgttcagcgagtggatggtcatctcggtctcgacctcgaagcctcgcgaaagcacggggtaggtcttgacgaaagtgaagctgaacgcgcggtacccggtcatgatgtcggtgacgtgcgcgcggaacaggtggttgatggagccgcgcacgagacggttgccgaagttgtggaacgggcgcttgttctcctggaagtatgtggaggagaggcggtcgccgatcaccatgtcgtagccttcgagcaccttggcgaccatgtcgggcgcggcgtcggcgggataggtgtcgtcgccgtcggccatcacgtacacgtccgcgtcgatgtcttcgaacatggagcggatgacgttgcccttgccttgacgcggctctttgcgtacgatggcgccttccgctgtggcgatctcggcggtgcggtcggtggagttgttgtcgtacacgtagatggccgcgtcgggcagcgccgcatggaagtcgcgcaccaccttgccgatagttacctcttcgttatagcagggcaggagaacggcgatggatggattcttctcttcaagcatgggtaccactatatccttcatgctggagtatcttgcagattgctacgccgagaaaaggggtgcgctacaacgttatcagtggcccgcatcgcatatgtggagagtggaattctccgtatccattggagattgtgggtagagaatggatacgaagaacccccgacgtcgtgaactaaagctcgggtatcgtctagtcacaattccttaagcgtaagtaagggaatggtggcaatcagcggtagcgtgaagaaaagcggcactacatagcgcacgcacatcactggcgccaaagccaatgtcgcccaatacaggagcgggaaagcccaagcgatgagcaggaccttattccctttgcgcttgatcagaagaatcacggaaagcagtaatgccaaaaacggcagagccggggatacccaaaccgtcaacaacgggtgtccgcggaacatgttccaggttccggcatagagccatgcaagatatcccggcaatttggtggtctcattgtagtcggacacctgattcgttgatccgccggcatcaatggttttgccgaattcattccacggagacaatccggtccaacggttcactgccgagctcgtagggtataggtacccgatttcaccccaaaggaaagcacggacgtaatcggacatgtgacctttcatcacagagaagtacatcctgacgtatcccaagggatccgagttgaaagcctcatccaacaatgccgctttagcggggtcggaaatcggagccaaatagccggaccccgtttccgtatcgtagaacatgccaataggggtaggatcccaaggcttgtctgtggtgcgtccagcctcgagggcatccaagtcataataggcgccgatgccctgtatctgctcgttcgtcaacgtgtcatagtcgtacatataggtacgtgcaatttgctgagaaggcacggacagcatctctcgtgcggaatccgcgcgcgtggttgcggtattcgcgaccacaccggagaaggcggccgataagatgaaaaccattgcgatagagatcaacgcggtcagtcgtcggcgccactgcctcaagaatggcagagcaatgagcatcacgatgatggccacatatacaccctgcttacgcataaggcacatgccgagtacggagagtacccacttcgtggcaaatggcactgaagctagtgcttccggagtgcggagcatctcaatcagtaacgtcaccgtaaggatgaagaagacagcgaatagggaatccttggcagtggtcaccgcatatgtctgaatcacgggattgaacaccgtgattccattcgcgagcaggaccagccatataggagcgccccattcgataattttattggccgcatacgccatcgcgaaagcaagggccaacgcctgcaacaggcagaatagtgatactcccgcgttgtatgagccgaacaacagattgccaagctgcataagaccgacaagcaacaatgtatgcgctgccggccaatgcagatcgacaacgccatcattcagaagatacgttgcctgaatcgggccgtcgctcgaatagttgccgggatagaatgcaagaaatgcgggtatccacaagacgaagatagtgatgccgaacagcgcaacgcgtttgtatgcggtgagattcgtcaaccacaatgagaatcttgacggaggtacctcgatgcctttatggccgtcttgataccaattccacagaaccagtatcgcggcaattgctatggctgcggcgcagccatagcaaaagccgcgaatccaaagccaactgtctttgaaggacatcagtcctaaagacccataaaaggacctgcctacggaaaacaccataccgagggcaaaaccaataatggctgacgctacgacatcgatgctcgtgagtgaagccttggcctgagaaagaatctgattgcttgttttcagaatcaacggttctccctcttatactcacggttaagcgtctgatagataatgccgaattgcagattcggattctcaaacggcgctttcacagtgaaggcttccggccaacggctcatgaactcgccgcgctccttcttgaagcggatggccttctcgccggaggcatccgatccgcgggacacggactcgtaatggtggagttcggccgtgggcacgaacaccacgcgcaactgttcacgaatcaccttcaggcagaagtcgacatcgttgtagttcaccgcaagctcctcggtcatgccatgaaccttgtcgaaggcctccttgctgaccataaggcatgcgccagtgaccgctcccagatcacgagccagcatggtggcttcgaaattgccgggatagttgcgggacatctggtagtacaggtggccggggccgtccgggccgaagctgatgccggcatgctggatggtgttgtccgggaacaacagcttggcgccggtgattcccacatcctcacgcatgcaaggtccaagcagctcctcaatccagttcggagtgatgacctcggtatcgttgttgagcagcaggtagtagtcgcctcgtgcctgctcggctccgaagttgatgatgcgggagaagttgaaggacgtcataccttccaacttcacaaccctcacatgcgggtcatcctgttgtgccatctcatagtattcgaaggtgaacgggtccacgctgttgttctccacgattacgatctcgtagttgtcgtaggtcgtgaatttacgaatcgaggacaggcagttgtgcagaaccggcacagcatccttgttcgggatgatgatggacaccaacgggtggtcggcgaggctgtaatcgaccttgaaacgacgcggcataagtggtgaatcaacgaccttgcccttgatgccgcatcgctccaaatgcgtttcgacagaaagacggctgctgtcgagcgtatagtccttctggtcggcacgagcggcagtcgactggctgtggacgcgccaatgataaagcacgcgaggctcatgatgcacgtaccgcgactgctcgccgatacggaacgtcatatgccaatcctgcgagccgtcatactccttgtccggcaattcgagcttgtccatgatggacttgcgtacggtaaggaaatggcacacgtagttcatgcccaacagcagatcgggattccactcggtcttgaagaacggctctcgatacttgccgttgtccagcttgtcctcatcgcaatacagcatgtccgtgtcgggatgctcgttgatggctcgcgtgtagcagaacagcgcatccggctccagtacgtcatcatgatccaggaagcacagaaaatcacccgaagcgattttgattccctcattggtgttcagtgtgatgccctggttcttctccaaagtcacatgctgaatacgatggtccttcgcgcacagtttgtccacggcctgattgaggtcggcgacttccggagaagcgttcaccagaagcagctcccaattccggtaggtctgcttcatgacggagtcggccatggcatgcaggaactgaatcggcgtcttatacaacggcacgatgatggaatacttcggctggacatcgaaaaccgtgcgctgctgaatctccagctcgttagccgaagcgcgctggcgggtacggaaccacttatcgtaatcgccagcggcacaggccggctccgtctgtgtggcccactggtggtgcatcaagtgcgtttgcagcggcaaagagcacaggaacgaatcctgacggtcgctgtccgggaacttcacccagacgatgaacgtatcgacttgggggatatgcagcgaataggagatcttacgcacgcgcaatccgggaagagccggatcggtgtcgagctcttcgcccatgcaaatccaatcgcccatggaaatctggttgccttggccgtcgagcgcgatgatatccacataatccttcgcgctttcgtcgcctaccagcggaacggagacatggccgtggatgatgtctgtggcatcgaggttattgataagcgcatccacaacgacatgtgaatcacccaatagcatcgctttatcgcaattgtgaatcgtcgaagcctccgcgttatgcgacagcctattggcataggacatcagctgcgcggctcgcctgttgaacgttttggaaccctgcgcgcgcgtgcgtccatccgagtctaccgcgctcacggacaccgtctgagattgcgcgacgatgggaaacaccgcgaccgggtcgctggcggcctgtacgaccttcgcaggaacctgcttgccgtcggacgtggtcgagctgatgcggaactgccaatcgtcggagagatgttccgcatgaatcgcggaatagattttgcccggtccacgcaccgtcgcgccaaaattcagcgtttcgatttcgccggtggtgccggttgcagtggcaggccgctgtccgtcatcggtgttgcggaagtagacgcgctgcagatcgatgccgtcatagcccttgtcatacagatacgtgaggtacatgccgcaaatgcgctctccaaggtagccggagacacggcgagccaccggagaataatgagagaagtcgcgcatcttttcgtgcgtggacagcacgtcgaacaggaacgcggagtatgcgcggaacagttcgcgacgcatcacgaacatattgcagacatataccttcgtctggttgagatacttctgcgcgctcggccagatatccgggtacttcagacggatgttatccatcacggtatcaaggtcttcgatatggtggccgaaggaatcccggtactgttcgtagacggtggttttctccaacgcttcgatcggttcgggggcgatgaaatcatgggcggtgatgaccttgcgcatggcttcctcattgaagtcgattcgctgcaacgtctcatcgtcattgcggtcgaacgtcacatcaccgaaaatgaacggctcgtgatgaatcggatattcggttttggagaagttgaagtacctgcggtagtgcaggaagccgtaataatccgcgtcggtgttctgccaagcccaatactggccggtcagctcgcagtaggagcggttcttctcggagatggaatcgccctcatcatcatgcagcagattgggcatccgggaagcggcgagagccgctcccacctgaatgggctgcagcagggcattgtcgggaatatgcgtgtccagtttatgacaggagacgaacagcttgatgtcttcagacatggatgagctactttctttcgctgacagatgctgtgtctaggatacgtcgttccctctatgtgaggaatcgaccggagcaacggccacagaggctacacgtcaccgatgtcgtccgtacgggcgcaacggtaccatagtgcccatggctgatgaagtgtttactcctcataacatcattgtgaccggtggctgtgggttcatcgggtcgaatttcgttcattacgtgtacaacaaccatccggacgtgcatgtcacggtgctggacgcgctgacgtatgcgggcaacctggagaacatcaagggcatcttgggtgaccgcgtggagttcgtgcatgggaacatctgcgacgccgagctgctcgacaagatcgtgccgggtcatgacgcgatcgtgcactacgcggcggaatcccacaacgacaactcgatcgcgaacccggagccgttcctgaagacgaatgtggagggcacgttccgcctgttggaggcggcccgcaagtacgatgtgcgctaccaccacgtgagcacggacgaggtgtacggcgacctggccctggatgatccgaacaagttcacggaggagaccccgtaccatccctcgagcccgtattcgtcgacgaaggcgagctcggacctgctggtgcgcgcctggcaccgcacgttcggcatccgcgccacgatcagcaactgcagcaacaactacggcccataccagcatgtggagaagttcatcccccgccagatcacgaacatcctcgagggattgcgcccgaagctgtacggcaacggggagaacgtgcgcgactggatccacacggacgaccactccaccggcgtgtggaccatcctgaccaagggacgcttgggtgagacgtatctgatcggcgcgaacggggagcgcaacaacatcacggtgctgcgcgacatcctgaccgtgatgggccaggatcctgactcattcgactgggtcaaggaccgtcccggccacgaccgccgctacgcgatcgacagcacgaagctgcggaccgagctcggctggaagccgacgcacacggacttccagaagggcctggaacagaccatcaagtggtacacggacaaccgcgactggtgggagcccgcgaaggccgctaccgaagccaagtacaagcagcagggccagtgagcggaatatgaaaatggccacacctcgaaggtgtggcccctatagcactaagaaagatacacatatgaatttgaaaaagcaagcggacaatgccgtgatggcgagtcgttttcttgctgacgcgcggttccaagtgtatctcgattatgcaagacggcatgtggatacagtcgatcgggaacggctggtcgatctggcggtgaggctgtaccgctggaacgtggaggcatccgccatcacaatcggttatatcggctatatcgagatattcgtcagaaacgcaatcgatcaccggctttgcgaatgggtgtccgggcagcagataacgggcatcccggactggcttgaagccggcaaaagcgatccgatcgggaggatacgggctttgatcaacagccccgagcgcgactatatcgcggaggcccggaacacggcattgcgcaagcagcggcattggcgttccgaccagacgcatccaaggcacggggatgcgatcacccgcgacgacgtgttctcccaattgacattgggcacgtgggatggcatgttgtcccgttccggcaaggaccctgaactcgcccatgtcctcatgggcgcgttccccaacatcgcggatgcatgggcgtcggaactgcgtcgtatgccgaagggaaggcttcccggcaacgacggcgacccgtttgaggacaggctgcgcaaggaactggtggaccgcctcaaatcggttcgtaccatccgcaaccgtatcggtcatgatgagaaccttctgcgggtcgagttcgcgaaactgagatacgacatgttcttcatcctcgatgccttgggccccgaatgcccgaattgggctttccccgataaaggggaggccttgaaaacgcttaatcctgcacgctgcatagcaacgtggcaaaacgattctgaagatagaaagtagggaacgtatgtcgttcgaattcgagaaggacttgaaggtcgaggagacgaacatcccgggcctgttggtgttcgacctgccggtgcatggtgacaatcgtggctggttcaaggagaactggcagcgtgcgaagatgaccgcgttgggtctgccggatttcggtccggtgcagaacaatatctcgtttaacgcgacgaagggcgtgacgcgcggcatccacgcggagccatgggacaagtacatcagcatcgcgaccggtgagatcttcggcgcgtgggtggacctgcggccgggggagagcttcggccaggtgtacacgacccgcctggacccgtctcgcgcaatctatgtgccgcgtggcgtgggcaacagctttcaggcattggccgatggcaccgtgtacacgtatctggtgaacgcgcactggtcgttagagcagaagaagacgtacacgttcgtcaacctcgccgacccggagctgaacatccactggcccatcccgctggaggagagcgaacgctccgaggcggacctgcatcatccgatgctcaaggacgccaagccgatggagccgaagcgcacgctggtgacgggctgcaacggccagttgggccgtgcggtccgcgcgtacgcggaggcgcatggtctgcgtggtttcgagtacacggacatcgacgagttcgacttctccgacccggccgcgtacgacaagtacgattggagcctgtacgggacgatcatcaacgcgggcgcctacacggccgtcgacagggccgaaaccccggagggccgtccaaccgcgtggaaggcgaacgcgcagggcccggctttgctcgccagggtcgcgaaggaccatcacatcacgctggtgcatgtgagctccgactacgtgttcgacggcaccgcggacctgcattcggaggatgaggcgttcgcgccgttgggcgtgtacgggcagacgaaggctgcgggcgacatcgcggtggcgaacgctccggagcactacatcctgcgttccagctgggtgatcggtgagggccgcaacttcgtgaagacgatgatgatgctgtcggaccgtgtcgcgaacccggacgaccagctggagcaggtgacggtggtggacgaccagtacgggcgtctcacgttcacgaaggacatggccgaggcgatcttccacctgctggactcgcatgcccagtacggcacgtacaacctgaccggttccggcgcggtgaggaactgggcgcagatcgcgtcccgcgtgttcgaactgacgaacggcaacggggagaaggtcaagccgatcagcacggccgagtacttcgcgaacgcgaagtcgccggtcagcccgcgtcccgagcattccgcgctcgacctgtccaagatcgaggccgccggctacacgcccgccgactgggaggaaaccttggaagcatacgtgagcaaggaactcggcaagtaggacagatagggcaaaccggaaaggtctgtcagcccattccgacggcctgatgtcagtgtgaaaaccgcgcagaatgacctgcgcggttttctgtttcgccactgtcttggctaagctggtgtgagctgattacgactgtgaagaaagcaggtccttatgaaaggcatcattctcgccggtggctcgggtacgaggctgtatccgttgacgacggtgacatcgaagcagctgctcccggtgtacgacaagccgatgatctactatccgctgagcgtgctcatgatggccggtatccgtgacattctcatcatctccacgccgaaggacctgccgaacttcgaacgcctgcttggcgacggcagccagtacggtgtgaaattctcctacgtggtgcagccgtccccggatggtctggcgcaggcgttcctgctgggcgaggagttcatcgcgggcgagccgtgcgcgctcgtgctcggcgacaacatcttctacggcaatggactgggcgccacgctgcgcaaggcgaaggcgaaggcggagaacggcgagggcgcgtccgtgttcggctactacgtggacgatccggaacgttacggcgtggtcgagttcgacgcggacaagaaggccgtgtccatcgaggagaaacccaggcatccgaagtcgaactacgcggtgacgggcctgtacttctacgacgagcgcgtggtggagtttgccaagcaggtgaaaccgtccgcgcgaggcgagttggagattaccgatctgaacaagatgtacctggaggcgggcgcgctgaacgtgcgtacgctgggccgcggatacgcgtggctggacactggcacaatggactccctgtacgaggcgggcgagttcgtgcgcaccgtgcagcgcgcgcagggcctgcccatcgccgtggccgaggaaatcgcctacgagaacggctggatcacccgcgaacagttgtttgaggccgccgagaagtacggcaagagcccgtacggcaagcacctcaaagatgtggccgacgacaagatcatcgttaagccgaaagctgcctgaagccgtttgaagttttcgcacggaggaagaagtatgcccaccgtttcatttgtcgtcattgcgtataacgtcgagcgatatattgccgattgcctgcagagtctgcaaaaccagaccaatccggatttcgaggtcgttgttgtggacgatgcgagcaccgattccacgaaatcggtcatcgaatccgcgatacagaatgattcacgcttctcgttgatcgctaaagacaaaaatgagggtgcgcatcttgcccggcgtacgggcgtctcccatgccaccggtaagtacgtggtgttcgtggatggtgacgaccgtctgcaggataccgcatgcgaagtgctttcctcatatgcgtccggtcggaatttcgatattctgcgattcggtcgtaccgtggtcccccacggttcggccaatcaggatacggcgctccaggaggagcggtcgttcaatctacataccgaagacatgcatggtgaggatgtgctgaggtcggtgttctccgaagatttcggaacccgcaacacgtggagtcttatcgactgcatgttcgacggcgaattcgttcgtagtggattcgccgcaacgtatgatgaaccgcttggacgcatgcaggattcatacgagttcttcgtattggcttcacgggcgaaaacaatgcggttcttcatggaataccgtggtcttcgctacaatctgggtgccggggtgtccggttccggtcttgagacgttgcagaaattcgagcatggccatacgggaatccattcctccatgaatgctgtgctgcggtatgcggccgactccggtgacgacaacatgactcgttgcgcgcaatggtacaggcatgtggtgcttggaatcgtgggacgtgaatgggtgatgaggttgacggagaccgatcagattgccggtatgcgttcgctgcgccgtgtttggggtgatgagaataccgcttacatgttgttggattctcttacggcacgtgcgcagtggttcgtcgaccatgatgcggtcccgtcggatgcggatccgtatcgtcgctggttgacgttgctgaacagtctggatttgaacggcatttccgatacggttattcagcaacgcgtgaacggtttcctcgcgttgaaagggaaactggacaagcacgagttcgaaatcaaacaggcgaaaatagccgagcaacaagagcgatatcggcagcaactccagctggaagagcaacgccgcgtgttgaaaacaggaacgcccattcgccgtgtggttgatgcggtgttcccggaaggtagcgaacgacgtaacctactgcgccgtgccgcgcatcggattcttcaccgttaaaaagaacggagatatgactgtgccatccaaaggacgtcaatggaaacgatgcggtatttactgcatctacgccaaatacggtcatgtagcgcgctacgtggattatttcctgagcaagctcgtgaaatcactggaccagctggtcatcgtcgccaacggcgaactggacgcggactctcgtaagaggcttgaacgattcgctgataggatcatcgttcgtgagaacaagggccttgatatcgccgcataccgccaagcgctgctttcaatcgggtggagcaagcttgccgcctacgatgaggtcatctgcctgaacgatacgattctgggaccggtttttccgttctcggagatgttcgaaacaatggacggcaagaacgttgatttctggggcatcaccgcatatccgcacgacgtcgccttcggcgaggagattccgacgcatctgcaatcatattggcatgcgtatcggaaatccctgatcacttccaaagcgttccagcgttattgggaaaccatgcccgtgtatgaagactacgcggaggcgacacgtaagcatgagatgacgttcaccaaacggttcgccgatcttggatttacctgggcctcatatatcgactatgacaagtaccggtcgcgttcgacgtatccgatgctgtacgacccggtttccctgattcgcgacgaccgatgcccggtgttcaagaagcgttccttcttcgttgaataccagtactatttcaaccagaccgccggtcagcccggtatggaactgttggagtatctgcgccggcataccgattacgacaccgatctgatatgggacgcggtactgccggcatacaatattgcggatatcgcaaaagccgtgcatctcaactacgtgttgccgacccgtaccgtcaatcctcgtgaggacggggatgctccggtgcgttcggcgttcatctaccacgtctatttcctcgacttgctggaccagacgctgggatatcttgccaatctgcctgaggacaccgacctgtacatcacgacgaatgagtcgaaaatcgacgacatccgcaaggcaatggataagcgtggcttcactcatacggtcgatttcatcccggtgcaaaaccgcggtcgtgacgtgtcggcgctgctcgtcggagcgaaagacgtcgttctcggtggaaaatatgatgtcgtcggtttcgcgcacgacaagaagtccgggcagaaccagcagaacgggcatcaggggaccgagaccgaaggattcgcctacaagctgctggagaacacgctcggctccaaggattatgtgcggaatatattgacgttgttcgcgaataatccgcgcttgggtatggcgactccgccgccgcctatccacgccctttatttcgcgcatacggtgccgcacgattggggcatcaacttcgacatcaccaaggatctgctggaaaacaagcttcacatccacgttcctctggatgaacgcaagcccagcgtatccgccatcggatcgtgctattggttccgtgtggaagcgttgaagcccctctacgaatatgggtggcggtacgaggacttcctgccggaaggcaagatgggtgtcgatggcaccatctcgcacgccatcgaacgggccaatggctatatcgcccaatcgcaggggtattaccctgcatgggtgatgtccgacaagtacgcacgcatcgaagtggactccctgtactacaccgcgcagggcttcatggacaccaccagtggcgtgcgacgcggcgaaagcgtgatggagagcctcggcagcctgaggtcgtcgttgacgttcgttggccggctgcgccgtacgacgcatcttgcgctcggtaaagtgttccgtgcggtgacttacccgctacccaaacctatgcagagccggttgaggaaagccgcttgggtgccgattcgcacggcatatgcggtgctgaagaaagtacgctccggtttgcatcgatagagacgagtggcaggtggattcggcggagaaagtcgggaaatcccctgtctgagtagaataaggtgtttatgaagaaagcatgggacagactccgcgaccgttaccattactcactggtggtgttcaaggagcttgtgaaaaccgatttccagttgcgctaccaaggttccttccttggagtactgtggtcggtgctgaagccgctgatgttgttcgcggtgatgtacatggtgttcgtccgattcctgaagttctccgacggtacaccgagcttcgccatctcgctgttatgcggtacctgcctgtggagcttcttcaatgaatccacatccatgggcatgtccgcgattgtgaaccgcggtgatctgcttcgcaagattcatttccccaactacatcatcgtcgcctccaccacgatgggcgccatgatttccctggccatcaacctgctggtcgtcatcgtgttcggcttcttcgccaatgcgcattacacgtggcatgtgcttctggtcccattgaatatcctgcagctatatgcgatcgcactcggcgtggctctggtgttggccacgctgtacgtgtatttccgtgatgtcgcgcatatttgggaagtcgttttgcaggcgatgttctacgccacgcctatcatctacccgattacgatgatcacccagcgtgcgcctgaactggcttgggtgaccaagctgctcatgttggttccaaccacgcagacgatcatggatatccgacataatctcatctcaccggaggacgtgccgacgatttggacgctggtggacaaccgtttgctgtgcttgttgccgtacatgctgtctgtagtgattctgtggttcggtatccacgtgttccgcaagcatagtgccaagttcgcggaggtgctctgatgactgtcgttgagaataacgtcaatactggcaacgccgccacggctgcagatgtggcggatgaacgtccggtcgtgctgaaggtcgaccatgtcgccaaatccttccgtctgccgacggaacaggccagcggcctgaagatggccttcctgaactggaccaagggcattaagggctataccgaacagaaggtgctccgcgatatcagcttcgaagtgcatcagggcgacttcttcggcatcgtcggacgtaatggttccggaaaatccaccctgctgaaaatcatctcccaaatttatgtgccggaacagggcacggtggatgtccgaggcaagctggtgccgttcatcgagcttggcgtggggttcaaccccgaactgaccggacgtgagaacgtgtatctcaacggtgcgctgctcggcttcacccgtgacgaaatcgccgccatgtatgacgatatcgtcgagttcgccgaactgggcgagttcatggaccagaagctgaagaattactccagcggtatgcaggtgcgactggcgttctccgtggccatcaaagcccagggcgacattcttgtgctcgacgaggtgcttgccgtcggtgatgaggcgttccaacgcaagtgcgacaacttcttctctgaggtcaagaaggatccgaccaagacggtcattctggtgacgcacagcatggactcggtgaagaagtactgcaataaggccattctgattaagaacggcgaaatcatcgagcgtggtgataaggacgtggtggcggaccgttacacgttggagaatttcgcaacgaagaaaaccgaaaaggaagacgatgcggataatgcgtatccgaccggtctgaatgcacgtgttccgttcctgaagatctggccggtttccaaccagctgtcggatggtgttgaaccgttccgcttcgatgtcgaatacgagttcgcggaggatgtttccttctatctggccatttctttgattgacacgaaacgaggtggcgtcgtctgcgattcgggttcggtgccgatgaagcagcgtggacggcaacgtgttggttttgagattccggtcagcgacttcaacaacagtgatttcaaactgcttgtctcgttgcgtctggacaatcccgaagaccccaacaggacggatatgatcgccttcaccaatgacgacaattcctgcttcttcgctgtccgaaacaacaggaacaagacctacgcgttgttgagcgaccgcgctctgcaattcaagatgattcagtgacgaggcgtcttttcgttcgaatcggatggtgtctgcagctcgattgaggtcggcaatatagctaagtgactattgccggtctcaattcgtatgtgcttttgtttcgtggattggagccaatgatggcaattaaacataaacatatgagtgaaaccgtcgatgatatgaccaccggatggcgacggatactgattggttccggcttcttttgcctcagcgttatgatgctgtggtggtggtactgcgcgatcagggcgacgtcgccacaaatgattgacattgatgtgagtgggaataatcgttattcaacgattttgctggttgttctgcttgtattcattgtggcggtatcggtgtttgcaaaagtgagacaggccgttcgtggcatctggcatatgatggtgaggtataagtggattcttttcgtcatcgtgatttgctggcaaatcgtgatgttcttcgcattagggccggcaacgggctttgatgccgaatgggttattgactatgtcgtcaatccgcaagtcattacggacaaagggttggacggagcttcctatctttccaattcccctaacaactacctcctgttcttcgttgaactcgggatttacaaggctcttccctttgtgacaagccttgaagcgctgttgcttgtaatgcgagtgatttccgttctggtagttgacgtttgtgctatcggaatgtatgcagtggccaagcggtatcttaatgattcggtagccaatatcgttctcctgctttggtgtatcctcctcggcctgtcgggatggtgcctgcatccgtacagcgataccttttgcatgccgttcacggtgatcaactgcgctttctgcttctggctgctgtcgcagaaaaccattgataaggcttttctgtccagttggaagaatccggttcttatcttcctgtttggcctgaatctggcggtcacctataacttgaagccatcagctgtgattcctgtaatcgcattgttggttgcattgcttctgaaaatgaatcgccgacactgcgtcgcattgctggcgtcactcattctcatggccggtggcttcctgtgtgcgaatgttccctacaaccatgctgtccgcactcagcagctcgtcccctacaaccatgagctgtcgctgtccccacagcattatgtcatgatgggaatgaccggcaccggcggatatttggaatccgagtaccaattcaccatgtcgcatctcacgtatcaggagaaggtggatgcgaacaatgccgtcatcaagcagaggctgcgccaatatggcgttgtaggatactccacttttctgctgacgaagttcagaaacttcacctcggatggctcgttcggcgttcagcgatatgccggcaatgtcttcctgcctagaccatttgcgaatgagccactgaacgccgtccatgaaaatctttttatccaaaaagtatcccatctttacactggcggttccaactccaacagaacgctgattcagatagagcagattttctatattttgttggtgagtggaatcctgatgaattgtttgagaatgtctaggactttctttaaggaggaagaggtactttcgatagagaagttcggagaacatgtttcttacgatgtatggctcgccattgccatggtcggtgcaatcatttttttactgatttttgaatccgggcattccaggtatctgatacagttccttccgattatgttgttcatgtcggggattgggctttcctcaatttcgtatgtgcggaaataaacgcaggaataagcgttgtcccgcctcttcggaggaagagacgggacaacgcttattcgtctgacgcgaatcacgcgattctaggtatctccacttccggactactcagaacgattcgatcagtccctgcggaacaggtcccttgtgtagaccttgcctgccacgtccttgaggtcgtcgttccaacggttggagatgatcacgtccgcttcgcgtttgaacgagtccaagtcgtgcgtgaccttgctgccgaagaaatcgggggcgtcgagcgtcggctcatagacgacgacctcgatgccgcgcgacttgatgcgcttcatcacgccttggatggcggactgacggaaattatcggaaccgctcttcatcgtcagacgatatactcccaccacaggtttggcgatgccgttcgccttggcccggtcgacgagctcctcgatttcgtaggcgatgaagtccttacgtgtgcggttcgactccacaatcgcctcgatgaggttctgcggcaccttatcgtaattggcgagcagctgcttcgtgtccttcgggaggcagtagccgccatagccgaagcttgggttgttgtaatcgtcgcggatacgcggatccatgcacacgcccttgatgatttcgtgcgtgttgagaccgcggctttccgcatacgtgtccaactcgttgaaataggcgacgcgcaacgcgagataggtattggcgaacagcttgatcgcctccgcctcagtggtaccgaccaccagctgggggatgcccctcgacccatccgggttgacgcggtccttctcctccggggcggcaccgtgggcgagcaggtccacgaacgtgtgcgccgcctgcacggcctccgcatcatcctgcggcgcgccgaccacgatgcggctcggatgcagattgtcgtacagggcgtggccctcacgcaggaattccggagagaacaggatacggtcatcgtggaaccgttcgcgaatctgctgggtgtaaccaaccggaatcgtcgacttgatgacgatccatgcggtttggtcgtacttgcggattgcctcgatcgccgcctccacgctggacgtgtcgaagtagttcttctgggcgtcgtaattcgtcggcgtggctatcactgcgtaatccgctcccgtatacgcctgttccgggtcgagcgtcgcctggaagtccaacggccgctcgccggaccggtccgcatcgaggaatgcggtgatcttgctatccacgatggggctcttgccgttgttgagcagctcgaccttctcaggcacgatgtccaacgcgtgcacctcattatgttgcgacagcagcaacgccaccgacaatccgacgtaaccagtaccggcaaccgcaatcttcacgggacactccttctacgatgcgctacacgtaattctagccgtggtcggagcgcaacagtaaagatgctacgtgattctatcgtgaactgaactacgtgacgatgccttcttacctatgctgtgtgttcggtacattgaagaaatcggtattggcgagataacctttgccggcagtcatgtcgtattggatgagccgatactctttgagcagggttttctgctgtttggagaggtccttgcgtttcacaacatcgccgttcttgtccagatatgtggtggatgtatcgttcgtgaaaccgccctcgccgagcacgagtcgttccacggcaggcagcttggtgcgtacggtggacaggaacgcgagataaggagacactttcgcgttcatgtgctcactggccatttccatgaaatagttcggtgatgtgtagttcgtgccggctttcgatgggctgagcttcataccggagccggccccattggatagagaatggtcattgccggtgttaggtgtcagttttggtatgttcatcgccttctcccgtatgcggttccgctcgagactggtcaattccgtggcatcttggactctgggggtgtatcttattacggatcatccgttcgtccgcgaattgctttggactcagtggtttgccttcgataagtactaccagacgagattgccgattgtatggatgctggcgatttctgccttcgttttcgtcgtcgcgctcatgctcgaggtaattcgcaaatcgttgtttgcgattatcttcaatcgggaaggtgtttttgaacgtatgtggggcattgcggtacatacgattggttccgtttccaatatcagataggaacagtgtcaatcacaacaacggaggtagcgtgcccagctcatgctgagatggatcgaatgatggagtgaatccctacttgcttacttcatgttcttgaccttgcggtcgtagacgtatttctccagcaggcggatgcggcgggtaatagtgcagcggaaacgctgctggcgggaaaggttggcgagcagctgatcgagttccgccttatcggccttgtgctgggcctgattctcgggcaggttgaagtcgggggacgtggcctcttccgtgcaggctcccaccatcgtgtagtagctgcgcatcggcagcacgccgtgattcaggcagaagcggaagttgtgcgcgccagcggcgaaattgtcatggtagaaaccgaagctgcgttcctgatgtgtgactgatccggcggactgcagccagttgtacaggttcacgttgaggtcggcgactttgttcatgcgggcgtacagttcgccggcgaccatcacgtcctgcgcgtacatgccctccgggaatcgcacgccgtcccacagttcgcgcttgtacaggcggcaccagttcgcctcgttgaaatagcgggcctccgtgttgcgcccgagcttgtctccgatcaggcgcaggctcttgcagaacacggtctggtaggcacgcagcggattcgtggacacgctcacatgttcgggttcggcggcgccttcactggcttccatcgcgacttcctcgatctgggagacgccgaactgcctccagcgggccttgctcatatccgcgccggtagaaatcagcgcgtgcagcagcaactcgatgttgcgacggtcgaggatatcgtcgttgtcggcgaatgcgatgtactcgccatgcgccgcatccaatccggcgttctgagccttcgcgatgccgccgttcgtctggtggatgacgcgcacgcgattgtctcgccgctggtattcgtccagaatcatcgggctggaatcggtggcgccgtcgtccacgaggatgatctccagatgctcatacgactgctgaagaatcgagtccacgcagtaacgtaggtatttctcggcgttgtacaccggcacgacgatcgagacaagcggcgaaacctgcgtcatggcgaatccttcttcacgtgtctgcgccctgcggtcgtagccggcaggccgccctgtttatgcggacatgaacagtatgccacagggtaggcgcacgtcgcgcgtgcaccaagtaaagccgaaaacccagccagcgcaagccggaagcccgaagcctgtaggagccgctgaattcggaatcgcatgtgtacataggtgcctctcgctacactggtggacaatgaaacgcgtgtgtaatcgcacatggaatcatgaaaggttttgaggcatggcaaatgcggcggagaatacgcagcacggcccgtcggagggcgcgcagtacccggatttggtgattgtcggcgcgggcctgttcggtctgacggtggcgcagcaggcggtggagcacaccggcgcgcgcgtgcgcatcatcgatatccgtgaccacatcggcggcaacgcgtactcgtactttgatgaggagaccggcgcggagatccacaagtatggcgcgcacctgttccacacgtccaataagcgtgtgtgggactacgtcaatcgtttcacgagcttcacgaactatgtgcaccgcgtgtatgccacgcatgacggcgaggtctatccgctgccgatcaacctgggcaccatcaatcagttcttccacgcgcgttacacgccggccgaggcacagaagcttatcgccgagcaggcgggcgagctggccggcaccgatccggccaacctgaacgacaagggcatccagctcatcggccgaccgctgtacgaggcgttcatcaagaactacacgggcaagcagtggcagaccgaccctgccgagctgccggcggccatcatcaagcgcctgccggtgcgcttcaactacgacaaccgctacttcaaggacacgtgggagggcctgcccgcggacggctacaccaagtggatggaacgcatgatcgacgatccgcgcatcacggtttcgctgggcgtggacttcttcgacgagtcccagccgtacaacaaggaggcgctgaaggccgcgggcgtgccggtggtgtacacgggtccggtggaccgttacttcggttacgagcttggcgacctgaagtggcgcacggtggacttcaaggaggtccgttacgacgagggcgaccacttcggttgcccggtgatgaacttctccgacgctgacgtgccgtacacgcgcgcgatcgagttcaagaacttcaacccggagcgccgcgatgcccagaacccggacaagaccgtggtgtgggaggagtacagccgtttcgccgagcgcggcgacgaaccgtactacccggtgaacacggacgcggacaaggccctgtacgcgcggtacgaggccaaggccgcggccgagccaaacaccgtgttcggcggccgcttgggcacctacaagtactatgacatgcaccaggtgatcgacaccgccctgaccgcctacgaggaacaggtcgcgccgctgctgaagaagtagaccgtcgtttcaccagaggattaacgatttagcttgaaaccgactgaatattgctgaggcaatagccggtttcaggcttctgtgttttttgggaagccaaatttcctggggtacttaaggctcgccacgaggagtacagttgtctgtaacgcacaatgtggcgcgtaagacgaggggcgtatctcgcaagtggggtgcgatgcagttgaaggagtgcatgtcatgactgatccgaatgccaatccgaacggccaggtgccggggcagcgagctgacgccaatccgactgagccgttaaatgcgatgacgggggaagcaggaaccgccgccaacaatgctccaacccaagcactcgcagcgggcgaacagcccactcaggcgttcactcctgttgagcagcctacgcaggcgtttacacctgccgagcagtccacccagcctcttgcgccggtcaatcagccggtaccgcctacgcaggctttgccaccagtgactcctgccgctgcgcccgcgcccgcaccgacagcgcccgcgcctgcgcccgcaccagcagcacccaattcgccctatccggggacggctccggcagcgtcagtgctccggtatccgggcggcggggccgtgcctccgcaaacgccctataacccgtatatgcaaggcggccaaccgaacggccagccgggatggtctggttcttacggcagtgtgccgcctgaagcgaaccagaagtacaacggcctggctattgccggttttatctgctcgttccttgtctcactccccggtctgatcctgagcatcgtgggcctcaaccagattaagaaacagggcggcaagggcaagggcttggccatcgccggcatcatcatcagtgcggcgggcatggtgatacaggtaatactggtcatcgcgctgatcgtcggcggtgtctcgtacaccagcaaggctatagatgaggcgaaaaccgattccttctatagtcagtcctcttcgggcaacggtgatagcagcgataagagcaaagctcaagataatcttgacgatgcgctggacgacacgttgagcgaaacccatgacgatctaaccgacggcgattatgggctgtacgattcgattcaggatttcgtcgacttttcggaattcaaggactccattgaatccgaagcggatacgtttgcagataccggcatcaccttcaactaccgtgtcgacggtgacaccttggtgtacgagtacgtgctcgacgacagctacgcctcgctaggcgataccgtcgcttcctcactggatgctatggacagcacctatcaatccaccgcgaatctgctgggctcgatgtgcaagacctccagcggcaaggcatcattgcgcgtcatcatgcacacgcaaagcggccagtcgctgtacgacaaaacctggaccgaaaagtagcaatcccagcgaacgtgcgttttggtcgattgaaggccggtctgcttgctccttggacggatgcttctgcggaaggaactgccaaggagtaggcttacaggcatgagactcgcacgtttttctttgaatgattcgccgcgctacgccttcgtacaaaaggacgaaacggacggcaaggactacctcatcgaacttgacggccatccgctggccggcgaccaggtcaagcctaccggcaaccggtacccggtcgacggcgacggcatccgcctgctctccccggtcatcccctccaaggtttacggtctggccaagaactacgaggcccacgcccagttcatgcacgaggccggccactccgaaatcgcccacgcgccggaagacatggtgatcttcaccaagccgtccacctcggtaatcggccccgacgatccgatcgtgtacccggcctgctccaaggacatgaacttcgagccggaagtggccgtggtgatgggccgtatcgccaagaacgtgtccgttgaaaacgcgatggattacgtgctcggcttcacctgcgtgaacgacgtgacgttgcgcgacctgcagggcatcgaccccacgtggacgcgcgccaagggtttcgatacctcctgcccgcttggcccgtggattgtgatgcgtgacgacctcgactggaaggacgccaagatttccttcacgctgaacggcgaggatgtgccgatggcgtctggcaccaccgcgaacctgattcacggcatccccgagcagattgccgcgatttcgtcgttctccacgctgttgcctggtgacgtcatcatgaccggcaccccgaacgcctccggccacctcgacccaggcgacgagaccatcgtgcacgtcgagggcatcggcgatctgcgcaacgtaatcgttcgggcgtgactcgttctggatcccctctctgaggggagccgtccaggcggagaagctgactgaggggaaccaagaacgcgccttacgctcccggcaataccgcgtgcagggcggtcatcaccaccaagctgatgatggccgtcactgtcagcgagaagccggcgagcttggcgttgccggttagcgaatcggtgaacttggttgagaagatcgtgataggggcgaacgagcccaacacgatgatctcgcgaatcctcatgtcgaatggcagtaggaaccaggcggccacggcgataatcgcgccgaataccatgcgccagacaatcaccttgcccaactccaccttgtccttgcgattgttcggaatctccatcatcagtccgatcatggccatcgcgcagaaggcgttcgcattggcgaacggggtgatgagcgtaacgatgggctgtgggatcgtgatgtgcaggaacatgaacaccagcatcagcatgtagatgtcgaaggaaatcgagcttaggaagtccccggcaatattgcgcagacgcaggatgagcggtagcgacttgaaattgtcatccatatgcagcagcgtgcgtgtgatggtcagtgacccggccgtggccacggtggcgttgccgatatcgagcatgatgatcggcagaccggcggacgggcccatgaacgtctgaaccacaggcaggcagaacgcgcccaggttcaggcccgaggcgttgagcatctggaaggcgcggtagttcttctcgtcgccgcgagaaccgaaatacacgatgaacagcggaatcgcgcaggcgaagaagccgaacaacacgatccacagcatgcgcatgtcgtgcttgttcgtggcgaacgacaggataatcgcacaaggaagcgtcagattgaataccagaccctgcacgattttgtaatcacgctcgccgaaaatgtggacatgtttgagtatgtagacaccgatgataacgagcagcagcgaaccggcctgaaaaatcatgttcttctcttatcccacaagcacccgccgcagcaccggcggcggtcaggcgcataacaaaccagccgtgagtataggagcgttcgcgcggcgctggcgcggggcggtgcatattgtggacagtcccgtaacgttgatatgccatgctggcgagatgaatatatccaataccaagtggagctcggcacgatagagaggtaggaaaacatggcagagcagacggtcaccgtaggcgttggggcattgagcatcgaggacgttatcgccgtagcgcgcggcggtgccaaagtggcgatttcggacgaatcgaagcatgagatggcgctaagtcgcgcggttatcgatcatttggccgacgacaccgtgccgcattacggtatctccaccggattcggcgcgctcgcctccacttccatccccaaggaacagcgcgcgcagctgcagaaaagtctgatccgctcgcatgccgccggtgccggaccggaagtggagcgtgaggtggtgcgcggcctgctggtgctgcgcctgagcaccctgtgcaccggacgcaccggtgtgcgcccggaaaccgcgcaggtctacgccgatatgctgaacgccggcatcaccccggtggtctacgaatacggttcgctcggatgctccggtgatttggcgccgctcgccgcctgcgctttggtggcgatgggcgaaggcgaggcccgcaacgctgacggccgcaagatcggcggcggcgaagcgctgcgtgcggccggcatcacgcccgtcgatttgaaagagaaggaaggcttggcgctggtcaacggcaccgacggcatgctcggcatgttgtgtatggccatcaccgatctgcgcctgctactcaagacggcggacatcgccgccgcgatgagcgtggaaggcatgctcggcaacgaccgcgtgttcgccgccgacttgcaggcgctgcgtccgcatcgcggccaaggcgattccgccgcgaacatcgtccgcatgctcaagggctccggtctgatcgaggccggccgcccgggctccaccgtgcgtgtgcaggacgcctactcgttgcgctgcaccccgcaggtgcatggcgccgcccgcgacaccgtggaatacgcggcctccgtggcgggcgtggaactcgcctccgccatcgacaacccgtgcgtcacgctggacggccgtgtggagtccaacggcaacttccatggcgcgccgctggcctatgtgctcgatttcctggcgattccgactgccgacgtagcctctatctccgagcgtcgtaccgaccgcttccttgacgtggcgcgcaaccgcggcctgccggcgttcctggctggtgacccgggcgtggactccggtttcatgatcgcccagtacaccgccgccggcatcgtctccgaaatgaagcgcaacgccgtgcccgcctcggtcgattcgattccgagctccgccatgcaggaagatcacgtgtcgatgggctgggccgccgcccgcaagctgcgccggtcgattccggcctttgcgcgcgtgctggccgtggaactgctgtgctcctgccgctccttcgacttccgcaagccgtaccgtccgggtgcggcgggcgccgccgtataccgcgtggtgcgccagtacgccaacgaaatcggccccgacgtacgcgatacctggaccaccccgcaaatcgaaggcgtagccaacgccatcctctccggcgaaatcctatccgccgccgaagctgccgtcggcctcctgaaatagatgtgagctccctcatcagagggggctactgttccccctccccaccaaaatccaaaacttgagtcacctgcactcaagttttgggaatagaatgggttccaggtcggttgaccatatcagacaacgacaagttgcggtctgcggtggcgcttgcggggctttcgaagcccgcgagccgctccgcgcgggccgcatgatatggaggaatacgatatggaacagaagttcaccactatggcccaggaggccgtcggcgacgcgattcagagtgcgtccgccgcaggaaacgcgcaggttgagaccctgcacgtcatggatgcgttgctgcgtcaggaaaacggcgtggtgcgctccctcatcgaggccgcgggcggagacccacaggccatcggcgccgccgtgcgtaacgctttggtcgcactgccgagcgcatccggctccagcacttcgcagccgcaagccagccgccagctgaccgccgccatcgcccaggctgagaaggaaatgcagcagatgggcgacgaatacgtctccaccgagcacctgcttatcggcatcgcggccagcaagccgaaccagtcggccgaaatcctggagaagaacggcgtcaccgcagcctccctgcgcaaggccgtacccggcgtgcgtggcggcgcgaaggtcaccagcccggacgcggaaggctcgtacaaggccctggagaagtactccaccgacctgacggccgccgccaaggaaggcaagctcgatccggtgatcggccgtgatcaggaaatccgccgcgtgattcagatcctctcccgtcgtaccaagaacaacccggtgctgatcggcgagcccggcgtcggcaagaccgccgtcgtggaaggcctggcccagcgtatcgtggcgggcgacgtgcccaccaccctgcaaggcaagaagctcatctcccttgacctaggctccatggtggccggctcgaagtaccgtggcgagttcgaggagcgcctgaagagcgtcctcaacgaaatcaagaacgcggacggccagatcatcaccttcatcgacgagattcacaccatcgtcggcgcgggtgcggccgaaggctcgatggacgccggcaatatgctgaagcctatgctggcccgtggcgagctgcgcctgatcggcgcgaccacgctggacgagtaccgcgagaacatcgaaaaggatccggcattggaacgccgtttccaacaggtgttcgtgggcgagccgagcgtggaagacaccatcgccatcctgcgtggcctgaagcagcgttacgaggcgcaccacaaggtgacaatcggcgatgacgcgctggttgccgccgcgaccctctcgaaccgttatattccgggccgtcagctgccggacaaggccatcgacctggtcgatgaggcggctgcccacctgcgtatggagctcgactcctcgcctgaggagatcgatgaactgcagcgtaaggtgacccgtcttgaaatggaggaaatgcagctcaagaaggctgaggatcctgcatccaaggagcgtctgggcaagctgcaagccgaactcgcggacacccgtgagaagctcagcggcctcaaggcgcgttgggatgcggagcaggccggccacaacaaggtcggtgacctgcgtgccaagctcgatgacctgcgtgtgcaggcggacaagttcacccgtgagggaaatctggctgaggcctcgaagattctgtacggagagattccggctattcagaaggaactcgccgccgcggaaagcgcggatgccgaatctgccgatgccggcgcggccaacccggccgatgagccgatggtcccggaccgtgtggacgccgactcggtggccgagatcgtctccgactggaccggcattcccgttggccgcctgatgcagggcgagaacgagaagctgctgcatatggaggactacctgggcaagcgtgtgatcggccagaaggaagccatcgccgccgtgtccgacgcggtgcgccgttcgcgtgccggcatctccgacccgaaccgtccgaccggatcgttcctgttcctcggtcccaccggtgtgggcaagaccgaactggccaaggcgctcgccgacttcctgttcgacgacgagaaggccatggtccgcatcgacatgtccgaatacatggagaaggcttcagtctcgcgcctgatcggtgcggctccgggctacgtgggctacgagcagggcggccagctgaccgaggccgtgcgccgccgcccgtattccgtggtgctgttcgacgaggtcgagaaggccaatccggagatcttcgacgtgctgctgcaggtgctcgacgatggccgcctgaccgatggccagggcaggaccgtggacttcaagaacacgatcctgatcatgacctccaacctcggctcacagttcctcgtgaacgaggacatggacgccgacgccaagaagaaggccgtgatggacgccgtccacatgaacttcaagccggagttcctgaaccgtctggatgacatcgtcatgttccacccgctcacgcgtgaggagcttggcggcatcgtggatatccaggtggctggcgtggcccagcgtctgaccgatcgccgcatcacgctggacgtcaccgactcggctcgcgaatggctggccaacaccggttacgacccggcttatggcgctcgtccgctgcgcaggctggtgcagaccgaagtgggcgaccagctggcccgcatgctgctggccggcaaggtccacgacggcgacaccgtgctcgtcgaccagaccggcggcgaacatctggagctctccgcctgggcgagcgaccaaatcgtctccgacgatccggatgtgagcgtggacaacgtcaccgaagataagtgacaatcactggctcccctctctgaggggagctgtcagcgaagctgactgaggggagttcgggcggtttcgcaacagtgatttttctctgcaaaatctcttaaacaggtgggtatggtagcagtcatacccactttttcgtctttgtgggtctatctcgatttcgaggggctgatttgccccctttcggaggtctacttccgtttcgaggggctgctcttctgccgaaccgcgagtatcagcggctttatggcaacgccattccgccattgttgcgccgtgtctacttggctaccagccccttgaaatggaagtagacctcctgcaacatcgaaatcagccccttgaaacggaagtatctgtccgatccgtctcaattgtgttccccaagagtggaagaaccgtggcatcaaggtgttcactgtcgcatatggtaggaaagtgagtgttaacggacgaagggagagccagtgaccggacgattggcgccgacgccgtcggggcgcatgcatatcggcaacgtgtacgccatgttgggtgcatggctttcggcccgttcgcgtggcgaccgcatgctgatgcgtatcgaagacgtggacaagccgcgcgtggttgccggtgcggaccagctcatgatggacgacctgcattggctcggcctcgactgggatggcgaaccgatgttccaatcccagcgcactgagcgctacgaatacgctctcgaatgcctgcgctcgcaaggtgtgctatacccctgtttctgctcgcgtgccgacattcgcgccgcctcggcccccaacgagggcgacggcttcatggtgtaccccggcacgtgccgccgcctgctgcacgaccatcccgacgaggtccgtgcccgtctgtctcgcggcgaccagcattccatccgtatcgccatgccgaaaccggcagcgggagaaaagcaacgtacagtgcctgacgattccgctgcgctgtcgggagccgtgccgccggaacagcagggcgatgccggaatcgttgatggtgtcgcatgctttaacgaccgtgtctatagtccacagcactacgatttggcccgcaaggtaggcgattccgtgattcgccgagccgatggactgttcggctatcaactggtcgtggtcgtggatgacctcgatatggatgttgatgatatcgtgcgcggccgtgatctgctgcgctccaccgcgctgcaaatgtggattcgccagtgtctgttggctggcggctttgagccggaatgcggcaacacggaaaagcctctcgccgagcaccccgagtatgcgcacctgccgctcatcgacaatgcggccggtcggcgtttagccaagcgcgaacgttcgctggatatgggagccttgcgcgcccgcaacgtaacccccgagcaaatcatcggatactgcgcctggttgctgcgtctgcaacccactccaatcccttgcaaacccgccgatctgctggcagatttcagctgggagccgctgcgtgccaaccacctggaccgcgcgctgaaaccggacgatccaaccactccacaatggctggcagaagcgttaggctagaggcagcccaacaggaaggattccaatgtcgtcgaagctctggagaaacgtggcgctggcaggcgtggccgccgccggtgctgccgtgtgggccgtggccccgcgcacgttcaatgacaagcgtcgtaatttcgtgccctccattccgaaggtatggtatgcccatcgtggcttgcacgatgcgggttctggtttggtcggctataccgatatcgctgattatggtggggataattcggtcagcgcccaagccgataccactgagcgatccatcgccgaaaacgatgattatgtgtcgcttgcccgtcgcatggctgtcaaggccggctacggcagtgcggatatgaccggtccgatcgctcctgaaaactcgctggccgcattcgccgccgcctgcgaggctggctatggcatcgaactcgacgtgcagcttacgctcgacggtcaagtggtcgtggtccatgacgccgatttgctgcgcgtggccggcgacccgcgccgcgtcgaagacctgacatatgacgagctcacccgcatcccgctgttccccggcagcaagcccggcgatctgaaggccaagccgctgcccggtgccgacgcgaatccgccgctggtggtcacgccgtccgccgcgccgaaggggtactaccagcatgtgccgctgttctccgatgtgctggacgtggtggccggccaggctccgctgattgtggaatacaagttcagcgacaacaaggcttgggatgagcgtagcgaagagctcatggaaaagggccacgccttgcttgaggcgtatgacggcccgtacgtgatcgaatccttccatccgggcgcggtgaattggtacaaggagcatcaccctgaggtgtgccgcggtcagctgagctggccggcgaagctgagcaagaatggtgcggctgaatgggccgccggcttactggcgttcgactggctgtctcgtcctgatttcgtggcctatgactggaccggtggcgcttcgccgcaagtcaggctcgctcgttcgatgggtgcgatgccggtttcatggaccgtgcgcagcagcgatgaactcgcccagtgcgcgccctacttcgaccgccacatcttcgaagcgttcgtccctgacgcagtgtgaggttgagggcgttattgatgtgcccatggggcggttacaggctcatcgggcggtaacttgcccatggagcggtttgaagaatatgtgaaaccgcggaattaagccattttggcataccgccccatgagggttttaccgccccatggggcaattaccgccccatgggggatttcccgccccatgaggtatggcgttttacttgtgatatggctcgccagcgttgatcttataagcgcgatagatctgctccagcagaatcacgcgcatgagctgatgcgggaacgtcatcttcgagaaactcagcagaaaatcagcacgacgcagaatcgcgtcgtcaaggccgattgagccgccgatgaccagctgaatatggctggtgccacgcaatccaaggtcgttgattttggcggccaattcttcgctagacagctgcttgccattgatggcaagggcaataacaaacgcaccgtccttcagatgcttggcgatgcgttcgccttctttggccttgatctgtcggtcaacgccttcggaggcgtggtcaggcgttttctcatctgccacttcaatgatgttgagcctgcagtagcgcgaaagtcgcttggaatactcgtcgatggcgtcgcgaagatattgttccttcacgcgtcccggcgcaataatgtcgatttgcataaaaagcccatcacattggctcccctctctgaggggagccaggaaaatcagtcaattacgccatagagacggtcgccggcatcgcccaaccccggcacgatgtagcacttgtcgttgagcttctcgtcgaccgcgcacactacgaccttgaagtcgatggacggatcgatgtgctcttccacgaacttgatgccttcaggcgccgcgatgatgttgatcgcggtcacgtccttggcaccgcgctcggccagatagtgcgtggcagcaaccagcgtgccaccggtggcgagcatcgggtcgatcaggaagcactgacgaccggacaggtcctccggtagacggttcgcataggtgacctgctgagtggggtgttcctcgtcgcgcttcataccaaggaagccgacttcggcggtcggcataagacgggtcatgccatcgagcatacccagacctgcacgcagcaccggcacaatgatcggacgcggtttggccagcttcttaccggtcatcggagcgaccggtgtttcgattggtgcggcaactacggacaggttgcgggtggcctcataggcctcgagcatcacaagctccgagacgagctcgcggaaagtggaggagggggtgttcttgtcgcgcagcacggtgagcttgtgctcgaccagcggatgattcaaaacgtgaagttccatactccccagcctacccgtagttcgcggggaagtcacttgggcggcagtcgcgcgcgtatcgcacaccaatgtaaacagcgttcgacggcgggccgcgtaacaccgttgattttgtaacgtgagcgttatgtatgagacgcatatgaaatattcaggcaacggaaattcacgcaggcactgccatcgtatagtgcagtcggccggaagccagccgtcgatatacggcaagtggttcagcacgatatcaggcatcagggcacggtacggcaatcagcgtagacattccgcgggcgggcaacgttcgcggaatgtagtcgtatgtggggaggaagagtcatatgactcgattgcaaagactgaagatgggtgctgcggtgtgcattgttgccgcagtgcttgccaccagcggttgtggctggggtcgcaccgtggccgagaaagaggcccaagagaacaacgcgactgcggcaagcgacacctcatcatgtgtggacacctcaggcaacaccatcaaaatcggtttcgtgaattcgctgtctggcacgatggccatttccgaacagacggtgagtgattcgctgcacatggccgttgatgagattaacgcaaagggcggcgtgctgggcaagcagctcaaggtagtgcagcaggacggcaagtccgagccggctgtgttcgccgaaaaagccaagaccctcatcgaaaaggaatgcgtggccgcggtgttcggcggctggacgtcctcttcgcgtaaggccatgctgcctgtgttcgaggcggataacgcgctgctgttctacccgctgcaatacgagggcatggaagccagcccgaacatcttctactcgggtgctgcaccgaaccagcagattgtgcctgcgcttgattaccttaaggagcaaggctacaagaagctgttcttggttggctccgattatgtgttcccgcagaccgcaaatcgcgtggtcaaggcgtacgccgagggcaatggcatggaagtggtcggcgaggaatataccccaatgggctccaccgacttcaccaccatcgtcaacaagctcaagttctccggcgcggatgcggtggtgaacacgctgaacggtgattccaacgtcgcattcttcaaggaatacaaggcttccggcctgaaagccgccaccacgccggtgatttccatgtctatcgccgaggaagaggtttccgctatcggcgttgacaacgtcaaggaccagctcactgcttggaactactaccagacgctgaacaatgcgcaaaacaagacgttcgtgaagaacttcaaggcgcgctacggagccaatcgccccacctccgacccgatggaatcggcgtacacatctgtgtacctgtggaagggcatggtcgagaaggccaagtcgttcgatgtggacaaggtcaaggctgcagcagacggtgtcaccttcaatgcaccggaaggcaaggtcaaggtggacggcgaaaaccaccacatctacaagacctcatacatcggcaagatcggctcagacaagctcatccacaccgtctggaagtcggacggtcccatcaagccggacccgtacctgaagacctacagctgggccaagagcctgagcgccagcgtcgagagcaactgagagaagaggacacaacaacatgggtatgttatttccacaaattgtggcaggtctgtccaacggatcgattctgctgctcgcagccctcgggttgtcgttgaccttcggccagatgggcgttatcaacaacgcccacggcgaattcatgatggccggcgcatacaccgcatacgtcatgagcatggtcatcggcaataaaacagtgtccctggccgtggcgctggtggtcggtttcgtagtagccggtttgcttggtttactgctggacgtgttgctgctggagcgtatgcgcaatcgtccgcttgatacgctgctggttaccttcggtgtatcgctggtattgcagcagctcgcacgcgatattttcggtgccactccggtctacgcttcggctcctgaagcgctgaccaatccggtgaccatctttggctacagcttctctgcaggccgactgttcatctttattctgtcgattatctgcgtggctgcgctgtacgcgatcctgaagctcacgccgctgggtcgccagattcgcgccacttccgagaaccgcgacctcgctgaggtttccggcatctccaccaagatggtcgaccatgtgacgttcttcctgggctccggcatcgccggtatcgctggcgtggcgctgagcctgctgaactcgattagcttcaacttcggtacgaccttcatcgtgcaggccttcctggttgttgtggccggcggcgttggccagctcaagggcgcggttatcgcctcgttcgtgctgggcttgtgccagtcgtccatcgaactgccgacctctgcctcgattggtcaggttgccgtgttcctgattgtggtggtgttcctgcagttcaggccgcagggcttggtctccatccgctccaggaacctcgcgtgagtgcttcagaagggtaaggaaacgacaatgaagatgactttgagcgaatacgccacgaaatataaggctttgatcggtgtggtcattgccgtggcgctgatcttcctttctccgactgtgctgagcgtgtacaacctcggcctgctgtccaaatacctgtgctacgcgatggtcgcggtcggcatcggcctggcttggggccaaggcggtatgctgacgctgggccaaggcctgttctttggtctcggcgcgtacgtgatggctatccacatgaagcttgaggacattggcgtgggccaagtgccggacttcatgtcccagtacggcatcaccaaggttcctggattctgggaactcttccgcaatccggtcatcgccgtgattggcgtggctgcggtaccgggcattatcgccgcaatcctcggtctggctgtgttcggccgtggcgtgcgtggcgcctacttcgcaattctttcgcaggcgctggttgccgcgttcgccgtgctgcttatcggccagtcgaaaaccaccggtggcaccaacggtctcaacgatttcaagggattctttggttacgacttgactgataacgccaacaagcagatgatcttctacatctgcgcgttcctgacgctggccatggtgcttatcgtctactggattcgcaaatcgtttatgggcgacctgattatcggcgtgcgcgaccaagagaaccgcatgaagttcttgggctataaccccgcctccatcaaggtgttcgccttctcggtggctgcaatgttcgccggcattggtggcgcaatgttcgtgccagtggtcggcatcatttcgccgtccgatatcggcgtgacgccgtccatcctgatgctcgccggcgtggtgatcggcggacgtgccactttgctcggcccggtggtcggcacgctgctggtgcgctttgcggaaacgcagctgtctgaggcgtatccgtccgcgtggacgtacatcgaaggcctgatcttcattctggtgattgcctttgtgccgaagggcttgggacagttcaagggcgtatggccttggattaaggagaagatcgggctcggaaagagttcggttggagcttcggctggtgctggtgctggtgccgttgccggtaccggtactgctactgcaaaggcggtgaacgcatgagtgaggagaagaacatgagctcgaatccatcggctcccgcacctgcatcgcaggccgatttggagcagttgcgcgccgaaatgattgagatgcgcgacgaagccaagcgtatgcgcgacgaagcggcccagatgaaggccgaaatcgttgaagagcgtacgaagctgcacgatcagcttgcggtgctggatgatcgcggcggccagtggagcgattatctggaagttcgtggactgcacgttgagttcgatggattcgtggccgtcaagaatcttgatttgactgtgcagcacggcgatttgcgattcctgatcggcccgaacggtgctggtaaaacgaccatcatcgacgcgattaccggactggtgccggccactggttccgcggaattccgtggcgagcagctgttgggccgcaagccgaacgacatcgtcaagctgggcgtcgggcgtaccttccagaccgcatcggtggttgaagagctgtccgtgttggagaatctgcagctggccgagggcttccgcaagaagggtcgtgagctgttccagccgatgggcggcgtttcgcagaacatcgaatacatgatggacgtgtgcaatctgactgtggatgcaaacaagcccgcaggcatcctgccgcacggcaagaaacagtggctggaaatcggtatgctgctcgtgcaggacgcgcacctgctgctgctcgacgagccggtggccggcatgactccggccgagcgtgtgcagaccggtgagctgctcaagcgatgcagcaagaaccgcacggtcatcatcgtggaacacgacatggatttcatgcgtcagttcgccgattcggtcacggtgctcaaccagggcgaaatccttgccgagggttcggtcgaagacatccaaaacaacgaagaagtagtccgcatctacctgggcggcggagaaaactaactccctgtctcccctccctgaggccgaggcgttaagcaaacagcccagtgggctgtttgtagccgaaggcgagacgatagtcgaaccagcaggttgcaggcaaggcccgtccttaattgcggacgagctgtcaccgaaggtgactgaggggagtaggtaagaggaagaagcgcaatatggaccgcactgacaacaaccatcgcatcccggaatgcgctttttcagtgcatattgagggtgatacaacgcgcctcaacatcaatatgcacgacgccgtagaaagtgaataatcatggcaatgcttgaagtaaaggatttgaacaccggttacggcaaagtgaccgtcgtcaacgacatcagtttcgacgtggccgccggcgaatgggtgagtatcgtcggcaacaacggtgccggtaagaccacgctgttgaaggcgattctgggcttgctgcccgtttcgtccggttcgattagtttcgagggcaaggacattaccaaggctgcaccgaaccaacgcatccgcaagggcatggcgttcgtgccgcagggccagcagtcctttggcactatgaccgtggacgaaaacctgcacgtggtcgccgaccgctacggttcagaggccaaggcccgttacgacgaagccgtggaaatgttcccggtcttgaaggaatttgctggccgacgtgccggtctgctgtccggtggccagcgtcagcagctttcgattgcccgcgcgctgatcacccgccccaagctcatgattctcgatgagccgaccgaaggcatccagcccaatatcgtcgccgaaatccagaaggccattcgcatgatggccgaagacaagggtatcggtgtggtcttggttgagcagaaggtccaattcgccgtcgagcgcgccgaccgctactacgtcctggcctccggccgtttcatcgccaccggcgaaggcggccccgaccaagtagaagccgccaaggaatccatgagagtgtgattgattcgacccccgtttatggccatagagcgttatgagaaacgtcccgttcttataacgctcttattattgggcgatgttagggctcacattggtgtgcctgaaaaactccagtcaacaacagaggatgttatgagacttacaccacgagagactgacaagttgatgctgtacttggcggggcagcttgccaaagaccgcaaagccagaggcgtgaagctcaactatgtggaggcgattgcgttgatttccgccgaatgcgttgagcgggcgcgtgagggaagcactgtggcggagctcatggcatacggtcgcacgctgctcaagcctgaagatgtgatggatggcgtggccgagatgctggaagtggtggaggtcgaggccacgttcccggacggcaccaagctcgtctctattcataaccccatcgaatccaccgagaagttggtgccgggggaatatctgctggctgacgatgatttggaactcaatgaaggttccgaagacatcgagctggacgtggtgaacactgcggatcgaccgattcagattggttcgcacttccacttctttgaagttaataagtacctgaagttcgaccgtaaggcggcgtatggcaagcggttggatatcgcggctggtacggctgtgaggttcgagccgggtgaaacgcatcgagtgcggttgattgatattggtggcacgcgtgagattcacggcttcagcgcactggttgaggggaagttggatgaccctgaggtgcgggagaccgcgtttaagaaggcgcatgagcttggattctcgggaatctgagctaagggccaccctcagtcagcttcgctgacagctcccgccagcggggagcggactacctctcagtctcgcttcgcgagccagctcccctgacaaggggagctgaaaaacagcaaggacttttgacatgaagattattacgcgcaaggattatgcgggaatgttcgggccgaccacgggagaccgcgtgcgactcggtgacacgaacctcatcatcgaggtggaaaaggactacacgcactacggtgatgaactgaagttcggtggaggcaaatcattccgcgacggcatgggccaaagctccgtgcagctcgacgttgaatcgccggataccatcatcaccaacgccctcatcgtggactacaccggcatctacaaggcggacatcggcatcaaagacggcaaaatcagcgccatcggcaaggccggcagcccgcagaccatgagcggtatcacccccggtctcgaagcgggctccggcactgaagctctcgccggcgaaggcctcatcgtcaccgcaggcggactcgacacccacatccacttcatctccccgcagcagattcgcactgccctcgccggtggcgtgaccacgatggtcggcggcggcaccggtccggccgacggcaccaacgccaccacctgcaacccgggagccttccacctgacccgcatgatcgaggccgccgaagcgctgcccatcaacatcgcctaccttggcaagggcaacgactccagccccgaaccgttgcgtgagcagattcgcgccggtgccgcaggcctgaagatccacgaggactggggtgccaccccggccgtcatcgacactgcactcggcgtggccgacgaaaccgacacgcaggtggctatccacaccgatactctgaacgaaggcggttgtgtggaagacaccatcgccgcgttcaagggccgcaccatccacacctaccacaccgaaggcgctggaggcggccacgctccggacatcattcgtgccgctggcttcccaaacgtgctgccgagttccacgaacccgaccatgccgttcacgcgcaacaccatcgacgagcatctcgacatgatgatggtctgccaccacctcgaccgcaatgtgcccgaagacatctctttcgccgactcgcgcatccgccccgagaccatcggtgccgaagacgtgctacacgacatgggcatcatctccatgatgagctccgactcgcaggccatgggccgcgtgggcgaggtcatcacccgcaccatccagaccgccgacaaaatgaagaagcagcgcggtccgctccccgaagacgaacacgacaacaaccgcaacgacaacttccgtgtcaagcgctacgtctccaagttcaccatcaacccggccatcacccacggcatttccgaatacgtgggctccatcgaagtcggtaagatggcggatctcgtgctttggcagccgtccatgttcggcgcgaagccggaaatggtcatcaagggtggctccatcgcctactctcgtatgggtgacgcgaatgcttctatcccgaccccggaacctgtctactaccgcgatatgttcggcgcgctcggccgtgcgcttggcaagtcctgcgccacgtttgtttcgcaggccgccgtggatgacgatatcaagggcaagctggagctgcagcgccaggtgttaccagtgcatggctgccgcacggtaggcaagaaggatctgaagttcaacgacgtgctcgccgacattcaggtcaatcccgaaaccttccaagtgacggtggacggcgaaccggtccactctgacccggcgtacgagttgccgcttacccagcggtacttcctgttctgagagaactggtggctctcctcaaaggggagagccacttggttttagccttcggccacgaaatcggtcacgaaatcggccacatctcgaatgaggtcgaaggcgtcgtcgcctcgggtggtcagtacacgcaagcagatgccattgattacgcggctcacgccgagctcgccggtgaagccgatggcgtctgcgtgttcatggatgcgagtgatgagcgcgtcttcggcggcgatgcgggcagtctcgatgcgctcgcggatggcggcggaggatgcttctttagttgcggcatcttgtacagcgtcgctagggtcgagttcgggcaggtgagcgtagagaacgccgcagtgggtgaattcgcgccacatgccgagttcggtgtagtcaaaagcatcaggttccaacagcatgcggtcagcaaaggccagatgttcgcgcggttgggcagcggcggcttccgccttggaaggccggcctcggcgatgtgcgtgctgttgcgccaattcggctgcggcggccttggtcacggcttcgggttcggccacatatacgcgcatacgattcgtaaaacgtttcatggcccaacgctcatccatcccaacgcggccacatgtcgccacatccgcatacacgaatgctgactcggcggaaatatgcgcggtggtcaggttcatgaatgagctgttcttgaacggaatcactgggaacggcaggaacacggctttggcattgccacgcgccctgagttcgatggtgcgttcggccgagccgtccgcggtgtcgaacaccttctcgtagctttgcgttttgatggtcgaatcggtgcctgggccgaagtcgatatcgatatgggcttcatcgcccctcaggaagccaggggaggcgagcatcacgacgaaatccgaatgacgtccgttggtgaacggggtcatcagtttgaacggcgcctcgaaataaatatcgtcgattttggtacgtccgtggcggaatgcagtggatagacgaaaagtgctactgcccatggacgaatcgctgccttcttatgattggtgcctgacgatgacatgggcaattatgccgcacttggtgcaacggtatgtttcggcccgtccgtttttggatacgggcgggccaaaacatcacatgtcctcgaacagcacgctcttcttgatccatgcgatgacgtcgtccactccggcaccgcccatcaggtcggtgaagatgaacgggcggtcgccgcgcatcttcttggagtcgcgggccatcacgtctagatcggcgtgaaccaacggggccaggtcggccttgttgatcaccagcaggtcggagcgggtgacgccggggccgcccttgcgtgggatcttgtcgccctcatcggtggcgatgacgtagattgtggcgtcggccaggtccgggctgaacgtggcggacagattgtcgccgccggactccacgaacatgatctgcacgtccgggtgggtgcgggccatttcctcacaggcctcgaggttcatcgagcagtcctcgcggatggcggtgtgggggcagccaccggtctccacgccgacgatacggtccggcgcgaggcgtgagtgctcgataaggaactcggcgtcttccttggtgtagatatcgttggtgaccacgcagatgctgtattcgtcagccatcttgcgggtcaggcgttcgataagcgcggttttgccggaaccgaccggtccggcgacgccgatgcgtacgtatggcatggggtttctcctttatgtggggaattagttaggtatgtggtttgcgggtgaggttatcctggctcccctccttgaggggagccaggataattagctcatgtagagcctcgagtacaagatttcatgctgcatggcggcgatgtcgaggtaagctccggagatgccgagatcctcgggcttcaacgtcatcgcgatattcaccgcgcgcacgaggcgcgggaacgaatcatgcagggcgacttggccagcgtactggctgagcggaatcgccttcgcggcgcacatggtaagcgcgctcaacagcgaatatccatacatgatggccgcgtcgcgcacgtcgttcgcatggtcagccgcgtacaggcccatcgcgatcgaatgcaggccacggcagcggcgctcgcgaatcagcccggcatacaggtcgagcgacggcgagccgtacaggccgtcggcggcatcgtgcagctggtggcgttcggtgtgatgctcgtgcacggcgatgatgctgttttcgcgcgaatccgcagcggatgcggtggcattgccggcaggacttggcttggcgaacccacgatgcccatccgaggtctgcgcctggccggcatccatctgctcggccagcttgaccaggcgggtacacatgcgctcgctgccttcacggatttcacgtgcggattgcagggccgaggccagctcgtcaagttcgatgagtcgctcggccagccctttgcgggagactcgcgaatcggtggcgtacttgccggccagcaccatctgcccgatttccttgtacggtgcgacttcgaggtagttcttcatatactcctcgaaatcggcgccacggcgcaagaagtcgcgctgtacgaaggtctccatgccgttggacagcgcgaacgcgcccacggggaagacgctgtcgcacacctgcagcatggccagacgtcgcgattcggtttcgttgatgttcatggggctatcagtgggtgtgccaggtgcggccgccgtcgtggctgtgggagccgtccgggcggtgcagcacgccgttcatctcatattcggcgggctcaccctcacctgcgtcgtgtgtatgcacatccagatggccggcggcctcctcggccgggaattccttgtcggcctcggcttcctgctcctcctcggccacgtcgcccgtggtcttgttggtgcccggaatcagtgtgccggtgccggcgtgggccttgacgatcaggaagccgtcaaacccaccctcgatgatatgcggttcataaccgatcttcttcgtgtattccatggtcggatggtcgtacggcaccagcacgcggtcgttctcgaccttgagactcaggtggcggttgcccagttcgaagcacaggcgtcccatttccgtcatcgagttaaccggaatctcaatcagctgtgcggttttaatgcgtgcgaaatagcgcttgtcttcggtttcggcgagcacatcgccatccttgatggtcttgccaaccatgatgccgaactcggtgccgtcctcggccaccttgcgcatgcgcttcttatcggtttcgaaccagtcgaaggcaatcgacacattaagtttgccgtcgctgtactgctgactgatgatgttgccggtgatttctttggcgatcatccgttctccttggagaaaattgcttgtggcgtgagaatccccacgtccttcatgccacagtgtagagagcctgttgcgtcactttgtaacgaatgatcgaaatatgcaaaaaatatagcggaaaaatatccgaaaacacggaaaccggatatatggtacacggtgtgtcgctagtaattgcaagctattttgcatggttgtgcattagacgaatcacagttgtggtattacatatcacgttcctagagcgggaggttgtggtcgagctccgaaatcaacaaaaagagggaagttggatatgatcgaagtacctgacaccgtcacattggcgatgcacattccggataatttcatttcgccgtccaccggggcgttgttctacgtcatcatgattccggtgtgggtgctgtgcctacgctacgtgatccgcaacagcacgccggagaagatggcctacctgggcgccggcgcggcgttctcgttcctcatcatgatgttcaacgtgcccacgcccggcggcaccaccgcgcacggtgtcggcggcgcgctgatcgctctgctgctcggtccccagtacgcgacggtcgccgtgtcggtggccctgctgctgcaggcgctgctcttcggcgacggcggcctgatcacgctcggcgccaactgcttcaacatggcgttcgtgctgccgtttgtggcttacggactgtacgtgttgctacgtaaggtgctgcccgacggctggaaggaacgcgtggccgaattcgtgtccggctatatcggcatcacgctcgccgcattctgcgtggcgctggaactcggcgtgcagccgctgctgttcaaagccgctgacggccaggcgctctacttcccgttcacctttaacgtgacgattcccgccatgctgatcccgcacctggccgtagccagcgtggtcgagggtctggtgaccgtggtggttgtcgaattcgtgcgccataccgcaccggagattatcgaagacaatgcccgtgtgaacttcgccgagaccgccggtgctgacggcaaacaggtcgcgtacgccggactgcgcaagtctgcgtggattgcgctggccgtggtggcggtgctttccccgatcggcctgctcgccaccggcgacgcctggggcgagtggggcgccgaggacttcatgagtgccacggggctcaactacgtgccgcagtacatcgcccatggcttctcgtgggatgcgctgttgcctgactactcgctgcagggtctgccggacatcgccggctacattctctccgcagtgattggcatcgccgtgctcactatcgtgttccgtctgctggcgctcgcggtgagcggcaacggcaagacatccgcgcgttgacgatacctgcatggatgcgtgagtcggaggattacgatcctccggctgacaagtcatccttcatcgaacacaacctggggcatttcggcagcgtactcgagcaggttggtcatgcgttgccgattgagtcgagcccggtcgacaaggtgctgggctcggtcaatccgggcgtgcggctgctgggcatactggccgcgattgtctgcgtcaacatcacatgcaacatgctgttctcgtacatcatgctggcggtggtgctgctgatgatggcgacccggccggcgcgcctgatgagggcgttgctcggcccggtgctggccgtatgcatcctgagcctggtcgtggcggtgccgagcctgctgattgggcagtacagtgcgccggtccggctggtggtgcgtgcgttcgtggcggtgtcgctggtgatcgcactggcgcgtacggtgccgtggaatcgcctgattgccggactgcgcgcagttggctaccctgattcggtgatttatatctgcgacgtgacgattcagttcatcgatattctcggtcgttcgatggtggagttgctggatgcgctgcggttgcgcagcgtgggccgcgaccggaccaagctgatgtccgccggccagttgatgggcgcgctgtttctgcgtgcgaatacgcaggcgcggcaaatggctgaatcgatggtgtgccgggggtttgacggtacgtatcatatccaccacgagcgtctgctgacgtggcgcaacggggtgtatgccgtgtgcattgctgcaatgattgcgctggcggtgtattcgggatgagggtggttcgaatgaatggagcccaataatgttcggattaaagcgtaatcataaacaaactgcagccatgcagccagataactcatggttccgcggcgacccgctggtcgaactgaatcacatcgacttttcctataaagattacggcgacgccgacgatgaaacctcgtcgcacgccgtgctacgtgatttttcgctgaccgtcgaacgcggtgagcacgtggcgctgctcgggccgaacggcagcggcaagaccacgctgatgcgcatcatcaatgcgctggaatttccggactcaggcgagtatcggtttggcggtactccggtggttcgcgaggaagtcgaggcgaagaacagcctgttcgccaaagcgctgcatcagcgcatcggattcgtgttccaaagctccgacacccagctgttctgcccgtcggtggaagaggagattgcgttcggtccgttgcagatggggttgccggatgccgaagtacagcgcagagtcgatgacatggtgacgttgttcggcttggatcggatgcgggagcggacgccataccgtctgtctggcggtgaaaaaaagcgtgtggcgattgcctgctgcatgtcgatgaatccggacctgcttgttctggacgaaccgaccgacggcttggacgagcgcaatactgacgtagtggttgaggtattgcgcgccttcactgatgccggcaagactgtactgttctccacgcatcaccacgacatcgtggagcggctcgacgctcgcatcgtgcgcgtgcatccgtcactatggcaatgacattcacgtggcgtctattggatatcttcatcgaaaaaagcagaaaggcatcggcgaggatcgcgagtccggcgagaactgcgatagtcgctttggtgatggttgccttcatgagagtttccccaaggtgttgacgttgatttcatgagattcgaaaaagagcgtatctaggccgaaccggacagtaagtcaacggtttctggaaaccagctgaaaaagctacggtattgtgaaatatgtctcatcggaatgggtcaagtttggcctagcgctcgcagtcgtgcgcgaagattcgttggattgattctcggtggattaagtcaaaggaagaaactagacaccttgcggtgtaaaaccgggaatcggaatggtgtaaaaccgggaatggaaatagtgtaaaatcgggaatgagaaaggtgtaaaatctatattgaggtgattgggtagctgagaaaggccggaaaatgaacgatttgaacaatcgtagtgataccttgactcaacctgattatcgtgctcgcgtggtcgatggcaggttaggtaagttacttaaagcattcggcgcggtggaaatcgtcgggccaaaatggtgtggaaagacatggacggcgctttcccgctcgcgaagtatggatcgtctggatgatgccgctacctttgcggccgcacagactgatccggcattggtactcatgggtaatgaaccgcatttggtggatgagtggcaagatgtgccgcaaatttgggatgccgctcgtcgtcatgtggatgacaatgcgaatcgcaaggggcagctgattcttacgggctcggccattccgaaggaccgagaaacaattcaccacagtggcacaggtcgaatttctcgcttgcgtatgtggcctatgagtctgtgcgagtcagggcaatctaccggtgtagtgagcttgtctggtttgtttgatggacaattcgagcctgccgaatgtgcaaccaacattgaagatattgccagatggtgctgtcgaggtgggtggcccgcaaatcttgatttggatgacgagtttgctctggaaattccgagtgaatatatcaagagtgtgcttgatatcagcgtgcccaagatgaacaagaaccctgaaaccgcgcgtgcactcatgcgtgcgctcgccgtgaacgtatcgcaggcaccaaaatatgcgacgctggctgcggatatggcctatggcgatgagcgccgtgaaccggatacgcagacagtaaagagctatttgggaatgctcaaggacttgtaccttctgacggatttggagggttgggagccgccactccgcgcaaagagtcgtgtgcgaaccaagcccaagcgatatttcgtggatccttcgttgcctgctgcggttttaggtgccgcgccgaatactctgatgcgcgatacacagacgctcggcgatctgtttgaaacgctgtgcattcgtgatttgaatgtatatctgtcggccatgccgggtgcgaacaatcgcattgcctactaccgcgatgacaaggggcttgaagttgatgtcattatcgagttgtctgacggcaggtggggtgctatcgaaataaaactcagtgaccttaaggtgaacgatgacaatgcggataagctcaaatccttccgcgacaaaatctgtggcaaccccatggcccaagttcgcgaaccagagttcatgatgttccttaccggccgaggtgggaaggcctatcgccgcaatgacggcatactggtcgtgcccatcgcaacgttcggggcgtgaatcgggtaaaagaaaagaagcgccgaaccgcgaaagcgcctgtcggcgcaagggccgctcgcggcggcaaaaaatggagcccggggcttaagcacggtccgacgcggatacttagtatagcttgcgatggggctcgccgcgccggggaggtgtggtgttggctggtagctgattgttggggtgcggttggtgggtctctccctcagtcacgggcatcgcccatgacagctccctcatcagagggagcctggagcagggctactccaaccgtccgcgacgccagaggttggcaccgtgctggaaatccttggcggtggccatgaggctgccggcggtgtgcataaggcgggcggctttggtacgcatggccttctcatcggcatccgaggagaaggcgccgttggcctcggcccgggtcaccatgcgccgcgcctccacgcgcaagcccaacgccaccacatcggtaaacgccgccgcacgctcaagcgccacggcaaaatcgcccacaaaagcaccggagagaatcgaatcggccaatcgcacgatgtcatcttcactgggagtctgatccacgccggcgatggcggaggcggtagtggccaccggctcacccaagcgccacagatgcgcgatcgagtcgcgattcgatcgcatccacgtacgcaacatatacagtcgccacagcacaccaggcagcgaatccggctcggcatcgctccacagttcggcgatttcatccacgccgaccgtctccaccaacgtgagcacccgctcaacaaccgccgggtcctcgctatggcgcacacgatccagcaatgcggcagcggacagatggctcatctcgctcaacgcctgcgggtccatgccaccggccaatccatcggccacagccgggtcgagctgagccgggcgcgaggggcgtgaagaacccatgcgagcaggtccgaatgccgctccggccgcacgcaacgagccgaagcccgggcccagactgccggcggcaccattgtgcgcggcatgagctgcagcggcagcggccgaggagttggatgaatcaggaaatgcgggtctagtagacaagcggttgaaccttctgaatatcgatgattttgggaccatgaggcgtcggagtgacgaacagcgccaccgccgtgccggtcggcatgaacggtgtcttggcgatcaggcgtttgctcagagacggcgcaacgcacatgctgcgcaggtgtccgaacataccaccaatcaccggccggtgcatgcatatcgctatgggctgacggcgctcaagtgcgaactcgatttcgctgagtagacactcccatgcggtgtccggcgcagcggcgtatgcatcttcggtgagcggatcgagatgaaccatgtctcgtccggtctgccacgcgaacatctccaacgtctcctggcagcgcacccaaggcgacgtggccagtcgggtcggattgaaacacgccagctcgcggttcagcgcgtatgccgcagccgcgccgcgcggcgtgatcggacggttcgcgtccgaacccttccacagcttgcgcgcttccgctttgccgtggcgcacgataatcaccggcaccgcgtccagtgcaccttcttcgacccgatcaacgaatagcgcgaggatgtccttatcggtggaatggctgagcttcttgcgggcctcggccggcgtcagccacaaaacttcgtcgatttcgccgatgtccgcccgatgcaccgggccaaacgcatgggtacgccgcaggttgtcgatggcgctgatcggcgtggccatccagaactggatatgcttggtatccgccgaccgatccttggtatggcgctgtttgctgccttcttcggacagcgggtactcgatgtcgcccagataggggccaagttccacggacaggcccgattcctcgccgatctcgcgtacggcggcatgccggtgcgattcgttcgggtcgaccttgcctttcggccagctccagtcgtcgtatttcgggcgatgcacgacgcacagttcgatgcggttgagtacgttgtccgccgcggccgggctgtcggcctgcgccgggtccggggtgggagccgcgtccgatgcgccgggtgctgccgtggccttgccgccagaatccgtggtgttcgcgatgatggtgccatcggtggcaatattggatttcgctgatggagacgatgcctgcgtcggctcggcatcatccttccaccggtacagaataccgccggcggcttccacgattcgtctcatactgttcgtacccatctcttgtattgtaggtcacgttggaccgctgctacgtagttttgcgcgctgaacgacgatgcccggcatcctctcgaaagaggagccgggcatcgtaaccaccctcagtcagcttgcgttgacagggagcatcgagtgaaatcagttgtgcgaattggggcggcgctggtgcttgcgaatcagatattcctgactgtcgaccagcgggcggccctcgtcgtccttggtgtgcagcacatacgtgccgtcgggctgcatgtgccagctcatggtggagtcggccatctgcaggtccacgtacttgatgagcccgtcaatctgctccggggcggtgacacgcaccagagcctccacacggcggtcaaggttacggtgcatgaggtcagccgaaccgatgtagacctccgggccggaagccggaccctcgccgatctgcgggccgtccgcattgcagaaggcgtagatgcgggagtgctccaggaagcggccgagaatcgaacgtacgcggatgttctcggacaggccgggaacgccgggcttcagagcgcagatgccgcgttcgacgatgtcgatcttcacgccggcctgagaggcacggtacagggcgtcgatggtcttctcgtccacgatggagttgaccttgatcttgatccaggcctccttgccggcgcgggcggcgtcctcctcgcggcggatgcgctggattagaccggtgcgcacggtgcgcggggccaccagcagacggtggaagctggactttggcgcgtaaccggagagctggttgaacagacgagtcagatcctggccgaccaccgggtcgcaggtcagcagacccagatcggtgtacagtcgcgcggtcttcgggttgtagttaccggtgcctacgtggcagtagcggcgtagaccgtccgcttcctgacgcacgacctcgatgagcttgcagtgggtcttcaagcccacgatgccgtacaccacgtgcacgccggcgcgttcgagcttgcgggcccacgcgatgttggcgtcctcgtcgaaacgagccttgatttccaccaaagccagcacctgcttgccggcatgagcggcgtcgatcagggcgtcgatgatcggcgagttggagctggtgcggtacagggtctgcttgatggccagcaccttcgggtccgcggcggcctgcgcaaggaaggcctgcacggaagtggagaaggagtcataggggtgatgcagcaggatgtcgcgctcgcggatggcggcgaaaatgtcctgcgcacgggaggactcgacctcggcgatctgacggttcgtggtcggcacgaacggacggttcttcaggtccgggcggtccacgctgccgagctcaaagagcacggtcaggtccagcgggctgggcagacggtatacctcgtcctggctcacgccgagctggtcggcgagcagctgggagaggaacgggctagtggtgtccgtgatctccagacggatcggcggtccgaagcggcggcgcagcagctccttctccatggcgttgagcaggttctcggcgtcatcctcttccacgtcgatgtcctcgttacgagtcacgcggaaggagcgggcttccttgatgatcatgcccgggaacagggattccagatgcgcggcgatgagcttttccatggcgatgaagccgtaacgctcgtccttggactcctcgtcggtcatgtcgtccaccggcaccaggcgcggcaggttgcccgggatcttgacacgggcgaagtgcgacttgccggaggccgggttctccacaatcacggccaggttgatggaaccgccggaaatgtaggggaacgggtgggccggatccacggcgagcggcgtcaggaccgggaacacctgctggcggtagtagcgcgagagacgctcctgctcggaggaggtgagcttgtcccacgtcagcaggacgatgcgctccttctccaattccggcagaatggtgtcgatcgcgtaatgtgcgtgctcgtcttgcagacggtgtgcggtctcgctgatcgcgcgcagctgctgacgcgggctcaggccggcggcagacggcacggcgatgcccgagtcgatacggcgcttcaggccggcgacgcggaccatgaagaactcgtcaaggttcgaggcgaagatcgcggcgaagttggcgcgctcgagcaggggcatgtcttcgttctccgcgcattcgagcacgcgctggttgaacttgagccagctgagctcgcggtcgaagaaacggtccttgggcagcggtgcctcgccttcctgatcgacgcggcggtcgttgttgtcgttttcggcaatatgctctgcgatttggctgcgcagaattgccttcgagggtgcgtcaaatatctgtgccatagcttatatcgtaagctctggcgtggccggaaaacggctgaacgcgccagaattcaacgggtgttcatgttagttcggtgttggttggttttgagtgtgctagcgtgctcgcgacacgccgtgagcggcggtgaaacgaacgaaaccgagcatcagacgggttcgatgtgaacggttcagctcgttttccgatagtcagaaagtgcgattgaacagttgtgataaaaaacgcacaacgactctctgcaggttgcgagaaacgggagtgatgaatagattatgaggtacaagaacaactgaacagagcagagcccacaaatagtgtatggtcacgaggactgttacgttggacgggcattggaaagacttaccgttacgacgatgatgttgtgcagagattctgctccagtagttgaacttgtagaaaaggcccgctccggcgggccttttcgtttgtgtgtacagtggagggcatgacggaaacacagcgtacgccagaggggatgtcgtcgaaaccccgtatcaagccggccgatgccgaagacggccgcccggtctctatctctgcgcgtctcggacgactgcaattccactattccggcaagttccgcgtgctgcagattgccgacattcaggatgggccgaaagtctccaaagacaccatcgccctgattgaggccagccttgatgccgcacggcctgatctggtgattttctccggcaaccagatcgccggctacgatccggcctttgccaagagcttccgcaaacgccgttggtgcgaagaggcgattcctgaatctgcgttgaaccatacgcgtgaattggtgcgcaaggccatcggtcaatttacctctcctttggcgtcacggggcataccgtgggcggtgacctacggcaaccacgatttccagtgcggtttgagcaatgccgaactcgacggaatctaccgcgagtttcccggttgcatcaatccgccgagcgatgcgctggccaagcagaccgtatatatgtgtcataaggacggctcgcctgcggcaaccaatggtgaagaaaccgatgcgccgatttccgcgtccaccattcccggcacttttgcattgccggtgatggatgtggattgcacgcgcaacgtactgggactggtactggtgaattccggtgactatgcgcatggaggcggtttcggcacgccttcgcccgagacattggccttcctcaaggctttgcccgaacatatcggagccaaatcaatggtgttccagcacatgccgctgccggagtattaccaggtactcaaaccggtggccgccaatgcggctttcgccatgcagggctaccgcaagcatgcggatacctattatgtgctggacgaggatcgcactcaagccggcgggtatctgggggaaggcatttcctgcccggatgagtcggacgagtttgaggcgctgcgcgaggggtatttcggcgtcgtagctggtcatgatcatcgcaacggtttcgtcggcgaacatgagggtctgttgcttatcgctacgccaacctgcggattcaatacgtacggaccggctccggccaaacgtgccacgcgattgatcgaatttgatatccgtcacccttacgagccgcgtacgcaattgctggagtttggcgaactggtgggcaagcccagttccaaacgcgcctacacctatgcggtgaaccaaaccgcgcctggcgagggcgagggtgatgatttgctgcgcaagccgtcgctatggagccaactgtccggtttattcaggtaacccggtttattcaggtaactgttcctgatagaggcggaaagcggcgcgaagtattcgtatacgcgcgcggccggaggcgcggccgtataccggttccatatcccggcacaaagatatgccgacatatgatacaagtgataacatttgttgaataaagggttacgttttcgcgtttagggacgtgtgcttcggcacgcattcaaacaagcgcatcccttgcggtcactatctcacgatggttcgcgcgaagcgatgaaccgtcagtatgtgcggagttctggtatggtcacacgtttaacgcggttggcgacggctgtcgcgctggtcgtcggcatgatcgtaccggtcgccacggccgccgccgtcgacggggggggggggctgtcgatgccgcacaacagacgccggcgtgcggtcgtccttggaaccaggacgaacagggtgccatcgttgattccagcaagccttccggccgattggtcggctgcatcagcaatgccgcagtgcaatatcgattgcagaattcgacgcaatggcagaacgttcccttggatgaacacggcaatgtctcattcgattacagcacgagaatagcccaattccgttttgacgcgcaattcgtcatacccaaaggaagcatcaccgaagacaaccacgtgttccgataccatatcgcgggattcaatggcaccggtaccgccatgtcgggcacgctcaacgacgatctcggcacgtacacgatcgctcccgacggattggtgaccatcgtcttcagcgagcacgccatcagcaagaacgccgccgccccgctggacaatggccgattgtacatcgaagccgatcgcagcaaggtgaccggcaataatccggggcagaccgtattggatttcggcaacggccataccaccaccatcaccatgtaccgcagaagcggcagcacctccaagcaggtcgtcggcacaccgacgctgcaaccggacggaacgctcagtaccagatggcaggcgcaatacgtcaacacgggaaccatcgaccagccaatcgtgaggatcgaggattggatggcgtatgagaacgttgatcaaccgaacgccggttccatctcgttaagccgaggatggtacacggctgagaacatcaacgatctgtaccaaacgttgaccacaacgatggggcacggcacgttgacggtatataaggtcacgctgccgaactacaagggcggacccgccgtcacatggccggccggcggattggccacgggaacctattggaaatgggttttccagccggattcgtattcgattcccgcagggcagacgttgacgttgcaatacgattcgacgttcgccaatgatgtgctgtatcccgcttcgaaaaacatttcgcggttcgtccgttccaacaacggaggcgactatttcaccaacaacgcagtcgcttggaatccgctgcggccaaggatctcactcaccaaaacggcgggcgggcagcagaccccctcggcggagcagtgccagaccatgggcgtggcggaaggccattgcggccttgcgtcgtggaatgtctcggtgcgcaatgccggcgacggtcaattgccggcgggatgggtcatgcaggacaccggcagcggcgtctggtacacgaagcaactgctgcaggacagtctgcgcgtggccgtcgatggtaagcagctgaccggagcgacgcaagtgtcctccgacaacggcaggacctgggtggaccttaacaaggcgcaggaatcacagcgatacacgtccttccggttcgtggccgacaacgcgcttgcccccggcacaaccgcggcgatcacctatcaaagcctgttcgattccagtgaaacgaccgtgcgtaagaattcagccaccgcgggaaccggcgtcggtggagcgttcgtcaaacccgtcacctccagtgtgcaagtcgcctctttggtcaaagacggttgcggcgatccggtcgacggacaggggaaccccaaattcacctcctgc

SEQ ID NO: 2308 - DNA, 4889 bp, Unknown
  R119_18m  MAG No. k141_29373
gcaggaaaacaagtgcctgaccccgtcgctgaaagtggtgcgtccggcagtgaaccgcgtgttcgccaacgtgatcgatcagcagatctacaacggcaagcgctgaatcgcataatgcataaacgcgtggggtgcgagagagtacaaacgttctctcgtaccccacgcttttattctgtctgtacaactttcaaggaatgcaaacgagcgccggcgatcggaagtgatccgacctgccggcgctcatacggcagagattagtgatgaatcaggaatacctaacgacactccatcagccattgtcagtaaagcgacaatcagcgacggttccgtcagtgcataacgcgtgcggtaacggtgcggcagaaggcgaaggcgtacgagggtacgtcgagtcttctgccgtgccgttaacgctccgttatgtcagtgacggttgttgaggcggtgatacatttcggagatctccaggtcgcgctcgaattctgcgaccttggtgttcgcgtcgatggtggcgagctcgacaccggcgatgcgggcgaagtcttcccaagcctcgcgaccaacggaggtggtcatgcaagtgtggtgggaggcgccggaacgcagccagcactcggcggaggtcttgaggtccggctgcggcttccacagaccacgggcgcacggcaactgcttgagctcgccgagcggctcgaccacgtcgaccaggttcatggtcaggcggaaacgttcgcgcacgtcagacatggacacgacaacggcatccttcttcggggcgacagtgaagaccaaacgcaccggatcggccttgccaccgatgccgagcgggtggatttccagcttcggcttggcgacggtgccgacggacggggagacttcaagcatgtgggagcccatgatcatctcattgcccggggtgaagttgtaggagtagtcttccatgagggaagcgccgccctcgaggccgtagcccatcactgcgccgatgcgcacgagcacggcggtcttccagtcgccttcggcggagaagccgaagccatactcggacgggaagcgctgcgggccaacgcccggcagctgcgggagggtgcccaggtcttcgaagttgtcgacgccggcggtacagccgttggcgcgcatcatgttgaccatagcggcttcttccttggccgcgatgaacagggagtcgtacttggcgtcgagcagagccgagtcaacgtcgtacttggccttgtagtcttcgatgatgtccttgacctggtcatccttgacggcgtcgtaggctgcgacgagttcgttgactgcccaagtgttgatggatgcgccgaacacgcgctcggcttcggtcttgtcaccttcggtaacggccacattgcgcatgttgtcgccccaacgcatgaccttcatgttgttggatgcgtcccaaccggcgcaggcgcgtgcccaggtgccgatttcttcggcaacggccggatcggtgtagtggccgaccacgatcttgcggttgatgcccagacgggtcaggatgtagccgaactcacggtcgccgtgtgcggcctggttcaggttcatgaagtccatgtcgatggtttcccacgggatttcgaagtggtgctgcgtgttgagctgcagcagcggcttggtgagcacttcaaggccgcggatccacatcttggccggggagaaggtgtggcaccaggtgatcacaccgatgacgttcgagttggcggaggcttcgaccatgaaggccttgacgccgtcggaggacttcagggtcggcttgagcaccaccttgaccgggattttgccggtcgcgttgagtgcgtcgacgatttcgccggactgctcagccacctgacgcagcgcttcttcgccgtacaggtcctgggatccgacgccgaaccagacttccttgccttcaaacgggttttccattgccatgtgattgttcctttacttcgttgtttatggaatttttaaattattatttcgattgcgatcgctgatttgtggctcagtgctggccgtagacgttggtgtaacgatcattcaacttcgcgatatcctcatcggaaatcggaatgatctcaccaagctggcgggcggcccacatcgtatgagcgacctcctccgtcatcgccgccgccttcaccgcggactcagcgtccttgccaatcgtgaatggaccatggttctgcatcagcaccgccggggacttcggatactccttgagcgtctcgaccacaccctcgccgatcgcctcggaaccaatcagacggaacggacccaccggaaccggaccgccgaactcgtcgcccatcatcgtcagaccgcacggaatgttctggcccgtcgccgcccacgccgtcgcgtacgtggaatgcgtgtgcaccacgccgtacacgtccggcatatgacggtagatatacgcatgcgacgccgtatcggaggaaggagcctcggaaccgtccaccacgttgccgtccagatcgcacaccaccatgctcgacggggtcaggtactcgtaacgcaggccggacggcttgatcaccatcaggtccgcggtgtgcagacgctgcgacacgttgcccgcggtccacaccaccaagttccacttgaccaactgctcgtgcaaagccgccacgacctcacgcacctgcttgacctccgcacgcacctcaggaccataatcagccaaagtagccataagaatattcctttctattcttaaaaaagtttttacttagtttccaaatcgattgtttggattgcggtgtgttcgatcggcagccccttgcggaagcgatcgaagaattcctcgaatcccgcgacatcgccttcatccggattttccgtggtcgaagcggcatcggcgaacacgcggacgtcaaggaattcgtcgagcggccggtcggcatgccacagataatcggcaagcacggccatgccccatgcaccgccttcggcagcggtggacattaccttgatcggcgtatcgaatgcggctgcgagaatcttctgggcaaccttcggagtggtgaagatgccaccgtggccgacgagggagtcaacggcaacgccttcgtccttggtcatcacatccatgccgatcttcaccggggagaatgcgctgaacagctgggcgcgcatgaagttgccgaggctcatgcgggcttccgggccgcgcgcgaacagaggacggccttcgggcagtcccgcgaggaattcgccggagcggaacgggtagttgatgagcccgccgcagttggaatcgacatcgtccgcgatggcggctcggaacagcgtgccatacaaggtaccggcgtcgaccggagtgccgattgcggccgcgaattggccgaacagtccaacccatgcgttgaggtcggatgtgaagttgttggcatggctcatgcctgcaagatcgccggcaggagtggtgacgaggtcgacttccggatgcagacgttccagcttgtgttcgagcacgaccatggcgaagatggaggtgccggcggaaacgttgccggtacgcacgcgcacggagttggtggccaccatgccggtgccagcgtcgccttccggcggagcgaacgtgatgcccggctgcagcgtgccggtcgggtcgagcagcttggcgccctcctcggtcagcgtgcctgcaggagtgcctgcgaccagcggttccggcagcaggtcggcgagcttccacggctgggctgcgacttccggaatcgcattgaacttttcgatgaattcggtttcgtaggtgtgcgtggtcgggtcgatcgggaacatgccggatgcgtcaccaacgccgagcaccttcttgccggtgagcttccagtgcacgtagcctgcgagggtggtgaagaaatcgaccttgccgatatgctcttcgttgttgagcacggcctgatacaggtgtgcgatggaccagcgttccggaatgttgtactggaacagttcggaaagcttttcgtgcgcttcgaaagtgttggtgttctgccaagttcggaacggcaccagcagttcgccatccttgtcgaaggcgaggtagccgtgcatcatggctgagaagccgatgcggcccacgcgggttagcttttcgccataggcgttttcgacgtcttcggcgagtgccgcgtatgcggcctgcaggccggtccagatttcttcctgcgaatagctccacaggccgtcttccaaatggctggcccagccgtaatcgccggctgcaatggtgacatacgtgtcgtcgatgagcacggccttgattcgggtggagccgaattcgatgcccagactcgtcttgccagcgcggattttctcggcagtcagcgcgatgtgatcgtcaagtacctgctcttgcgccatagtttcaaactccttgcatacgagtgcctcacaaccacattgttggcagaatgttagcgctcactgttaacgctcactattctaaacagaaagtcacgactatacaagttcgacgtgtcacgaaatcttcaatgcactacatgcaaatcgtcagccgatttctcgatataccggcttcacgcaatccagccagtacagcagacgtaaaagagcgatataacaatcacaagaagtattcagcgacggctggcggtacccaaagacgcacgcccgatcacttttgcggaaatcaaaccaacgccatgctgcgacgaggcgaacgaattctcatcgccctcccctagcaaaaacaacgtctcacgcatggcggcaacgccaagctgttcaaaatcagggcgaaccgtggccagcggcgggtacatgttgtccatagcgggcatgtcatcgaaaccgaccagactcacatcctgcggaatgcgcatgccatgttcatgcagcgcacgagccac

SEQ ID NO: 2309 - DNA, 5724 bp, Unknown
  R119_18m  MAG No. k141_30013
ctcaatgccgaaaagccgggtgccgccaagcccagagtcatcatcatggtcggcgtcaacggcaccggcaagaccaccacggccggcaaactggctcgactgttcgtggccgaaaacaagcaggtcatgatgggcgcggccgataccttccgcgcggcggccgccgaccagttggaaacctggggcgccaaggtcggcgttcccgtcgtccgctccgacaaggacggtgccgacccggcatccgtcgccttcgaggcatccgccaaggccaaggaagcgaacgcggacgtgctcatcatcgacaccgccggccgactgcagaacaagtcgaacctgatggacgagctcggcaagattcgccgcgtcaccgaaaagaacctgccggtggacgaggtgctgctcgtgctcgacgccaccaccggccaaaacggcatggcccaggccaaggtgttcgccgaagccatcggcattaccggtgtggtgctctccaagcttgacggttccgccaagggcggcatcgtgatcagcgtgcagaaggagctcggcgtgccggtcaagctcgtcggtctgggcgaaggtccggacgatttggcacctttcgatcctgaaggtttcgtggacggcattctcgcgtagacggtcgagctctcctcagcgaggggagccctgcgtccgtccacgttgtgggcgcgggaaacgcccgcaacgcaccaaacccagccccgaatcatattcgaaacatgattcggggctttcccgtatacgttggaatcatgccggaatcagcccacccgacatcaacctaactgtcagccacgcttaacaatcgcgtaacttggcgtaacgaaaccaaaacgcggccggctttaactgacaaactgttagcccccataagggggacggcattgtagagacaaataagacgccggccgcacaaagcccccggtgccctgaacgaaagagagggaggtagacatgggagcgattgattccggtaacaccgcatggatcctgacatccgcgtccttggttttcctcatgacgcctggtgtggcgttcttctacggcggtatggttcgtgccaaggccgttttgaacatgctgatgcttgaggcggccgcgctgtcggtcaccatgattatttggactttgtggggttggtccatcgcatacgccggttccgacatcggcggtattttcggcgacccggccagcggcttcctgctcaaggattccatggtcgcgcaggacggcgtgttcaccgccaccggtctgaacggcaacaactacccggtttctgtggacgtcgccttccaggtcgccttcgcgatgattaccgtaggcctgatctgtggcgccatcgccgagcgtgtgaagtacagcacctggatgatcttcgtggcgctgtgggttaccttcgactacgctcctatggcccacatggtctggaacggtggtctgctgtctgctgacggcgccatctccaaggctatcggcgcggccgcccacgatttcgcaggtggtaccgtggtgcacatcaacgccgcagtcgccgccctgattatcgtgctcatcatcggcaagcgtaagggcttcggcacgcagccgttccgcccgcacaacgtgccgttcgtgatgctcggcgccttcctgctgtggttcggctggttcggcttcaacgctggttccgccttcgccgccaacggcaccgctggctacgcttgggtctccacttccgccgccactgccgctgccatgctctcctggggcttcaccgagaagattcgctccggccactacaccgctatgggtgccgcctcgggtatggtcgccggtctggttgccatcaccccggccgccgatgtggtttccccgctgtgggccatcgtgatgggtgccatcgctggtgttctgacctgcctggcctgcggtctcaagttcaagttcggctacgatgactccctcgacgtcgtcggcgtgcatggcgttggtggtttcaccggtactgtcctcgtcggcttcttcggcgaaggcaccggcctgctggctggcggcgactggaagcagcttgtcgttcagctggtcatcgctctcgtcgccatcctctactccgcggtgatcaccgcgatcatcgccttcgctctggagaagaccatcggttggcgcgtcaccgaagctcaggaagtcggcggcatcgatcttgccgaccagggcgaacgtgcttacgattttgctggtactgccagctctgttctcaaggaggtgaggtgagatgaagctcatcaccgctatcatccagccccataagctcgacgacgtcaaggaggccctcgcggccgccggagtgcacggtctgaccgtgtccgaggccaacggctacggccgtcagcgcggccacaccgaggtctaccgtggcgctgagtacaccgtggacctgattccgaagattcgcgttgaagtgctgtccgatgacgcggatgccgagacgctggtcggtgtgatcatcaagtccgccggcaccggcaccatcggtgacggcaaggtgtgggtcgctccgctggactccgtggcccgcgtgcgtaccggtgagaccggttccgccgcgatctgataacacagacgtccatgcctagaaggggatggactgcatgggaaaggtccccgcacgccgcgaattgacgccgtgcggggacctttttggcaatgaaagatgaagcaatgacttcagcagtagatggcttgaaacaacgattcatggatatgagccagccggatgacgatggtgtctaccggaatggtgcgaccaagcgtaaagcccgcacggaactggccatgcaatgcctcacggagctgtggaatgcggcctgcaaggatgtctctttccccgtgcccgactccggcatcggcttcgccgcggtaggctcgctggcacgtggtcaactgggccccagctccgacctcgacttggtcatcatctacgagcctcgcacgttgaacgaccagcagctcaacgagttggccaacaaactctggtacccgctatgggacagcggtctggacctcgaccactccatccgcacgcgcgcccaatgcgaggaagtcaccgaccatgaccttcccgccgccatgggctggctggacgtgaagcccatcgccggcgacactgctctgattaccaccaccgccacatccatcctcgaacgctggcgcaaggccgcccgcaagcgcctgcccgaactgctcgactccgccaaagcccgactcgacgaattcggccgcctccaatacgtcaatcagcccgacatcaaggagacccgtgggggtttgcgcgattcggtgctcgtctccgcgctcgccgtctcatggctggccgaccgcccgcacggcatctacgacgaagccgtggaacgtctgctcgacgtacgcgactgcatccatctggtggccggcaaggataccaacctgatgctgacgccctatcaggccaaagtggctgccatgcttggccttgccgatccgacttggcccgaaaacgagcgtgccgcctactcgatcgacgatttgcagacgctgcttgcccgtatcggccggcgcatctccttctcgcttgattccaccgcatcccgcgctggacattcgctgacccacgaaaagccgcgattcgcgttcttccagatgttctctcagcgctctggcggcaagcgtgaagccccgcaattcgacgtggtggctcccggcgtggccaagcacgaaggcgaattggtgttggcacccggtgccgagcctgccaaggatgccaagctggcgttgcgtatggccgtggcggccggcgaattcggtttgcccatcaatccgtctaccttggttaatctgaagcactgcccgattcacgacaaccagtgggatgacgaatcgcgcgagctgtttattcgcctgcttgcatgcgggccgaatcttatggaagtgtgggagagcatcgacttcgtggacattccgggtcgatggatgccggaatggctcggcgtccgcaaccgtccgtccgcctcggccgcccaccggtacaccatcgatcggcatatggtggaggtcacgtcgcgtctgggtcgtgagacaccgtccgggggacggtatgatgacgatcatttcaaggcgttgctgttggccggtattacccatgacatcggcaagcgcgcgttcgtggccgatcacgccgccgagggtgcccgccatgtgccggtgattctcaagcgtatgggctacgcgccggacatcgtcgactgggccaccgtgctggtgcgtgagcatttgaccctatccgaatttgccacgggtaaggacccctatgatccggccgtggcggaggagttggccgaccgcttgcaccacgacaagatgctgttggatatgctgttcgacctgacccgggccgacggctcctcgctcggtgccaccgccggtgagaccatcaccaagcaatacggctggtccaagtggcgcgaacaaatcgtgcgcggcatgtattccgccgctcgcgccgcgatgtaaacggaatcgcccagcacttcgcgcggccgatacctacttcatccatgcgtccgagcgcacgcgcagcccgttggacaggccgcgcccgcccatgagcaccacgttgaacgcggcccagagcacggcggtacgcatcaggtcgctcgtcagcgccggcgtcaccatattggccagtatgagtatgagcgtcacatacaccacggcggtcagcgtgcaggtgcctgccagatagcggtagtcgcgcgcgccgataagaatgccgtcgattgccatcatccagccttgcagtgggaagaagatgcccatcgtcaccatgccaacggcaatcaacgtctgaatatttggcgtaggggagaagaagtgcccggcgaacaggccgactaccgcaaaagccgtgccgattaccgcgccggtgaccagccccgcacgcccggtcgcccgcgtcaaccgccgcgcctgctgcacgctgccagcgcccagcgttgtggccaccagcgtctggccggcgatgcccacggaatccagcatgttcatcgcaaaattccaagaggagttcacggcctgaaacccggccaacacggcagtacccatgcgcgcggcacaggcgaccgtagccaccatggccgcacgaatcgccaatgtacgaatgaacaatggcagtccgtcgcccccggctgccgcaataccggccaaacgaggccgcagactcgcaccgtccgcccgggaccacagaatggcggggattaccaggaacagccccatgaaccactgagctatcagcgtcgccactccggagccggcaatgccccaattcagcacaataacgaacaacacatcaagcgccgtgttcaccaccgcgccgcccaccgcagcgatcagcgtgatacgaaccttctgcaatcctcggaaaatgccgttcgccgcatataccatcagcatgcctggcgcacccagcacgattgcgcgcgtataggtcacggcttgttccaacacttcgccctgaccgcccagtgcccggcataatggctcggcagccgcgaacaatcccaatcccagtacggtgccgatgctcaaggccagccacaggccgtcaatgcctgcctgcagtccctcgcgacgacgacccgctcccagcagatgcgccacctgcgcagtggtcgagtaggccaggaatatgca

SEQ ID NO: 2310 - DNA, 5584 bp, Unknown
  R119_18m  MAG No. k141_30176
ccaagtaattgagcaccgatccggcggccaccagcagcgcgccacaccaaaacggcagcgacagcgccaaacccagcagtaccgcactggccccggtggacagcaccggcgtggcataggacgcaatagccagccgctccatagacccatgcagaatgccatagccccagcaggcataaccgccgccaatcgccgccgcggcaatcaacacaaacagccatgcgaccagactcggcggctcggccggccacccctgcccggacgcgaagtggataatccacaacgccacggccacgcaggggaagaacaatgaagtgccgtccaccccatgactcatggctggcgtgaacaccgcgtacaccgaccaagcgagcgcgcccgcgaacgccagcgcatagggcaaagggttggcggcgatatgctgcacggccgcatgccagtcgagcccggaattaccgccgaccgccagcaccacgccggcagtggccacaatcgcgcccggcagcaccttgacgaccgcgtgcttgcgatgggatacgcccgccgacagcagcaccatcatcgtgggccacagatagttgaccaggctcacttccaccgaggatgcgtcggtagaggccagacccagcgagagggatatcgacgattcgtaaaatacgaacaacaggccgccgataatcaagtatttcttggggaactcgcgaatcgggaccgggcgccggaacatcagcagcaggatgccgccgaccgtgtagatcagggccgaaccaagcgtggcaccgaagttttcggagacgatgcgcacggtgccggccatgaagctccacagcaggatcgccatcaggccgatggtcgtggcgcgcgcggatacgacgtggccgccggaacggctcgccgccggggccggcgtgccgcttgcgttctgtgcgccgttcgccatatgtccgcctctcttgcctcgtttcgaaggcattctactcatcggatgtgtacagctgcagaacggcacacgaccggcgcgcgaacagggtggggttcggtgattgaaacagcaaaatgccgggtagggtaaatccctactcggcatttgcattggctatgtttcccgccgtctgtcaggttagtcggcgttgaaagcgtagggcaggcggcgtgggaagcatggtttggttacgatttatctctcccccacccgcttcgcgggagctccctcgtcagagggggcaaagctactcgaagcgggacttcgggacgaatcaagtatcgtcagccctcaatcgcgatttggtgcttggactcgacttgcggctgggcctgcatcttcggaacctggatgcacagcgtgccgttccggtagctggcgtggatgtcggactccttcacgtcctcgccaacgtagaaactacgcgagcaggagcccatgtagcgttcgcgacgcagccacttgcccgaatcggacgcgcaagcgcacttgctgtcggaagcctcgccctcagcggccggagccttgtcctcatgctcgctgcaacgcgaggcggacacggtcagatagccgttgttgagctcaaggttgatatcttccttcttaaagccaggcatatcgatgtcgacgtcgtaacccttgtcggtctcgcgcacatcggtggtcatcatgttggcaggcattgcggcactcatcgtgttgtccgtgttgcgccaaccctcaaagaacggatcatcgaacagatccgagaacatcgtgtcattcatcaaagccggaaacattgccataatcggtactccttgattaggagagaatcggcttggatgccggccgccaacccgtatcgcggggctagcagcggttatcgtggccggttccggaaccctcccgggctctcaacctttaaccttcacttcacccaattcccgagcgcggcaatcattccgggattatgcccacagagaaattgcggcggggaatggttgccggtaaagccggccgagccgagcgccgtgaccaccctcagccagtcttacggctgccagctcccgccagcgggagcatatatacgcacaccagtaggcgtactcatatacctctgccaacgggagcatgctggcgcgcgaacggctcacatctgccgggcgttttcgagcaaggcgtttttgaggtcggactcgatttggcgcatcttgacctgggcggcctcgcggttggccttgccttccttctggatctgcacggtctccttcagggtggcgatgagttcggcgttgatcttctccagcgtgtcgatttccaccacggaacgctggttggccttttccgcgtccaccgcacccttgtgcagggcggccgcgttacgcgccagcagcttgttggtcacatcgtcggccttgttctgcaggtcgagggccttgcgctggttggacaggcccagcgcgatcaccatctggctcttccacaccggaatcgtggtggagatggtggtgtcgatcttgtccacgatggtctggtccgcgttctggatgattttgatctgcggcgcggtctgcaaggtgaccacgctgatgcggtcgaggtcgtcgagtcgcttggcaaaacggtcgagcttggacttgaagtccttcagcacttgcgcctgcatggcgtcgccactggcggcggcctcggcctccagcgctggcagctggttggcgttgaagtcggcgagcgccttcttgccggccagtacggtcattttcagctcacggtattgctgggcgttctgcgtgtacatcgtgtcgtacatggagatgtcggccacgagtttggcttgcgcggattcgagacgcacgatgatttcgtcgatttgcgcgtcgactttctgatagcggcggcgcagcttatccacgctgacggccacctggccgatgatcggaatggtgcggaagccgccgaggtcagcctcgtcaatggtgaccagcatggtgttcagtagttcgcccgcctcgccggtgtctttggagcgggtgtcggagaggatttcgtcggcgaaggtggaggtggcgcgctgggcgtccttgccgtagctggattcgatgccgtcgcgagtgaagtcgatctggccggccatctggttgaccgtggcctggtcggcttcgggcaatttggcgatctgctggtccggggtcagggccgcggcggcttgggcttcggcggcggtggggacgagggtggtgttgggggcggcttggttggtgttgagtaacgggttggtgatgggggttgcggagcttttggtgaggtctgcgagggtgatgttttggggcattctggttccttttttgatagttatgtttgggtctctccccccacccggctttgccgggagcccgaacgcaattaaggacggcttacagccgatttcttatttgctcgctctcgctcgccttcgtctacaaacagcccactgggctgtttgctatacgactcagctcgtcagagggggttaataaaaacaccgattgggggctggcaaaagagctattgcgtggattggagggtggcgatgagttgttgcatggcgtcgttgttgggcagttcggatacggcggggatctggtcgagcgtgccgggcacgccgaatcggctgatcgaatcggtgccggcgaagttggccgcgcggaagccgtggcgctcccacgccagcttctgcaccgccggtgttttcaacaggttcagcagtgtgccgcctttctcgtccaaagccatcagcgtgtgggtgctccacacggtcggcgtcgggtagacgatgaccacgtcgtccttgatctgcttgaacgcatccggttggttcacggccaaatcaagcagctgcgattcgtagcccaccatcatcggcttggagcccacgcccaaggtcaggaactggttgaacgaatcctcggaagaggtctccatccaaccggatttggcgaagatggaggcgatggtcttgccgtcgcgcgccaccgaatcgaccgtggccggctgcccgccattgagcaccgtggcgagcagcgccgcgtattcgttgcctgagttcgacttcaccggatcggtcgagtcgatgcggaactgcccgtagcctgccgtgtatccgacgtcggcccaggttgtgttggcgaccatcgcgtccacggctttggccatatccatgtggtacgcgcccgaatcgtccttggccataagtccgccgttcacgagcccgtccgccacggccttgtgcgtgtacagcacaatcggtgagttgaagacgatgtcgctttgggtggccttgacgcctttcgcattgccgtattcgacggccgcgcgcgaggaggggaacaggtaatccatgcctttccggtccgcatccatcatggccagcgatccggccttgcgatagtcgatggcgatgccttgcttggcggcaagcgccttgaacttggcgtcatcgaacaggccgattttctcgccgcccaggtagccggtgatgctcacctgttcggtcggttcggccggcgctggttgcgattgccgccacaccagcgtgccgcagaccacgcccactaccgcaagcagggcgatcagtccgatgatttttgatttggagagtttcattgtgcgtccgttttctggtccgactggtgagccgggccgccagatggagtctgactgggtgcatgccgtccttcatcagcagccgaggaaggcacaggcgaaggtgcgacgtcgtcgtatccatccatgcgggccaaccgttggatggcgtcggagtcggccgtaatgcccaacgtcttggcgcttaccgcccggctgagttcgccggcggcggtctgttcgagcacttgcagcgcctcgatggtttcgattcgtaccgtggctatctgatcgcgtgcgccggaactttccacgtccacgtaggagcgcaacagtttctcggtctgctcgccgtacacggtgatgtagtggcgcaacgtcgggtaggcggaggtgtctcgggtcacgtattgcactcaatctttggtagcggcgatgaagtcgttggcttcggctttgacggctgggtcacgtacttgcttggtgagcatggcgatcgagttgagttgagcgttcgccgcgtcgatcgtatcggcggtcttctgaccgttgggcaaggcggaaaccagcattttgccgatgcgtcgctccggctcggtgagcgtggaggcggcgatatacccaagtgcggccagtaccacggccacgatcaggccgggcactccgccgccgaccagtccgaaaccgagcccggcgagcagcagtccgacaacgaatccacagattacctggagcatcagttgaagcccttgacttggcggaagacggcggcgaggtcgccggagcggccgtcgaataccttggcgttgctcagggtggcgagagacttcagctggctgggatcggcatcgccgaacagggttaagggtcaaaaagtgtgtccggaatcgcggattttcacggattgacctgtaggtttccggaaagtatatgctccggaagcatatatctagcccccgacgggaaatcctcggtgtggcagccgtgatgtgctatgcg

SEQ ID NO: 2311 - DNA, 4861 bp, Unknown
  R119_18m  MAG No. k141_31257
agcaaggagtacggcattcccgcagtcgcgcatctgaccgcgttgtattccgacaaggcgaaaatcgacgaggccctcgacatgttcgagcaggccggcgtgagcgccgtactcgcattgcgcggcgactacatcgacggcgagcagctggtaggcgagttcaaccacgccagcgacctcgtgtcatacatccgctccgtgaagccgggcctcaaagtgttcggcgcctgctacccggaaggccactaccaggctgactcgctggaccaggacatcgaaaaccttaagatcaaggtcgatgccggcgtcactcacctgatctcccaactgttctacgacaacgaggacttctatcgcttcctcgacaaggcgcgcgccgccggcatcaccgtgccgatcgaggcgggcatcatgccggtgcgtggtgccaagtccgtgcgtcgcatggccgaacgcaacgcctcgcgtatcccggacaagctcaacaccctgctgaacaagtgggaggacgacatccagtccctgcgtgccgccggcatcctctacgcttccgagcagatcgccgacctcgtggcccacggcgtggacggcgtccacctgtattcgatgaaccaccccgccaccacgcgccgtatctggcgcaatgcggaaccgttgttcctcggtacgcaaggttgacgcatatcgcggcgcggcgcatctcaatgcgtcgcgccgcacgttaatctgctggcgaaacccagagttcccccagcggccgatggatatcatgaacgtacaagccaaccaaagcgatggaaggaagtccgttatgtgcactggtgtccgtttctccgatgatgagggcaacacctatttcggccgtaatctcgactggagtttctcatatggggagaccatcctggtcactccgcgcggctaccgctatgacacggtgttcggtgcgggcggcaaagcgaagccgaacgcggtgatcggcgtgggcgtggtcatggccgataggccgatgtatttcgactgcgccaatgaacatggtctggccatcgccggcttgaatttccccggctacgcctcgttcgtccacgaaccggtcgaaggcacggaaaacgtcgccacgttcgaatttccgctgtgggtggcgcgtaatttcgactccgtcgacgaggtcgagaaggcgctcaggaacgtgacgctcgtctcccagatcgtgccgggacagcaggagtctctgctgcactggttcatcggcgacggcaagcgcagcatcgtcgtcgagcagatggccgatggcatgcacgtgcatcatgatgacgtcgatgtgctgaccaatcagccgacgttcgacttccatatggaaaatctgcgcaactacatgtgcgtcagcaacgagatggccgaaccgacttcatggggcaaggcctccttgaccgcctggggtgcgggtgtgggcatgcatggcatcccgggcgacgtgagttccccgtcgcgcttcgttcgtgtggcctacaccaacgcgcattacccgcagcagaacgatgaagccgccaatgtgtctcgcctgttccacaccctcggctccgtgcagatggtggacggcatggcgaagatgggcgacggccagttcgaacgcacgctgttcaccagcggatattcgtccaagaccaacacctattacatgaacacctatgatgaccccgccatccgttcctacgccatggccgattacgatatggattcctcggagctcatcagcgtcgcccgatgactccttcccggctcatgccccattcggagggcatgagcgtatatagtggaatcttatggaatcgtcgatgttcaaacccagctccatggatctcatcagggcaggtctgcaagacctcgacaaggcccgcaccttgttcgaccagctcaagacggacgacattcccgatgagcgatgcgccgaactgctgagcatgctggcccacgcctgcgaccccgatatggcattgagcaatttcgtggatatcgtcaacgcgatgcaatccagccagcgcgatctgaaacacgtcatccccgacaacgacgccctgaagcgtctggtcacggtgctcggcgtctccgacgcgatgggcaagttcatgcgcttcaagccgcagcttgtggaggccgcagcagtcgacaactgcaacagccatctgttcaatcacgcgcaacgccgtgcacgtctgctcaaggcggtcggcgcggacccggacgaaccggccatgcccgtcgcctccaaggatctggccgaagcggccacggccttgcgttccagctaccggaaccaactggccgccatcatcgcccaggatgccgtggcggacgacccggcctccatccaaccgaccatcagccgcgaactgtccgacctcgcggacgcggcgctcgaaggcgcgctggccatcgcccgccacgaaaccgagggcagcgagcacgtgcgcttcaccatcatcggcatgggcaaactcggcgcacaggaactgaactacgtctccgacgtggacctcatctacgtggtcgaaccggccgacaaggacgtggaccatcagacgctgatccgcgtgggcaccaagatgggcaccatgctgcagcgtgtctgccagtccgccatcatgggcgtggccgagcagccgctgtggcagatcgacggcggcctgcgcccggaaggcaaggacggcgcgctggtgcgcgtgctctcctcgcacaagaactactacgagcagtgggccgagaactgggagttccaggcgttgctcaaggcccgcccggtggctggcgaccccgacctcggccgggcctacatggatatgactcggccgttcgtgtggagcgcgtccaagcgtaagaacttcgtctacgactgccagaaaatgcgcaagcgcgtggaagatctgattcccgcacctctgaaggatcgcgaaatcaagctcggccgcggtggtctgcgcgatgtggaattcaccgtgcagatgcttcagcttgtgcacggccgtaccgatgaatcgctgcgcaccagcaacacgctcgactcgctgcagcgcctgtccgaaggcggctacgtctcgcgcaaacaggccgtgcgcatgtctcaggactaccgcttcgagcgcgtgatggagcatcgccagcagatctggtccctgaagcgcacgcacctgttcccggacctcggccgggcctcggtcggaggcctcgaaaagaagcgcgacatcgacgtggatgagctcaaccagaaccaggagctgcgtcgcctcgcccgcgcattcggcctgcacccggaagaactcgtcgacaaatacgacgacacccgtcgcgaagtacgccacctgcacctcgacatctactatcgcccgatgctgccggtcaacgcccagatggagaacgaccagatcgtgctgagcgtcgaggccgcacaggaacgattcgaatccatcggcttcggcgacccggacgccgccatccgccacgtgcaggcgctcactgccggcgtgggacgcgcggccaaaatcaaccgcatcatcctgcccgccgtcttgcagtggctgggcgagggccagaacccggacatgggcctgctcaactggcgcaagctggaggagaacttcggcaccgaatccggctacctcggcttcctgcgcgactccacctccgctgcccagcgtctgtgccacatcctgtccaactcgcgattcctgggcgacgcgctcaacaagtcggtcgaatcgatcagttggctcggtgatgacggcaatctgcaggcccgcacgcgcgaggcattggatgtgcagaccggctcggcgctggaacgtttcggctcgaacatcaacgagttcgccacctccatgcgcgccatgcgccgccacgaaatcgaacgcatcggcctgtcttggatgagcggtgtgatcagcgactccgacagtctcaaggccatgaccgacgtgtatgacgcgatcatcgacgcctcactgacctgggccgtgcgccaccagatcgccgcgttcggcgtcgaaaccgcgccggccggcatcaccgtcatcgccatgggccgttacggcgggcgcgaagtgaacttcagctccgatgcggatgccattctcatctaccgtccggccgacgatgccgacgacggccaagccaacgccttcgccaagaaggtcgtggaagacctgcgcaacatcctgcaaggcccgacgacgctggaacccaagatcgaactcgacctggacctgcgcccggaaggcaagaacggcccgctcgtgcgctcctacgcctcctgcgaggaatactacgaatcctgggcctcgacctgggagcgccaggcgctgctgcgcgcccggtacgcggccggcgacgccgaactggcgcgggacttcctgatcaacatcgccgacccgttgcgctacccgaccacggagctgaccgaggccgaattgcagaacatccgcaagctcaaggcccgtatggaggccgagcgtctgccgcgcggcgtgcgtcgagaacgtcatctgaagctcggcaagggcggtctgtctgacgtggaatggaccgtgcaactcatgcagctccagcacgccggcgatatcaaagatctgcgcgtcaacggcacattggaggcattggacgtgctggaggccaagaagctcatcagcgctatcgatgcgattcagctgcgcaaggcatggacgttgtgcaccgcggcccgcaacggcaactatctgtggagcgggcgcgccaaccaggccgatattctgcctgatgacatctattcgctgggcggcatcgccgtctacctcggctacggcgcccaccgcggccagcatttcgagaacgacct

SEQ ID NO: 2312 - DNA, 5738 bp, Unknown
  R119_18m  MAG No. k141_31768
gatcgcaccggttccgctgacatcgtggccgctggcgacgtggatcttaccccggaagtcgaacccgatgctgaccggaccgccaatcacccgcaagcgagtgtctccggcaccgcaaccggtacgggatcgaccaaaccgcagccctcacatggcgcttcccattcttcggtgacgatcacgctgaaggagctcctcagtatgaacgggcatagcggcacgacgtcaaccgacgcttcccctgcatctcaatccgccgccccgaccgacgatgcggtgaatgacgatactccggacagtttcgttcagcacggagcctcgagtgcccaaaccacggtgattccgctgttggagcgggaagaacgcgctctgcgcgatgcccgtgccgggttggacgggtatgacagcgagggcaatccgctggccgaatcatccacatcatccaaataatgtcgtgtgcggtgttccgcgccacgccgagcgcgtaacaccgcacatgacgacgcagacacgcggcacaatagagtacagaacctcggccggtgacggccacttaccatgatgttcgtcacaaagacggcagaacaaggagccttatatggatatcgaactgggcattcagaacgtggcacgaccggtgaacttcagcaccgacgaatcagccgataatgtgagccaggccatcgcgcaggccgtggccgacaacgcgacgatcgatatgaccgatgacaagggccgtcgcatcatcgtgcccgccaaggcactcggttacgcgatcatcggctccgaaaccaagcacgccgtcggtttcggcacgctgtgaccgtgaatcgcgcataagcggccttgggcatcatctcaaggccgctttgtattgccacgaatcaccgatataacgggagcacgccgcgatgaacgatctcttcgacagtggcctcgtcggtgaggttctcccccagtttgttcgttttgcctttgccatgccagtcagatccgccggtgaccagtagctggtgccggcggcagatggtgagcagccgttctcgttgctccggtgaattgcctcggtgccatacctccagcccgtccaatccctcgctgatcaacgcttcgatctggtcatcggacagcagtctgcggttacggctcacatcaccggcatgggcgatcagaatcacaccacctgcccctttgacggcggccaccacttcatgagaggtcggcgagggcgtgggaatatagtatttggatgaggcgctgaccgcattcgcaaacgcttccgaacgagtccgatatacgccggcactcaccaaagcatcagcgatgtgaggccgcccaatggtggttttgtcaccctccttgacttgggcgagcacggattgccaggtaatcggataatcacgagacaacaattcgaccatgcgctgcgtgcgttgcaaccgtgcggctcgagtatcggcgaacaagtccgtgatgtgctgattcgtgggatcatactggtagccgagcatgtgtacggagacgttctcatccgtggcggtgatttcggtgccgcggagcaacggcaaaccgaccctatgggatgcggcttcggcctccggccagccggcggtggtgtcatgatcggaaatggccacgcccttgagtcccaatgccttggattgttcggccaatgtggccggcgtttccgtgccatccgagaagacggtatggcaatggatgtcccacccgacggcgggcggctccaaaggcatcacatatccagtcataccttccatcgtaacctcatctcagcattcccacgcaaagcgcagacaggtcgtcaccttctgccaacggccaagaccagacattcggcactcagctgacaaccgcagaggctaatctggagcgcagcgctatcgaaagggacatgatgactcgtaacaccgcaaccgacacatcatccagtaccacgaacaccacgccgcttggcttggcggaggcgcgaccgttgattggatggcgccacagtgccacttggacatatctcatcatgctgatcgcctcggcagtggcattgggggcctcgctcattctgtccgccgagactttgcagttggctaggcatccggagtccgcgctcggctgcgatctgaactcggtggtgtcctgttcggcggtggcccagtcctggcaggcggaaatcgtgaagttcggcgggctgagctatccgaacgcgttcttcggcatcgccgccgaatcggtgttcattaccatcgcggtgatcggtttggctcgtgtgaaggtgccgcgttggttcgcgacctgcacgtggctgggcggactggccgctttggcctactcgtactggctgagcacacagtcgctgttcgtgattcacgcgctgtgcccgtggtgcctgaccctgatgttctccaccaccatccagttcatggcgttgagccatgcgaccgtggcagtgcagggattgccgtcacgtaaggctgtggcggctgatgatagcgacagcgaggccgatgtcgcggcggtgccggccggactcaataagtattaccgcctcaacatcgacctcatggtcgacatactgtggatcgtggcgatcgtggtactcatcatcgtcaccgaaggcgcggccctgttcgctgcctgattcctttacaacaaatcgatatcggcgaccagcgtggctgctccggtcagtttcacgtcgctgtcggtgacgtccacgcgcagggtaccgccacgtacggtgatgtcccagtggctgatgccggtcttggcccgcagcacaacgcctgtggcgcataggccggtgccgcaggacagggtttcgccgcagccacgttcgttgacgcgcatcgtggcttcacccacgccggtgttctgatcgatgtcgtcgacccgcacgaattccacattctggtcggattcgatggtcgggctcaccacgggcttgatgaccagatccagcgcctcgaccaccggcagggacgcgaaggcatcctcgatcaccgcgaccacgtgcgggttgcccatatccacgaacgtgccgcgcgccgagccctcagcgccggggatggtgacctcgtaggcgtcggtttcgccgatcttccactcccccatttcgacttggaacacgttggctccgtacggcctcatattgccgcgtggcgtcagaatcttgacgccggcacgggtgccgaggcggaacggctcggtggagtcggccacgccctcgcgctgagcgaacaaggtgatggcgcgcgtaccgttgccgcacatctccgccaacgatccatccgcattgcgatagtccatgaaccatttcgcgcccccggccagtacgtccgaaagctgatcatcgcttaaatcagacacgaaatcaggccgtgtcaggcgaatcaggccgtcaccgccaatgccgaagtgacggtcgcacaggaatcggacctcatcggcggtgggctcgaatttgccggacttgtcgaggtacaccacgaaatcattgccggttgcgtgtgtcttggttactcgttgcggaagactcatggctttcagagtactctagggagcgaaacaacaccgcaaaacaatcggctttgtgatcggtcgcggcaacatacggttgcaggcatggctatagggaggattcaggcatgagctcttcggctccaatcggcgtattcgattcgggtcttggcggtatttccgtggctcgccaaatcgccaaggatatgccggccgagcatgtgctgtattttggcgattcagccaacgccccgtacggcgtcaagacgcctgagcaggtgagggccctgagtttcgatattgtcgaacggttcgtgcgtcaaggcatcaaggccgtggtcatcgcatgcaacaccgccacttccgccgcggtgaacgatttgcgcgaacactacgatattccgatcatcggcatggagccggccctgaaagtggcgtgcgaccggggcgacgtgccttccgacccgcatcatattccccagagggtgattgtggcggccactcccctgaccttgcgtgagcggaagttcgccaaactgatggatcgattcgattccaacaacacgattttcaaggagccttgccccgacttggtggagatcgtggaatccgggcggctcggcgaccatgacctggtgatgcgcacgctgcatggctacttcgaccagtacgacatggagcacatcgactcggtggtgctgggctgcacgcatttcgtgttttaccgcgactacttccgcgaactgctgcccgaacgggccgccgtcatcgacggcaatgagggcaccgtgcgccatctgggcgttgtgctggagtccctgggcaaactggcacccgaagacgcgaccggcggcgtggaactcgccaattccgatctgtccgaacgtgttacacggctttcacgcgacctgctgaatgcgtgatcggatgcatgatgatgaataggaggctgatatggcactgaagaccgcgatgattgatgtgggcggcgggttccgcgcgattttcggctgcggcgttatggaccgcatgctggaggacggcatcgacgtggacatgtgctatggcgtttccgccggcgcggccaacatgacctcgttcatcgcccgccagcacggccgcaaccacaccttctacaccagatacgcgttccgcaaggagtatgcgagcgcggaaagcttcctcagaaaccacaacttcgccaatctcgactacatctacggcacgctgagcaatcacgatggtgagaatccggtggatttcgcggcgttcgaggccaatccgaccggattcaccgtggtggcctgcaatgccgaagacggctcgaccaagtatttcgacaagtcgcgcgtccgcttcgatgatttcgacatcatcaaggcctcgtccgccgtgccggtggcctgcgagccgtatgtggtggatggcgtgccgtatttcgatggcggcatcgccgatccgatcccggtacagaaggcgctggatgacggctatgatcgcgtgatcctgattctgtcccgcttgcgtgacgaagtacgcaagcagcagaaggatctggctccggcccgcatcctcgaacgctcccaccctgccgcagccgagaggctgcgcatacgctacaagacctacaacgacgaactcgaactcgccaagcattacgaagcggaaggcaaagtgctgatcctcgcacccgaagacctgtatggtctcaacaccctgaagaagaacttcgagggcctggaaatgatgtatcgcaagggatacgcggcggccgaagccattccggcattccttcaggcatagcgcaagcccaaaaaacaacgattctgccatagcccattacacaatggcgcaatgacgtcagaccccgtccggcgatggcacaatcgttgtttttccgtgccataagcccatcaaacacggtgaagcccctcactgggaggggcttcactgatacatacgccattatgcggtctagcggccacaagcaccgctacttgccggcggcggtcgcggcgtcgttcgtctcggtcgcggtgagcatggccttggtgacctgttcgtacaggtcctggtaaccgccgggcgtggaggcgggcagcaccacggtcttggtgttcttcgattcggacaacgaacgcatcacgtcaagatactggttgaacagcaccacgttgttcacatcgttgatgtccatgcccacggcc

SEQ ID NO: 2313 - DNA, 17525 bp, Unknown
  R119_18m  MAG No. k141_32365
ctcggatgatcgaaaggggacatatgaatgaggagaaggacacggacggaacgacggacgcgcacgagggggaccacacgcccgcggacggtgccgggacggagggcgaaggcggcaagccagacactaggccgggcgacaaactcgcgaccatccgacgcacgctgtggtggataggactggtattgctatccccttctgttattggctggtttggtcctcatgatggcaactacgatgtcgcttgccggatattaacaacgttttcccctccttgtgggaaaacgccggctgaacaaatcgtctattctcatcggcttctggcgacattaggtgctggactcgtctgctggcttgcagtcgcaatcctccatattgcgcagctgttcgttgatgatcagttccccggtgtttctcagccgcttcccaataagcacatctttgcaaaaatcgcaacattcatcatctcgctcttcagtctgctgctcttcatgttctatctctgggcaaccgcaatggaggaaggctggtagacgtcgtgtctcttcgccaagcagccgcgtctgtatgcagttaatgaatcggtgaggcagtctctggaatcttcctcaccgattcattagctagcctctatcgacgcggactctccagataagcagcatacatccgcgcaagggtgtctgcttctgccacatcaggaagcctatcggcatgagaagcatctttcaatgctttagctgaataccaaagaaaaattgaagcaaaacacgcaaagccaacaggccggattcatctacctcatcctgtgcaccgtctccggcgtcgccgcgggcctgcagaacacaggctgatctacacaccagcgcatatgggggaagccccgctcacatcgagcagagcttccccgtttcgtgtgcatctttcaccatcttgcaataattcttacatgtaaacagagagttcttacatgaaagaattattgaaaggtgatgaaagaacttactttcacgcgcgccaatcatcccaacacgtatcgggatgacggcccattcccctcgcggcgcaacttgcccgcatcctctagcttcttcaacaaccggtatgcactgatatagctcaggccaaacaaatccatgacatccgccgtagtgacgacaccatcatttttttcggcgaaatccagaacaaggccactgcgccgggtggcatcgatgtcacgctggcgcacgtaagacgccagcccctctgaacgtttgtacactcgggcactcagcatatacgaacgagagctcccgctaccgaccccctctaccaaaccagcttccaccagattctcaacagcggacacgatgcgtcgatgctccaaatgagaaaaatcgcacaattggaccacggtaagcctacgatgctcacgcagcagcgagagcacaatcagtgaccagaccggcaatggagccccacgtcgacgttcctcgtcgccaatcatggttacgaatgcctcgtcaggtaccacgcggcgcaagaacaagataacttcctcagcactggactgtgaataatccgggaaagaaccacccgccgcaatcgacccggcatagatggtatccacgcctcgtccggtgcgttcaacatatccggcagctttcagaatcagggcaagctgcggattgcgggaacgcggttgtgcagtaagcaggttatcttcggagacaccctctatgaatcctccggggttggctatggtcaacccatcatcatcaaccaggaacctcaccgaacccattcgtgcataatcgcgatggcagaaagcgttaatcattgcctcacggaatgcccctcgatcgaagtctggcagatcgacacgaatcaagccgctcatgacttcgtggctgggattccacggctccatcagctcgcctacacgatcaaacatatccaccaagggcaacacgaacggatccatattgacctttggagacatgcctttcatcacttgaaaaacagccgatgcggctggaaccgatcgatgaatagcatcaaccgaaccaatggtgagcagaccagcaacagatggctgcaatccatacgggccgtcaacaaccagctcaagtgcccgatcgaaatcctcatcagtaaaagacaacaacgagttttgcgcattggcactgcgaatatggcttctcaacttgttccgtgagtctggattcaaatcgtccaaccgagcctctggggcaggttgcgcactgaaatcgtagaaccgttgctgagataaacggctaatgaattgggaaacaaacagcggaacgacctcaggcgagccgtctgctttcagccggcgctgtagtgtcttcccctgactggtagacacgatttgctgactgttacccacctcaatactgactatcggcacctcgttctcatacaagagcgccacgcgagcgggaagctgcggaacagtcttattgaaaattagtgccgcaagtccattgatattgcgatgctcgtcacatacgccggtcacagtgccatcgtcttcaataccgagatacagtgtgccgccttcggtattggctagagccactacgttgtcaacaatttcatcatgcgattgagggcgcttctgctcgctcttgaactcaactgtcaaactttctttagtcggcaacatgagcatcccctttcaccatcttgcaataattcttacatgttaacagagagttcttacatgtaagaattattgcaagatggtgaaaggggtaaagagcaatccatcctgtcatctccagcaacttaaatccgatcatcgctgctttcggcatatctgatatcagccgctggtgccagtccaatcacccaattgaagctcaacacggccaaagactctacgccgcagtggattcgcgctcgatgagcttatagcccacattcacggtctgcgggaagaactcgtcgtccaggttctcgatacgccgcataagcaaggtcagcgcggtatccgccatgcccttgaaatcggtggccacggtggtcaaagtcggcacgctgtacatgctctggctcaggccgtcgaagccgataacgcgcacatcgcccggcacacttacgccatcgtccgccagaccacgcagaataccgagcgcaataccgtcgttcaggcagtacagaccgtcgtacttgcacttgcctttcttggccaagccgcgcccggcctcgataccgccgtcaatcgaccacgaggatttgatgaaatcacggcgctcgtcaaacggcagtccggccgcgagaatcgtctccttggcggcccgcatacgaatatcacgcgagccgggaatgatgttgggattgttgggatcgtgattgtcgccgacgatgccgatgcgcgcacagccacgcgcgataaggtgttcgattgccgcccgtgagccggcgtcgctcggcgcgttcacggtgtcgatgggcaggctggtgtcgtagttttccagcatgacggccgggtgccgcttcaggatatcgaccgcacgtggcgcattgatggcgatgatgccgtccgaaaacgtgtacgacagatcgttgtcgtcggtaagataccgggacagttcgatgagcatgtgcgagtcgcgcttgtgcacttcctcagccacacacatggccagatgggagaaatagtcgccctcgaggcccgaggtaaggaaggtgatggtatcggaccgcccagaacgcagggaccggccagacaggttgattttgtagccgagtttgcgggcggcgtcacacacgcgttgcgtggtttcgggcttgacgtaatccttgcctcgcagggccgcggaggcggtggtggcggtcactccggccagttcgccgacatcctttaaggtcaccatcgttaccatctccgcatatcacgaaccttatcgataagaatccatagtaccgcccacatctcagccgaggatgagaccctcggtcgaggccctgcccggcgactcgaacgccgcggtcaccgtggtgagcaccgacgctgcaaacgaaaacatgtcaaaccaagaaatggacatgacggagtcattgttttccgagagggatatgccgcgtccacgggcagacgtcacgtatcaatcacgccgataccgtcatataactgttttcgatgtgagaaagctcatagcttccgaccacagaaaccagccacagcaaccccataacagcgttatagttctgtttgtcggcgtcgacaagagccagcagcgccgatgaaatgcacaccaaggatgtttagcgaattgttcgcagttcgcacgattcgatttgattcgattcgtgcagcccggatggttcacgggggcatgccgtcgtgatgtgcgtggatatgggcgatacgactctcgttcgggtcggcaggtcatcgtacaccagttacgaaaggatccgtccatatatggcaaggtttaccgagaatcgttggaccagcgcgattattcccgcactgctgattcatatcccaatcggtaccgtctattgctggagcgtgttcaagcagcttatcgctgaccgtctccacgccagccccgcctccgtggaatggggcttctcactcgccatcttcttcctcggcatgtccgccgcgtttgccgggccaatggtggagaaaaacatcaagaaatccgcactcgtctccatggtctgcttcgtggtcggcttcgccggcacgggcgtgagcatcgccctgaacttcctgccgggcgtgttcatctgttatggcgcgatcatgggcatcggcctgggcgtcggttatctgactccggtcaagaacctgatgctttggttcgccgacaacaagggcctcgccaccggcatcgccgtcgccggcttcggcctggccaaggccattgccagcccactgatggaatatctcatcggcacggttggcctggtcagcatgttcttcatcctcgccgcggtctacgcggtgatgatgttcgtcggcttcctgctcatcaagcgtccggccggctgggtgtacgatcccgcgacctcacacgtcagccgcaagacaatcctcaagaagcccgtgttctggggcatctggatagccttctatatcaacatcacctgcggcctggccctcatcagccaagagaaggacatcctgcacgatgtgctcaaggccttcccgcagtatgccaacctgagccccgccaagtttgccgccgccatctccggcatcatcggactggtgctcgccgtggactccgtgttcaacacggctggccgcgtgggcttctccacactctccgaccacctgaagcgccgcgagaccgtctatcaggtaatcttcatcatgtcgattgccgtgtgcttgctgcagatcttcaccaacagcatcgacaacgctctgctgtgggccgtgctggccatgctgttcctcgtcaacgcgggctatggtggcggtttctcgacgctgcccgtgctgcttgatcagcacttcggcaccaaaaccgtctccaccacgcacggtctgacgctgagcgcctgggcgttcgccggtctgtccggcaaccagttggcctcgttcgtagttgcccacgcgcctgatcaggcccaccgctacgccgcactcatcccggtgctcaccggcctgttcgttgtggccctgatcagcatcagcctggtcaagtacctcggcgacagaaacgtcacgaaggccgtcgaagaccgaggctgagctgccgcaaaacaacgattctgccggagtcgggcgcatcgatcgcatcagtcgatgtacgtcacgattttggcagaatcgttgttgttgctgttgagtacctgaggtcgtgcggcttacgcgccgaccagttcgagcatttgggggatgctctttttgccgaattcgacttgctgggtgccgtcggcgtgggtgatgacgatgcagggcacgctcatcgcgccgtactggtccttaagttcggggaagtgcgagacgtcgtaggcttcggcgcgcacggccgggctcagggaggcaatgcgctgggaagcaagcacggtttccgggcacatcgtgcaggtgagcgagacgaggatcatgatgttcagcgggtccgtgatggacttcgcgcgttcgatcaggtcgtcgcccagcggctggccgggaccggccgcattgtacaggccaagcacgaacgagttgaactcgtggccggaaggtacgccgtggaaggccagaccggtgaagaccagtgaaccattgccgtccttgccggccttgccgtcgccctcagccggcacgcagatgcgcacagttgggcgggcgagcggcaggacgccggcgacgtcgaatgtggcgcggccggaatcgtccaacgaaccataagtgggcagttcggtgccgtccggcaaagtgacggccaatggctcgccaaccaccaaagaagtaggcacagaagcaccatccaccgccgtgatcagccctgcggcatcgacggcgaccgagttcagcttgccattcgacaacgcgactatctcgccgatgaagccctgcaattccgccgaaagcggggtgctgtccagctcaagggcaagggtgaccgggcgggtcatgcggccgaagaccacgccaagctgctgcttgatggcggcggagaacagttcgccggacttcttggcggcgctggctgcggcatcggcatcggcactgcgcttggcgggagccggggtgggcgtcgtgccagcggccgaggcggcggaggcggctttggcctcggactcctcataagcggaagcagtgggacgcggcggcaccaagccggttttctcgctcatctgcttggcataacgctccagttccacggcggcaatcgcaccgtcggcggtggcggtgaccacttggcgcaggttcttgacgcgcagatcgccggccgcgtacacgcccggcaccgaggttctgaggtagtcgtgcgtgaccacgtaaccgtggtcgtcgagctccaccacgccgcgcaccaaatcggtggcgggcacatagccggcgaacacgaagacgccgaaggtgccggcgtcggcgggcttccacgtttcggtctggccggtggcaaggttcaggatcgaggcttctcgcaggcctccttggccggcggtgacgcccttcagctcgacctgataacgcacgtcgatcttcgggttgttcttggcttcggcggccactgcggcatcgcaggtgaagtccggttcgcgcacgagcacggtgactttggaggcgtatttggtcaggaacacggattcctcggctgcggcgaatccgccgccgaccaccagtacttccttgccggtgaagaactcgccgtcgcaggtggcgcagtaggccacgccgcggccggcgtactcggcctcgccctcgaagcccagcttgcgcgggctggcgccggtggcgatgaggatgccgaacgtcttgaggtcgccgcgtgaggtgtgcacggttttgatgtcaccatccacgtcgagaccggtggcttcggcggagaggaattcggcaccgaagtcctgagcctgctggcgcatggtctgggtgagtgcgcggcccgtggtgcggcccacgcccggatagttgacgacttcgttagtgatggtgatctggccgccgaaatcgtccttttcgagaatcagcacgcggtagcgagcgcgggccaggtacaggccggccgtcaggccagccggcccgccaccaatgacgacgacgtcatagagattgttggtctgagtcatgaaaactcccttacatacactggctcccctctctgaggggagctgtcgtagtgagactgagggaagcatatcggatcaggctagctctcgcgagcactccccccagtcgctttcagcgacagctcccctcagagaggggagccaaggttaccgcctattcagtgtcgatcacagctggccgacaaggtcgaggctgggctcgatggtttcctcgccaggggtccagttggcggggcagacctggtcgccgtgctcgtggacgaactgggaggcctgcacgcggcgcagcagctcctcggcgttgcggcccacgttggaggagatgacctcgtaggccacgaccttgccctccgggctcacgatgaagtcgccacgctcagccacgccatcggcctcgttgtaggtgtcgaggtccttggccagcagggcggtcgggtcggcaagcatcgggtactcgatcttggcgatcttctcgttggcgtcgtgccaagccttgtgcacgaagtgggtgtcgcaggagacggagtagatctcgcagccgatttccttgaacttggcgtagttcttggccaggtcttcaagctcggtggggcacacgaaggtgaagtcggccgggtagaagaagaacagggaccagtggccgagcacatcgtccttggtcacttcgtggaactcgttgttctggaatgcgttcaccttgaaatcggtcagttcatgctgcagaagagtcatcatcggtcctttcgggaattgttaatcttcaagcgtttaccaccacctatcgtaatgtggtgagccacggctcgcgcgggtgtaacgtatgagccttatcacaccacccgcaacccttgtgctgactatcatcacggcccacccttaaacaggattgagatcgtgagcgttctcattatgctttgggcaaagccagattatgcacgcagtcgcgaatccgcacttccaatcgctactatgggtaccagcagtccgctgataatggaggtttcatggctcagtcagactttgaacaggaatcgaccgcaaatgcgacgtggagtcgcatgctgcaaggcaaccggcgctttgccgagggcaagcccgaccatccatggcaggatcaggagacccgtcaaacgttgcttgatggccagaacccggatgccgcggtgctttcctgctcggactcgcgcgtgcctccggaaatcatttttgatcagggcctgggcgacctgttcaccgtgcgcaccgccgggcaactcatcgatagcgcggttatcgcctcgctggagtacgcggtcaagaaactgcacgtcagcctgatctgtgtgctcggtcacgagcactgcggcgcaatcgaggccgccgagcaggagctggacgacctgatgcacaccatcacttccgaagccgacggctcactggaggccgcggatgcgatggacgacctcgacgagcacatcgccgccgccgaatcgattattctgcgccaggccggcatgtccgtctggcaggcgcgcgaagccgagctcgacgcgcatgaagacatcgagcgcgtacacgtggcccacaccatcgagacgctggtggaacaatcccccatcattcagcaggcattggctgccgaccagctgatgatcgtcggcgcccgttaccagctcgacaccggcaaggtcgaggtgctgagtttctgaccatcagtcagaccccgttcaccgggggtaatgcggtcgtggtacatctgtgtgcagagagatcgaagaacacggaagtctgaaccaatgccacctgcccttactattcactacggatccgccacctatacccccaatcctgcacgtgccacgaccatcgggcgtgcgccggattgcgatctggtgattcacaacccgtacgtatctcaccatcatgctcgcgtcacctttaccgacgatggttggctcttggaagacacgggtagtgcaaacggactgtccatcaacggcattcacaccacttccgtactgctgctgaacagcaccaaagtgacgctggcacaaggtgccaccatcgtctgcatcgtcggaaccagcgggccgtccacgccggcacagcccccgcgacgccctgcggcaaacgtggcccagcctgcgctaccgccggcaccatcagcgcaaccggcacaacccacgcaactcgcgccgcaacaggcacgcccagtagtgcaacccacaccaccagcaccgcaaccggcacaaccggtacaaccgcaaccaacgccagccccgctggccccgcaccgcgtatccccggccctcgcgcacctgcaacagcaaccccgcccaacagcagtggcaccgacagcagtatcgccagtgccggtatcacccgcatcaccatctccgtctccctgcgcatccccttccccatcgaatgccgccggcaccgttctggcaggcagcacgcaagcggtaaggctcgaatcccaactcaccaccaaccgcgtgcacgggtccttcagccccgagcacgacaccacaggcgtcatcggccgcgatacctcctgcctgattcgcatcaacgattatctggtctcccgcaaacactgctcgctggaaaccaccagcagcggcatcctgctcactgacctgaactccgccaacggcacttacgtcaacggccgccgcgtcgcgaagatctggctgcgggaagacgacgtcgtcaccgtcggcaacaccgacctgatcgtgcatgaaggcgtgctgtgcgaccgcacgccgtttgtcagcaacgacgcggttatcgccgaaaacatcggactgaccgtgggcaaaggcacccggctgcttgacggcatcaacgccgtattcgccaagggcacgctcaccgccgtaatcggaccttccggcgccggcaaatcaacattcacctccatcgtcgccgggctcaacagccccacggacgggcgcgtgctgtttgatggatacgacgtgcatcagaacatcgaactgttgcgcagccgtatcggattcgtgccgcaggacgacgtggtgcaccgcaagctctctgtggacgcggcgctcgaatacgccgccaagctgcgcctgcccggctcaaccaaggccgagcgcgccgaaatcatcgacaacgtgctcaatgagctggaactcacgtctcgccgtaagaatcgcattgacagactgtccggcggccaacgcaagcgcgtgtccaccgctatcgagctactcaccgaacccgaactgctgattctcgacgaaccgacctcgggcctcgacccggcgctggatcttacggtgatgaccatgttgcgccaactggcggatgccggccgcgtggttatcgtggtcacccattcactgtcgtatatcaacaagttgtgcgataacgtgctcatgctcgctcccggcggccatccggcattcttcggcaccgtgcaggagatgagccaggcgttcaacggcaaggaatgggccgacatcttcaacgatgtcgccgaatctccggaacgggtgtattcgattactgattcacgccagcgcaccatgcaggccgagtccaccatcacgcggcacaccgagcatgagaaaccggcaaagccattccgcatcaaacagaccatcactctggtgattcgtcagctgcatttgatcatcgccgaccccggattgctgatcttcctgctgttgctgccattgctcctaggactgctgtcgctggttgtgcccggttctcatggcttgggtgagcccgatttcaaagacgccgccaccgagccgaaccagctgcttgtgctcgtcatactgggtgcctgttttatgggatcggctttgtccgtgcgagacatcgtctccgagcgagcgatttacggccgcgagcgcgcggtgggtttgtcgcccacgtcatacaccgcctcgaaactcatcgtgatgggtttgcagaccttgttgcaggcggcgattctgaccactgcggtcagcctcggcaagcccggcccggaccatggtgtggtcactgattccggcatacccgaactggtgttggcgatttggctgactgcgtggacttccgcattgttgggcgaagtcggctcggcgttggtgaagtcgggagaacagacgatgccattgctggtggtgctggtcatggcccagttggtgttctccggcggcatgattccggtcaccggccgcgacagcctcgagctggtcagcatgatcttccccggacgttggggcttctccgccgccgcctcggatatcgggctcaacgatctgctgtatggccccaccaaggtgccgatgttcaaaaaggatgatctgtgggagcacaccacggatcagttctggttcaacattggcattctggggattatggtagtcgtcttcaccattgtgctgcgtatttgcgtcagcaatgccgtggccaagatgcgtcggcgctcatagaactggatcgaaactagcccgcaaccggcttacttcattcattaggtcaattatgcgttcatttggtcactgcactccaacactgaccattgaaatgccgccattccaacgcctcaccatgccgacaacccaccaaatgaacgcgcaacctaccaaatgaatgaacccagccctatatttggtgctacaacgactgcaaatactgccccaaatgcggcaccgcaaattccagctgcccatgacctgccgggcggatgagtttgtccttgaatcgtcgaaggcgagcagcgcatcggaaacaccggtcgacacgtcgtccgcggtaatgacatttgaacctcgacgttgtgtggattgccacatgtagtagccaacaagctgcaccatgtacgggtatccttcagactggcgagcggcttcaagcgcatcttccccactgatggtcttgccggaatccgcaactgtttccaggaacgcattcttgacgtctggaagcggcacgttatccaattcgcggcgtagcgcacggcgcaggaatgtggttacctcgttatccagcaaatcgttgaccatatacggcaagccggcaaatacgatgacaacgcccttcttatcctcatcaggcgtatcactttcatcggcatccgtaatgacgtgctgcacggctgtagcaatggcaaccaaatcatcatgcgaggccgcttgcgtctcatcgatggtgatgagaatgcccttccctttgccgagtttcttactgcccagccagcacaccccaatttgacgtgccactcccctagagttgaaggcatgtcacttggtttgaacatcctcctgatttttgtatttctcgttatcggttccgtgttctccggcaccgagttggcattggtctctctgcgcggctcgcagatcgagcaaatggagcaggaggacgctcgcggcgccaaagtcgccaaaatcgcacgtgacccgaacaccttcctctccaccgtgcaaatcggcgtgacgctctccggcttcctgtccgcctcgttcggtgcctcctccatcgccccctacctgattccggtggtcgaaagctggggcgtgcaccccggcatcgccggcggcctggtgaacatcatcctgaccctcatcatctcctactgctccatcgtgatctccgagatggtgcccaagcgcatcgccatgcagcgcaccgagcagatcgcgcgcgccgtggtgcccgccatcgacgccttcgccgccgtctgccgcccgatcatctggctcatcggcaagaacacgaacggcatcgtccgcctgctcggcttcgacccgcagcagaccgagtccgaggtgtccgacgacgagctgcgcgtgctggtcagctccaacaccaacctttccaaggacgaacgcacgattctggacgatgtgttcgacgcgtccgaaaccatcgtcgccgaggtgatgcgcccgcgtgccgacgtggtcttcatcgagggcgaccagcccttggccgaggccgccgcgttcgtacgcgaccagccgtactcccgttacccggtgaccggcaaggatttcgacgacgtgatcggcttcgtgcatgtgcgcgatctgctggacgtgcgcgatccgaacgccaagatcgtgcgcgatgtggtgcgcgaaggcatctccctgcccggcacctccaagctgctgccgagcctggaactgctgcgtaagcgcggcatccatctggccgtggtcatcgacgagtacggaggcacggacggcatcgtgacgcttgaggatatgaccgaggagcttgtgggcgatattcgcgatgagtacgatctgcccagcgagaagggcggcgaacgcaccacccgcaccgcgttcgtcaatggtgtggccacgatcgaggccagcatgaccattgaggacttcgccgatctgaccggcatcgaattggaggacggcccgtacgagacggtcgccggctacttcctgtccaagaccggcaagatgggtgcggtgggcgacgtgctgcattccgacgacggctacaacatggtcgtcaccaaggtggatggccgccgcatcgaaaccatcgaagtccgcaaagccggtgccccggaccatgcgccactgccagccgaatcacaaagcgacgatgccaactagccacgtgatattcaccacctattcgttcggcccggggcataaccaaaaatcgtagaattatatggacaggttccacctactgaaagaaggaacattatgacacttgcgtttgttgtgccgggccttgatgaagcggccagcgagaaggccatcgccatcctgcagaaccgactgagccaggagcaggaggccgctctggtcctcaagcacgcgcactggaacgtgaccggcccgaacttcatcgccgttcacgagatgcttgaccccgaggtcgaggccgtgctggctcaggccgacgagaccgccgagcgcatcgccactctgggcggcaccccggacggccgcgcggacgccatcgtgcgcaaccgcacgtggaagtcgttcgacgccgagggccgcgtgggcaccgaggagtatctcaaggcgctgatcgagtactatgacgccttcatcgccgacgaccgcaaggccatcgccgagctggacgagctggatgtgatcagctccaacatcatccaggaccacgtgcaggaactcgaaaagttccagtggttcatgcgctctcacctggcataagtaaaagcagtattccgtggctcccctcaaagaggggagccactttcgtctcacgtgaaatagagagtctccacatacataagttggaaaagtgtataaaactccccatttggaggttggaaaacgtagccaaaaccgcatcttatggttggaaaacgtgactggaaccgtatttctgtggttgtaaaaatgtagccgtacgttcaacaacgagtggcaggcccacatgcgggccgcacacttagtcaacaagtacatgtcggtcagatggttcggactggtcagagggcccgctctgatcagttaggtcggtctgaacggactggctgggctggtcggcctgagtagcccgtttggaccgatccggttcgcccttgctggccttcacactgcttcagctccagctgaagttcgctgatgcgccgttcgagttcgtcgatgcgccgtacttgtggcgaagtgagactgaggggagcctacaaaatgctcacaggccgagggcaccggtcacggccatggcctcgtgttcgggatcggcctggccgatgtgtacgttgacgtgaatttcgtcatcgcccggctcttcgagaatgtcggactgggattgcagcatgctcggcttcatgaagtggccttggcggtgggaaaggcgttccatcacctcgtcgaatgtgccctgcatgtagacgaacaccacgccttgacggcgcagcttgtcgcggtagatcttcttcaacgccgagcaggtgaccacggcgggctcgccggcggccacgcgctcgtcgatccacgcggcgatggtgtcgagccaaggccagcggtcttcgtcggtgagcgggtgtccggcggccatcgagatggtggcgcattcgaaccatgcgaacgaatccgatcaggccatcagccacatcgccggcactgaagcctgacctgtcatcgtcacagcaccacgcggcggttgaggtcgcggcgtagcgtcttccagccgggtaggtaggcggtcatgcggcgttggaatccggcgccgtggccgctttcccacagatgcgtcatctcatggaccaagacgtattccaggaattgcggttccatcactcccaattgaaggttcagacggatgcggccggttcgcggcgtacacgatccccagcgcgaggtcatgacccgtagcgtgatatgtgtgggctgccggccgatgaccggcccccacttggccagcagctgtggcaacgcggcgttgatcgcggccgccgcttgtcgtttgcgttcgtcggtccagatttgggagcggtcaaaatacggttggacattcgtaccggcttggcccggcccggcgtcgccgattctcggacgactgatatcaccggttttcggacgaccggcaacgcctccatcatggccgctggcaccagctacgccacgacctccgttctcgaagcctgcaccctcgttcaatgccatgatggagcgccgttgcgcctcagccatgcgctgctgctgggcgagaatccacgaatgtcgctctttgacgaaatccgcgatacgactctcgctcatccgcatcggtgcggagatttcgacgcggccgctcggcggtttgatgcgcaaatacaggtttttgatgggtttgcgcgtcaggtgcagatggatgccgtcaatgtccaacgactgcccggcggcagcggaccgaacggatttcggcgcaccggacttcggagcggtggattgacgacggcgataaggcatgcaagtcattcttacacaacggcggacaacaagcggcacacaatgccgcccctcacgaatcggcaaccggcgctgctacattcaatccgcataccaactgcccacaccggagaaggtcgcgcaggagaaggcctcgctgctcgagatcgacgacagcttccagaagatcgtcctcgtacgcgacgtggtcaaacccgtccgcgacgaacacggcatcctcacgatgagcgtctacgatttcctcctcgacccggacagcctgacgatgtgacgccggacggccggcaaatgccccggaacgcagccccccactcctcgaacaccgccttcgcggtggccgaggacaccatgacgagacagccgagcatgatggcacccagcagagggtgccgaagttcgcgatgacgtactgccacaggtccgacccgtccgtgtagccgtcgaagcgcagcgccgcgacggggacgagaaatccgtcaagcgcatgcgcggcgtcagatacaccgtcctgaagaaccccggcaagctgaccgacagacggtccgaggcgtccgggaacctgcggtacacggaccccaagggccggccctaccgttcatgacggctcagggaacccctccggacgatgcccaaacgaccggccgaccaggccgggaccgaactggaccgccgggtgttccgggcgtcccacagccgcatccccgagatcgtcgaactcgcccgaaagatccgccgtcatgggcccgacatcctcgggacaatcgaattgggctgttcaaacgccaggctcgaggcgtccgacaacaggatcaaggtcaccatccgcatggcctacggcttccaccacgcgaacaatcc

SEQ ID NO: 2314 - DNA, 14990 bp, Unknown
  R119_18m  MAG No. k141_33186
aggtcctggtaaccgccgggcgtggaggcgggcagcaccacggtcttggtgttcttcgattcggacaacgaacgcatcacgtcaagatactggttgaacagcaccacgttgttcacatcgttgatgtccatgcccacggcctgcaggctcttgatctgatcgacgatgccattggcgatttcacggcggtagttggcctggccctcgccctgcagtcgggtcttctcggcttcggcggcggcctgcgtctcgatctggatgcgctgggcttcggcacgctgacgggtggcttccttctcgcgctgggcggcgttgatggagtccatcgcgttcttcacctgcgggctcggatcgatggcggtgatcagcgtcttgaccacggtgaagccgaaacggctcatctcggcgccgacggtcttctgcacgtcgaacgccacatcgtcctttcgggcgaaggcgtcgtccaaggtcagagcggggatggcggagcgcagcgcatcctccatgtagctcctgagctgaccagccggatcgcgcagctcgtagtaggcggtggccacgtcgttcgggttcacgcggaactgggtggaggccacgacggtcacgaacacgttgtccaacgtcttggtttccagctgcacgttgagctggttgacgcgcatgttggtcttcatggcgatgcggtcgacgaacgggatacggatgtgaatgccggcgaactgaaccttcaggaacttgccgaagcgttcgatgatgtacgcctgctgctgcggaacgatgaacaatgcggcgcccagcagcacgataagaacgactaatagaattagcaccaacagcatggttccgcccaacatacttgcgatggtcatataaaactcctctcacaagggtcaagcacggcatatcgttgtgccgcgccccaacaccatccatgctaccatcgcacgcccgggaactgatagctctcacaggcaagtccaagaaagcgaacgtcagatttcatgttccgttcactccggcagccacatcttgtgcactaatgtttgaatcagccaagtcgcacgtcagaaacaacaaagtcgggcatttcaaccaaggaaacacccgacttgaatcaagcactgccgccatataaacacatcagaagtgttcgttgagcttcttctcgcagtaatcctgaagccatccaagcaacgtgcagaagagcaagtagatcaagcccacttcaatgtataggaccagcggctcgtagtaaatcgccacaatgcgctgggccgtcatgaacatttccaccacggtgatgttcgccgcgagagacgtgtccttgaccaatgcgatgaaggagttgaacaatgcagggaaggcggagcggaatgcttgcggcagaataatgcggcgcataatcgtcacatacggcatgttcgccgccaagccagcttcaagctgtcccttaggcacggcaagaatcgcaccacgcaatgtttcggcggcataggcgcccacattcagcgagaacgcgattaccgcggaaggcaatgccggaatcgtaatgccaacggacggcaatccaaagaagataacgaacaactgcaccagcaacggcgtaccacgaaacacccaaatgtagaaccacgcgatttgggaggccacaggtactttagccacacgcaccagcgccaccacaatcgccagtatcaaaccgagagcgaaggaaatcagcgtcagcggaatggtcacagtgataccgggaatcagtagcttagcaaaggaatctacgactattccccatactcgtgcgtccattggtcatcctttgttgtgtggtatatgttgcgtctgctcgtaatcttcacgaggccagctcatatttcccggctcccctaattacaggagagccgggaaacatgtcactcctgagagaagtcctcgccaaagtacttttcggagatcttggtcaatgtgccatccttctgcagcttgacaatggctttgttgacttccttgaccaagtcatcgctgcccttgcggaacggcaggtaggcggccggagtcttctcggacttggcggcaatcttgatgtccgcatccggcttctgcttcaggtagtcgagcgcagcaaggccatcgttcaatgacacatctgcacgaccggacgtgatggcatcgacctgctgaccgaaatcgttaacctgaacgatagtagcgcccttctcctgagcggtcttgttccagttggaggtaccggtttcagcggcgcgaagccccttgacgtcatcgaacgaagtgacgttcttcgggttctccttggaggtaatgacgacaccgtaggagtaggtgtatggttcggagaaatcatacttggccttgcgctcgtcggtggcggaaatctgatcggcaaccgtatcgtacttcttggcatccacaccggcaagcagggagtcgaagctgccctcggcaaactcggccttgataccgacctccttggcaatggccttggccacctcgacatcgtaaccggtcagctcattggttttggagtcatggtaactgaacggagcataggtgccctcagtggcgaacacgattttgccggcctgcttgacctgctccaatgcactggagttggaagcggaagccgaaccgcatgcggcaaccgaaaccagcacggcgacaccggacagcaaagccgcagccttgcgaatcacttgattattgaacatgacaaacccctctcttgatattgtcacaattaattacaacagccgtgaaacgcctctaccgagtcaccggaatcatcagcacattgttggttgaagacaggaactcgacggtacgctcctcctgcggatgttcgaagatccgcttcggatcaccctgctcgaccacatggcctccttcgatgaacaccacatgattcgatgcctcataggcgaaccgcatctcatgggtgaccatcagcatggtcatgccttcgctaccgagttgcttgatgacccccagcaccccgttgaccatttccggatccaatgccgaagtgggctcgtcaagcaccaacagctcaggattcatagccacggcgcgggcgatgctcacacgctgctgttgcccgccggacagtgtgctcggataccgatcatgaaaatcggcaagtcccacacgatcgagttgctcaatagcgatcttgcgggcttcatcaggcttgattcccttggaatacaccaacggttcggtcacattctgcaatgccgtcttgttcaaaaacaggttgtagttctgaaacacgaacccgattttcgaacgcaccttgtgaatgtcggcagatttggtagtggtcaaatccacaagaccatcaccgaaatcgacggtaccggaatccgcgtgctcaaggaaatccagaatgcgcaacagtgtggatttaccggagcctgaggggccgatgacagtaaccacattttgtcgaggaatgtcaagatcaagcccatccagcacggtggtgtcggcaaagctcttgctcactcccctaatccgaatcatcccgatactcccttttcgctgctgttatgcacgtcaacgctcgttcgcgaagcacaatcccttaccgtagacgcgcttgctcacctgtgtttcggcgtggttatatccagtgcctatggagtgctattcacaccaatgaataacacatcggacgccgacgtattgttcgctcacagatgcagcagatcgtcaaactcgtacaactcttgtctttacttgatattcagctcgttgagcttgttcttgatatccacagccgacggttcgacctggaaagtgccatcaggatagagcaccacgggaatgtgctgctggccgctgatggccaccgcacgatcggccgccccatcctcggtttcgatgtcatgccacgtatattcggtgctaagctcctcaagcgtgttcttcgcctgcttgcaatcaccgcaccatgttgcgccatagacgtcaatagccatgtcctgttccttctttcgtaatacaacaacccaaattcacaacgccccaagaataacagcgcaggtttttctcagaacgaacaattatccgcatacgtaagcgatacacgtcagtatgcgttggcaatggcttggtcaaggtccgcaatcaaatcatcgacgttttccaatccgatggaaagtctgatgagattatcgctgactccggcggcgatgcgcgcatccaaaggaacctcgcgatgcgtgatgcgcgcaggatcgacaatcagcgaacgcgcgtctccgatgttcggcacataggagaatacctcggttccgtcgaggatgcgtctcacgttgttctcgtcgccgtcgacgaggaacgacagtatcgtaccgatccctttggggaagtatttggcgaccagatcatactgacccgtgttgcccaaaccggaataattgaccttgagcacatgcggcgcatgcgtgagatgctcggcaatacgcgtggccgattcgacttcctgccgttcacgcacagccagtgtttccaatcccaccatcgacaggtatgtattgaacgggctgggcaccgcgccgaaagtgcgcagatatttgatgcgtacacggcgaatgaacgcctcgcgaccgaatctgctggcgaagctgcgcgctattcctttgcgttcatcgctgacgaccagttcgggagtggtgaactgtgggaatctgccgttggcccaatcgaagtttccgccgtcgataaccactccgccgatggcgttgccgtgcccggtgatgcctttcgtggtggaatgcaccacgatatcggctccgaactcgatgggccggaagaggtacggggtgggcacggtattgtcgacgataagcggaataccgttgcgatgcgcgagttccgccaatggttcaatatcggtgatttcagtggatggatttgcaacggattcggtgtagatggcgcgggtgtccggcccgattttcgaagcgacctcatcgaggtcgttgatgtcgcgcacgaaatcggcatggactccgaactgcgggaagaaggtctccatggcatcgacggaagcgccgtacaggttggtcggagagatgatgcgaccaccaccttcggcggcacacaacagcgcatacgacaccgcggccatgccggaggcgacggccaccgcgctcacgccaccttcgagttccgccaaacgacgctcgaacacatccacagtgggattcgccacacgcgagtacgagaagccctcggcttcgccggcacccagtgcgtcaccatgtgcggcgctgaccatgtcaaacgccgcactggcgtaaatcggcgggttcgccgcctcaccgtgagccgcccggtcatagccgccgtgaatagccgcggtaacgaaatccctcgccatggattatcccctcaatgtcatgccgccgtcccttaggaaacaccgacggacgcccatactgatacggcaccagtgtaggaagcgaagcaccgtaacacgtgcttgcgggtacaggcatttcttatcgttcggtatcagccggaatgataggtggggtgcgttcatcgtaactcgttgagcgctttctgcgcgatggccgtgagaaagcgtatgccgtagccgatggcggccggattcggccggaacgtcggcccatgcgcggcaccggtctcaccggcaccgatgtgcacgaacaggccgggcttgcgatcaaggtaatatgagaaatcctctcctcccagttgaggatgatcatcatccgcgtgaagcccctgctcggcgatgacttctcgtccgatgcgggtccatccggcgtcgttgaacacggaaggcgatccgaagaaccacgagacatcggcagtggcaccgtaggcggcggccgtgttgttgatgatggcgatggcgcgcttcttggcgagaacccggtcctgcggctcggtagtgcgcaccgtgccttcgaagaaggcatcctgcggaatcacattccacgaattgccggcttctatatgggtgacggacaacacccgcggatggcgagggtcgagattgcgcccaatgaccgcctgcaacccctgcaccacgttcgtcagcacggtgatcgggtcgatgccatcctccggttcggctgcatgcgcgcccttgccgtgaatggcaacctggaatttgtcgaccgcgccggtgatgccaccctcacgtatgagtatggacccaaccggtccggctgcatcgtgcgtgccgaaaaacgcctcgacatcgtccagcacacccgtgttcagcacctgcacggaacccgtggggcgctccgcggtggcacgaccttcctctgccggctggaagatgatcttgacggtaccaggtaatgaggcacgccgttcattgagcagaatcgccgcgcccaacgccacggtgaggttgaagtcatgaccgcagccgtgcatcactccggcattatccgaagcgtagtcaagtccggtattctcggtgatgggcagcccatcgatgtcaccgcgcagggcgatgacgggcttggcgcttgcgccgcgcacgatggccaccacgccggtcctgagtcccgattcgaggatttcaacgccatgcgattccagaatctcacggatgcgcgccgtggtgccgaactcttcataggagagttcaggatgacgatggaaccagcggtaccattcctgcacatcagcgttcagagcatcgggaagtgttacgaacgccgtcggggatgcgcccgatcgggttgttgctgcggtcaccggaacctcctttgcgtgacggcgatgacggacggatgcgaggacgtctcaatcccttcggcttcgctcattgtttcactcctcccaaatacgcctcctgcacccgctcgttgccgagcaggtcgccggctttgccatgcagccggatacgtccgttctgcagcacataaccatagtcggcgatcgagagagccagctcggcctgctgttcgaccatgagcacggaaacgcccaattcgtcacgcagtcgcgctatctgttcgagtacgtcttcgacgagtttgggagacaagcccatcgtcggctcgtccatgcagatgattttcgggcgactcatcagggctcgcgcgaacgccagcatctgctgctcgccgccggacatcgtgccggcctgctgcatacgacgttccttcaaacgagggaaacgatcgtacatggcttccagatcgccggccacaccctccctgtcgtgtcgcgtataggcgccagacaacagattctcctccaccgtcatctgcggaaacacgcgcctcgcctcgggcacggcggcgataccggcttggacccgtctgcgcgtggacagtccggtcacatcctcgccttggaaccacagcgaaccggtcttcggatgattgatgcccaaaatcgtcttcatcgtggtcgacttgccggaagcgttgcctcccagcagagagacgatggcccctttgggtacgcagatcgacacgttctgcaacgcgtggacctgcccgtaatacacattcactccatcgagcgcaagcagggcatccccgccatcatccaacgtcccggtttcatctcgtccggtaccggcaccggtgccctcgacttcgacgacggcgccaatggagttctgcatcgcaagcacatgcgactgcccggcgacccgggtatggttcatttcacgccgcttgccgagatacgcctcgaccacctgcggggcattgcgcacatcatccggggcgccttgcgcgatgacgcggccgccatccatcgcaagcacacggtcggacaatgcagtgaccagatcgatcttatgctcgaccaataggatggtatgtccctgcgctttcagatactgcagttgacgaagcacttcggcggtctccgactggttcatgccggcggtcggctcatcgagcagcaggatcttcggctcgctgatgtgggcacgggcgatttcggtacgacgacgattcgcgtacgacaacgtgtaggtgcaatcccgtcgacgcgcgctcagtcgttcacggaaacggtcgatctcccgatccacgcggatgttcacctcatcggcttcgcgccgagtccgcggtccgggaaccagcgccacgccggtctcggcgagcaacgacagccatcgcgcgatcggatacctttgcaggcttttgaacgggcgtgccgcgacgagtcgccggtgatatccgagattgatgttttcttcgacggtaagaccgccgaacacacgaccgttctggaaggtgcgcagcagtccccgttcagacatgtccgcagggctcagaccggcaaccggctcgtcggcaagatcgatgagcccggaatcaggctgcagaaaaccggagatcaggttgattgtggtcgattttcccgaaccgttcgggccgatgatggaaatgacctcaccttgatgcaggtcgaaagagaccttgttgacggcgtgcagcccctcgaaggacttgtcgagctcgcgcacgcgcagcatcaccggcgcgtcaaggacggcctggcggtgtctttcggaatattcagccagatcatccgcgttatcgaggcgttcgttgtcgatatcgatgccggtcacggcgtctacggtggaaaatacggtctcggaatcggtcatggcgactcagcctttccgggcgaacaggccctggggacggaacaagatgacaagcaccagcagcacgccatacagcaggatgcgcgcgtcggaggcgaaacgcagcaactcgggcgctccgatcagcactatggagccaagcaccgcgccgagcggagagttcataccaccaagcacgatgatggtcaggatgagaatcgacatgttcgagttgaagatcgtcggatcaatgtacgtgtactggtgcgcgagcaacgaaccggcgagacctgcgaaaaacgcggcaagcgcatacgcgagcgccttataggcaccagtgcggatggacagcgcctccgaagcctcgcgatccgatcccacggcctcgaacacgcgccccagatgagcggttcggatacgcatgacgatgaccaacgtgacaagcagcacgatcacgtcaagcagatacatcatctgctgcgtgtacagcgtgacgccgaacaccttcgggaacggaatgccctgaatgccaagagaccccttggtcaacggctcggcgaggcgaatgatcgccaccatcaccgcacctacgccgatggtggcgatggcgacataatggccggaaaacctccatacggggaaggtgagcaccgaggcggcaagcgccgcgatcacacctgcggcgggcaacgccaccaggaagggccaatgcgcctgcgtggccagaatcgcggaggcataggcacccacggcgaacggtcctgccatgcccagaatcgtttggcctgcggagccggaaatcaacgtcagtcccacggcggcgatggcatagatggcgacctgagtgcccacgccggacaggtagtcattgaagaagaacggggtggatacgagtgccacggcaccgatgagattaccccaccaaggcagcgcgatcgccctgccgcctcccaggaacgtgccggtaagcggctcggatttgacatcggtcttcggcccaagcagaccctgcggcttcacgatgaggatgatgatcaacgcgccgaaggtgatgaggtcatgtgcaccgtctccgaacagagagatgccgaacgcttccaccacaccgagcacaagaccgccgaccacagctcccgggatggagcctagaccgccgatcgtggccgccacgaacgccgtcataccaatggtgccgccgttcatcggattgatgttgccgttgaacaagcccacgaagatgccggaaacgccggcgagtacggcaccgatcacaaaggagaggttacggatggccttcaccgggatgcccatctgcatggcggcttcgggatcctgggaagtggcgcgaatggcctgtcccgctttgccgaacttgaggaatgcccataagccaagcatcgagaggacggcaagcgtcaccatcacgatgtccgaagtgccgaaacgcacgccggcgacttgcaggttataggtctgcagcagtttcgggaatggtcgggtctgtggcccgaagacgacctgcagaccattgtcgagcacctggccgacgccaatggtggcgagcagcgccgcaatcggtttacggccttcaagcggagcgatgatcgccacgttcatgatcagccccagcagtgcggtaaccacgagcaccgccacgaatgtgggcacgattccccatccccatgacgaaccgagccaccaggcgatcatcatgcccacggccacgatggaaccttgggcgaagttggccacgttggtgacgccgaagatcagcgacatgccgactgcgaccagcgcataggcgctgccgtgtatcagtccggcgaaaagaacatcaaacattgtgtgcgttacctcgttcgtggtgtatgggaaagcccggggaatcaaccttcgtattgttcgaacttgccgtctttgacgatgagcagaatcggatcgatgttatcggcgcgacgactctgccgattgaatttgaacgtgccgccattgccctggtagagcgggaaatccgtcacggtctgcagcgccttctgtatgccttcacgggtcggttcggtcttgttggcggcataggccagatcgatgatcgcctcgtaggcggtcacttcgaaattgcccgggttgttgccgtacttggccttgaagtccttgacgaactgctgggccttggcgtccttggtgccggtggcggagaaggatccggtgatgatcgaaccctcggcgtttttgccggcgagatcgaggaactccttggtttcctgaccaccgaagtacaggccgtcgtaccccagcttgtcgcgcagggtattgatcaccagagcgccgtccggcccgtagccgatgtcgaccaccgcgtcaggcttggcatcgcgcgccggaatcagaatcggcgacaagtcggtggagtcgggcagatagctggactcgtacacaatctgggtaccgtttttctcggcctcctgcttgaagtaccgataggcctgtttgccccagtcgttctcgatgtagaccaccgcgatcttcttggcttttttggccactatatccgcgttggtcttctgatacttgtcctgaccgatttggggagtccatacgtggtccccggtatcggtaaaggtgggtgccgaattattgaaaccgtaatgcacgaggccggcctgctggaaggtgggcgacgcggccgaggatgcgggcgaggcatagtcacccaccacggcgatgatcgacttgtccgacacgatcttgggagccaccgcggcgtcttgcttggcatcggactgcgtgtcatagtatcgaagaccaagcttcttacccttgacgccgccatcctcgttcaccttggcaaccgccagatcaaagccttgctggaacagtttgccgtattgcgcatattgcccggtcttcggatagatgactccgatgttcacggtgtcgtcgctggaaccgctggcggcatccccgccaaggccgcatgcggagacgccaatcagtgttcccgcagtgaccacggatgcgatcgccgtacggatgattgtcttgatggtcatgatgttcccttctctattcaaataatcatgaagcgtaaatggggaccggctcagcccacgcggatgtcgctcaatgcctgcagcgcctcgtcgcccgccggggtcggaaccgtgcagcttggtgccagcaaaaacggtttgcccgcacgaaacgcgatggttttggccaattcgcggcgcacctgttcgacgtcaccgtccggcgcgaacaggtcgtacggggcaccggcgaccggcacagccgtcaggtcggcatccacctgcgggtttcccggttgatactgatcccactgcagcaggtccacacccttcacgtcgaaccaattcgggtgggattcagcacgacaggtgtgcagcagcaccacggcgtccgggttggcgcgatgcaccgcgtcaatcacgatgcgatcgtatggttcggagaattcaagatagcgttgcgcgtcgaaataaccctcgctcaccgtgccggtgagcgcgtagaacacgccgtcgagtcccgctccgccttcggattcgggacgaaccaacgcacgcgcataggaggcgagtgtgcgggcgatgttggcgagcgccagcttggcgacatcaggctgattgaagatcagatcttcgacgcggagcgtcgcggtggcgtaatcgtcacccgggtacagcggcagatcggcaacttgcagcaggacggacaatggcgaaaagacggtctgcagcacggcacgatcctcaaggccatgccggataagggcggcggcggccagagcctcggcgaaatactcattgtcacgaacgtcgagttccttgattccacgcacatcatccggttcggtgattgcggcgccgatcttcttcggcagcacgaatccggcataatcgttgcgatcgtaccgagagccccaagcctcggcatagtatatggcgcgcggattgatcttcacccattcccaatcccagcgattgacgaaatcgatggtggccttggcgaattcctcggcaccgtattcatgaccgacaagatgctgccaggcgctaaccagatacggcgtccgggactgatgattgacgatggcgtggaagtcggcgcgacgattgaccatattggggtcccttctcctgattcgcaacgttatccgtcatcgaagcgcatcggcgatgccgatgtcaagcggaatgccgcccacgtattacaggcatttcttatagcgccttatccatccgcgaaatcattgcatccttgaagcgcctatcaagaacacctatatgccatttcggaagaaacgacgacggttcgggaatccatgcggtattacgggaactgacatacatccgtatccatcatcagaagaggtgaaccgatgggagcaaacctgtatttcatcggcggaggcaatatgccgagcgccatcatagaagcggtgcgacgtaaggccgccgcatatccggtcgaccacatctgggttgaggaaatctcacgggaacgcgccgaatatctggcatccacgtacaacaccgagacggcgtcaccgacggacgccccggatgccgacatcgtggtaatcgcggtgcgcccgcaagacgatgtcgccggcgtagccgcttcagtggcgcgacgtttcgacccggcgaagaccacggtgatctccatcgtagccggctataccatcgccaagcttgagcaagggctcggccatgggtggcgtgtggcccgcatcatcccgaacacactcaccaccgtggattacggttacagcggcgtggcgctgaatggggccgcggcacgcgaggacgtggatgcgttcctcaacactttcggcaaagtgctgtatgtcgaggaacgacttatcgacgtaatcaccggtttttacccgccgaacatcgtctaccatttcatcgacgcctacgtggatgccggtgtgcttgccggtctgccccgggacgcggccagagccatcgcgctcgacaccatcatcggcggcaccgaattcctcaaacagaaagacgtgctgcctcaagtgctgctcaatatcaacaactcccccggcggagtgggaatcaccgaggcatataccctgaacaaaaccggattcgcggcatccatacaatccgcggtgctggcggcggtcgagcgcaccacggcgctcggcggcgatgcaaagtaaagacgggagccgatcatgacgcaacaattcacctgggaccatacggtcgaattcgtgaatgacctcaagtccgccgaacggacgttcgccgacgcagggctgacttcccaatacggcggcaagcacgtggggcatggcacggagaactccctggcctacttcgccgataactatttggagttcctggcattgtacgaccgcgaggaagccttgtcggagacgccggaccatgggctgatattccatgaagccggggagctactgcccgagtatgtgggattctatcgtccggcattgcacgtgcatggcatcgaacaggcggccgaacggctcacggccaaaggccttgatcttggccatatcgttccgggcaatcgcacgacggccgccggtgaggagatacgctggcggttgctatggatcaagggcgatgatcagggcctgcgctatccgttcgtcatcgactggggtgcgagcgaatccgagcaactggcccgctacgagagcggcggactgctgcaccggcatgccatcggcgaagtggacacccgtcgcgcgattttcgcggtgcccgaccccgcggcggtggccgcgcactggtccgacgtgtttggtttgggtctcacggaaggcggggacgccgaccggcccgatgagcactatttcgatctcgatgtgggagggcatcgtgtctggcgcttcgtccagggtcaatgcaacgccatcaccgaattgcagtacgacgcccccgccggcaaatccttcgatgtgaccatcggccaggcgcgattcagaagcctgtaagtacggtccacacacaaccgcaacaacgcatgaggcgtgtgccaccaatccaacggtggcacacgcctcatgccgtaagagagccctgccaatcagtcagtcagcagattcaactcccgcagcttgttcctgatgtccttggcggagggctccacctggaaggagccatcatcgtacagcaccaccggaatatgctgctggccgctgatggccacggcacgatcggcggcaccgtcctcctcttcgatgttatgccagatatacgccgcacccagctcatccaacgtgttcttcgcctgacggcaatcaccacaccatgtggcgccgtacacatcaatggccatgccatgtcctttc

SEQ ID NO: 2315 - DNA, 17390 bp, Unknown
  R119_18m  MAG No. k141_33960
tcagtcagcccggccgttgctcgacgatgtcctatgccatgcgcattccgcgcgcgatcgccaccgacgaatccgtcaatggctggctgcagatgatcgccggactggtcacgctggacgccctgaacggcatgatcgaggaatacggtgccgcgccgaaccagccggactgcttgctggaactcaaatggccgaacgacgtgttctgccacgggctcaagctgggcgggctgctctcggaactggtgattccgccgtcgtccggtactgatgccgatgccgatgacgacgtcgtcatcgtgttcggcgtaggcctgaatctggcgctgggtgcctgttggctgcccacgccgcagtcgacttcgctgcagctgcatgtcacgggcttgccgttgtttggcgagatgcgcgatgcggtggccgaacgtcaggtcgagggcttccgtgaacgactggcgaagttcatcgccgacccgaagggccaggccgagtcgttgcgcgaggaaatgaaggcggtgtgctgggcgctcggccgtcaggtcgaggcgcatttcacggacggcaccacgctgaccggcgaagccatcggcctcaacgaagacgcctcactgatcctgagaacacaagacggcacggaccatacggtccgcaccgccgatgtgggagtgctgtaatagccggccagtagctagctagtagctcaggtcagcgaccgagcttggacaggccggcggcggccagagaggccaccacggccttgatggcgtcgccgacgacgaagcccatggaggccagggccacggcggcgagcggcgcaccggtcaacgcggactggatgatgaagccgaaggcgtacaccaccacgacgccgccgaccagcgcggccagcaggtagcggcccgcggtgcgcgcggcggccgcgaaggacgaagtgtcggacttgccgcgcagcagggcgatgaccaccacacccggcaggaagccgaagaggaagccggcgctcgggccgaccagggccagcgtggaggtgccgccggcgaacaccggcaggccgaccgcaccggccgccagataggtggcgacggcggcaccggcctgacgccacggcagcatgagaccggcgagcatcaccacgaacgtctgcagcgtgatcggcaccggcgtgcccggaatcggaatctcgccggcggccgcggacagccacatcagcacggcgaacagcaccggcttccaggatgcggcgacgatacgacgggcgagcggcgtggtggccgctgcggatgcggtggtgtgtgaagtctgcatatcaataacccctatgttgtgtgatatcgccgtgaacggcgggcggtatgcgatggatgaggggaggttccggcgggccgtgcggtatccccgacagcccgaaccgtccatatggtggacggtcccaaatgaatccggccctgtgcgggcgaatcgtgcggcgatggaccgatgccggtccggtcgccttccgttcgcccgcagatgagccttcccccgaacttacggttgccatcgtagaggtgttcgatttcgtgcggtttcgtaccaacttacaaaattgtcgatttcgatttgtcataagttgacgaacgcaaccgtaacgtcaacttcttgaaccggcgcgcaaggatgtgcaatcggcggatttgcaacgtttttgatagccggcgccaacggttacgttgccggaacctacgcgcgcgtttgttcgtagcctacaaaagggcgtgaaagcttttgtgcgaacgcggcttgccctctcctctatatggagagcacaatttgacactatggctcatactgtcaaaaaactgctgattgcgaaccgaggtgagatcgctctgcgcgtggtgcgcacggccaaggagatgggtatctccaccgtggccgtctactccgaacaagatcgcaatagccgctatgtggacatggccgacgaggcatacctgctctccggcgacacctacaaggacacgtacctcaacgaggatctgctgatcgacatcctgcacaaaaccggtgcggacgccgtgcaccccggctacggattcctttccgaagtgccgagcttcgcgcagaaggtcgaggatgccggtgccatctgggtgggtccgcaccacaccgcgctggtggatttgggcgacaagatcaccgcccgccgagtggccttgcgcgccaaagtgccgccggtgcctggcctgtccgaaccggtgaccgacgtgcgaacgctgctcgacttcgcacacacccacggctacccgatcatgatgaagcgcactgatggcggtggcggccacggcatcaccgtggtgcatgacgacgaggagctgcgccgcttctacatgaaccacgacgcgctgcaaggcggcgatctgaaggaatacttcatcgagaagttcgtggacaaggcacgccacgtcgagacccagtccgggcgcgactcgcacggcaacttcaccgtgtactccacccgtgactgctcgctgcagcgccgcaaccagaaactcgtggaagaggcgcccgcgcccttcctgtccgaggaaatcgtcagcacgctggaggaatactcccgccgcctgttcgccacggtcggctacgtgggcctgggcacctgcgaattcatggtgaccccgaacggcaaagtgtacttcctggaagtcaacccgcgtctgcaggtggagcacaccgtctccgaagaggtcagcggcctcgacctggtgcgcgaacagctcaatatcgccgccggtggcgagctcacccgcgcccccaaaccgcgcggccacagcttcgaactgcgcatcaccagcgaagacccggccaccaacctgacccccggctccggcaccttggagaagatccagtggccggccggccccggcgtgcgcatcgataccggtgtggaacagggcgacaccatctccccgaagttcgattcgatgatgggcaaggtcatcgtcactgcccagaaccgtctcgatgccgtggcccgtgtgcgccgcgtgctcgacgagctcgtgatcgaaggcgtgcccacgccgattccgctgttcaaggagatcttccgcaacgacgacttcaccgccgagcatggccatccgttcgccgtgtccaccaagtggctggagcgcacgtacctgaaccgcacaccggcttccgccgcctccggccagccggcctccttggccaccgccccgggtgccgctgccccggccgcgcccgacaagtccaagtcggagacgttcgtcatcgagatgaacaaccgccgcgtcaagctcaccgtgccactcgacatcgtggagaacatcaccggctcggcccgcgcccgcggtgccaagcgccccacccaaccgttgcgcggcgcaggcttgcacaacgtggcctccggtgccgccacggccaacgacggtgccaaatccggcgtcatcgcctccccgatgcaggccgtggtcacgcgcatcaacgtgtccgaaggccagcaagtggccaagggcgaccttctggtggtgctcgaatccatgaagatggagaactacgtgtacgcgccggccgccggcgaagtgaagaagattttcgttggcccggccgatggcgtggaggccggcgacacgctggtcacgctggacgtgaacgccggcaaggccaaggccgccgacgccaagaaggagggcggcaatgactgacatcatggattcgccggccgtgaaggccgcggctgcggcctcggccgccaacaccgcccagccctcggcccaccagccgctgcgcaccgccgtggtcaaggccgccgaactggcccgcgccgccgaagagcgcgcccgcgacaagcagcacgctaaaggcaagaaaaccgcgcgcgaacgcctcgacctgctcttcgacaccggcacgttcgaggagatcggccgcttccagggcggcaacatcgccggcggcaacgccggtgcagctgtcatcaccggcttcggccaggtctacggccgcaaagtggccgtctacgcccaggacttctccgtcaagggcggcaccctcggcaccgccgaaggcgagaagatctgccgactgatggacatggccatcgacctcaaagtgccgatcgtggccatcgtggactccggcggcgcccgcatacaggagggcgtggccgctctggcccagtacggccgcatcttccgcaagacttgcgaggccagcggcttcgtgccccagctgagcctgattctcggcccctgcgccggcggtgccgtctactgcccggctctgacggacctcatcatcatgacccgtgagaactcgaacatgttcgtcaccgggccggacgtggtcaaggcctcgaccggcgagaccatctccatggccgaccttggcggcggcgaagtgcataaccgggtgtccggcgtggcccactacctcggcgaggacgaatccgacgccatcgactatgcgcgcaccgtgctcgcctacctgccgtccaacagcgaaagcaagccgccggtctacgcctacgccgtcacccgcgccgaacgcgagacagccaagcgactcgccaccatcgtgcccgccaacgaacgtcagccctacgacatgctcgaagtgattcgttgcatcgtcgattacggcgaattcgtgcaggtgcaggaactgttcggcgcctccgcgctcgtcggcttcgcctgcatcgacggcaagccggtcggcatcgtggcgaaccagccgaacgtgctcgccggcattctggacgtcgactcgtccgagaaggtcgcccgattcgtacgcctgtgcgacgcgttcaacctgcccgtggtcaccctcgtggatgtgcccggctacaagcccggctccgaccaggaacacgccggcatcatccgccgcggcgccaaggtgatctacgcctacgccaacgcgcaagtgccgatggtgaccgtggtgttgcgcaaggcgttcggcggcgcgtacatcgtgatgggctccaaagccatcggcgcggacctgaacttcgcgtggccctcctcccagatcgcggtgctcggcgcggccggcgcggtgaacatcatccaccgccacgacctggccaaggccaaagcctccgggcaggacgtcgatgcgctgcgggccaagtacatcaaggagtacgagaccagcaccgtcaacgcgaacctgtcgctggaaatcgggcagatcgacggcatgatcgaccccgaacagacccgtgaggtgatcgtcgaatcgctggccacgctcgccaccaagcggcgcgtcaagcgcaccaccaaacaccacggcaaccagcccctctgatttctgaagacatcaaccaaacacaagtaaggaaagcaatgaccaccttcttcctcaatcgcctggccaccgagccccatgcgctcgccttcgccggccagtccaccccgtggccggtagccctggcagaccagaccaccgatcccagccttgacgaggccctgcgcggccacatcgccgcagccaaccgactgctcaccccggtcgccgccgacctgctgaccaccaccggccgtccggtcgacctgttcggcttcgctccgaacccggcccgcctcggcgccgcagccgacgccaccgcgtccgtggaaggcgtggcactgacccagctcggcgccctgctcgacctcgaacacctcggctacagcgtggcccaggccaagccgctcgccgtgctcggccactcccagggcgtgctcgccgtgcacatggcccgcgccatcgaggccgccggctccatcgaggccgccggcaagaccctcgacgagattctggccgtcgccgccctgatcggtgcagccggcactcgccgcgtgcgcgaactgggcctgaaccccaagtatggcgaagccagtccgatgctctccgtcaagggcgccacccgcgaacaggttgaggctctggtcaagcgcgtgaacaacgcccgaggcccgatctccatcgccgtcaccaactccgacaaccaccacgtgctttccggctacccggaagacctggcagccttcgccctcgaagccgagcgcgagcacaagcaccaggccaagctgcgcgagcagaagctccacggcggcaccgtgttcaacccgaccctcgaataccttgaagtcaccctgcccttccactctccgctcatggccgacgctgttgagcggaccgtgtcttgggccggcgcctgcggctttgaccaggatcgcacccgcgcactcgctgcggaagtgcttctgaaccatgtggactggaacgcccgcgtcaaggcgctgttcgacgccgccgacccggccaagctgtggattgtggacctcggccccggcaacacgctcggcaagctgatcggcaacgtggtgcagggcaccggcatcggcgtggtcgaagccaccacgctgtccgaacgctccacgctctccacgctggaaagcgagcctgagcgcacccagaactggaaggcgttcgccccgcgcgtcatcaacaccccggccggcgccaagctggtcaccaagttctccaagctcaccggcaagccgccggtactgctgcccggcatgacccccaccaccgtggaaccggaaatcgtggccgccgcggccaacgccggctactgggccgagctcgccggcggcggccaggtgaccgccgaagtgttcgaccgccacatcgccgccctcgaagacgagctggaggaaggccgcacggtcgaattcaacgcgatgttcatggaccgttacctgtggaacctgcagttcggctcctcccgcatcgtgcccaagaagcgcgcatccggcgcgccgatcgacggcgtggtcgtctccgccggcatccccgagctggacgaagccgtggccctgatcgagtcgctgcaggcggacggtctgccgtacgtgagcttcaagcccggcaccgtggaccagattcgccaggtcgtgcgcatcgccaaggccgtgtcccccaccaccatcatggttcaggtcgagggcggtgaagccggcggccaccacagctgggaagcgctggacgacctgcttgccgccacctacgccgaagtgcgcgcctgcgacaacctcgtgctggtcgccggcggcggcatcggcacccccgaacgcgcggccgactacatttccggccagtgggcccacgcctacggcctgcccgacatgccggtcgacggcgtgcttatcggtaccgccgcgatgaccgccaaggaggctcacaccagccccgaagtcaagcagctgctcgtcaagacgcccggtattccggccgacgccaagtccgacgacgtgttcgccccgcaggccgcccactgggtgccgtccggcaagtccgtcggtggcatgtcctccggcctgagccacctgcacgccgacatttacgagctcgagaacgactccgccgaatgcggccgtctgctcgtgcgcgtcatgaagcaccccgaagagctcgactcccgccgcaaggaaatcatcgaagccctgaacaagaccgccaagccttacttcggcgacctggcctccatgacctaccttgagtgggcgcagcgcttcgccgaactcgccttcccgtgggtcgacccgacttacgccgaccgcttccagcacctgctgcagcgcatcgaagcccgtgtgaacgacacggactccggcgaattcacctccaagttgttcgccgctgatggcgtttctgctgaagaggcagctgccgctggcctgctgacccacgacgacattctcgccgacccggcccccgcgctcgaaaagctcgcactggcctacccgcagaccgccgaactcaaggtggtcccgaccgacgtggcttggttcccggtgctcgtgcgcgaataccccaagcccatgccgttcgtacccgtcatcgacaacgacctgctgcgttggtggggtcaggaccagctctggcagtccgaagaccagcgctactccgccgattccgtgcgtgccatccccggcccgatctccgttgccggcatcaccaccatcgacgagccgatcgccgacatcctcggccgcttcgaaaccgccgccatcaagcgcgtgcaggacgaacagcaagccgccgatgccgctgagaacgacgatttcgccgcacttggcgaggccaccagcgccgaagacttcatccgcaagtccccgaacatctcctgggtcggccacatcaccgacaacccggcctacggcaccgccctgggcgaccagtactacgaaatccgcgcgtttgacgccgcggccggcaagtacgatctggacatccacctcgacacctactgggacaacgacccggacggcggcacctccaagcacgccgtgcgcgatatcgtcatcccgctcatcgtggaaggcaccgagcccggccgtgtgccggtcgtggaccgcgaacgcctgattccggacgtctacgcgatgctcgccgccaccgcaggcatcggcaacaccgccatcaccggcgacaagctcaccgagatgccgaagcttgacgacaagacctctgacgagcgtccgttcggtaccgcaaccgcaacctacaccctatccgccaacctcggcttcgaccacgaagcggccactggcgccgctctgccgaccaccctgcagcccagccgcatcgcccccgatgcgctggtcggccctgcctggccggcaatctacacggcgctcggctccgtgtacgtcaagggctacccggtgattgaaggcctgctcaacgccgtccacctcgaccacctcatcgaacttgaggtgaacgaggaggacctgctcaagcacaccggcgaaaccatcaccctgaagtcttgggccgaggattacttcgagtccgcctccggccgcgtggtcaccatccacgtgacccacaccgccgccgacggcacgccgcttgcccgcgaaaccgagcgtttcgcgatccgcggccgcgtctactccgatgctttgcctgcagacgcccccgagtatggtggtgccctcctgaataaggaagcggatggctccgtcgccggacagtccactggactgtccgcctcctcgcgcggcctgcaagtagtgcagaccactccgcgccgtctgctgcgccgcgtgaaggtcgtcgccccacacgacatgaccgccttcgcccgcacttccggcgacttcaacccgatccacacctccactcgtggcgctcgcatctccggcctggccgccccgctcgtgcacggcatgtggctgtccgccaccgcccagcacgccgtgcaggcgaccgacgagaagggtgcccactacgagattgccggctggacctacaacatgtacggcatggtccagcttgacgacaccgtcgaaatctccgtcgagcgcgtcggcaaagtgcgccacggcggcatgaccctcgaagtcacctgccgtatcgacggccagctcgtctcccgcggcaccgcactggtccgtgcgccgcgcgccgccttcgtctaccccggccagggcatccagaagcagggcatggttctggacgagcgcgccaagtccgccgccgcccgcgacgtgtgggagcgcgccgacaagctcacccgctccaagctcggcttctcgatcctgggcctcgtgcgtgacaacccgaaggaactcaccgccaacggcgtgacctaccgtcaccccgaaggcctgctcaacctgacgcagttcacgcaggtggcgctcgcgacggttgcttttgcccagaccgcccgtctgcgcgaagccggcgccgacatctggcccgcctacttcgccggccactcgctcggcgaatacaacgcgttgtccgcgttcgccgacgtgattccgctggaaaccgtgctggagctcgtgttccaccgtggttccaccatgcaccacctcatcgagcgtgacgcacagggtcgctccaactaccgcatgggtgcccttcgtccgaaccagttcggtgtggacgacgcgcacgtcaaggaatatgtggaatccgtggccaaggcgtccggcgaattcctggagattgtgaactacaacctcgccggccagcagtacgccatcgccggtacgatcgccggactcaaggccctgaaggccgattccgcccgccgcgtggccgcattcggtggcaagcccgcgttcatgctggtgcccggcatcgatgtgccgttccactccacgctactgcgcaagggcgtgccggaattccgcgacaagctcgacgcgctgcttcctgcttacatcgactaccgtggccgtctggtggaccgctacatcccgaacctggtggccaccccgttcgagatgaccaaggaattcgccgccaagatcctcgaagccgtgccgtccgaacgcatcaaggccgtgctcgacgacccggccgtgtgggattcctacgccgccgacgaccagaagctcggccgtctgctcttgaccgaactgctctcctggcagttcgcctccccggtgcgttggattgaaacccaggcgctgctcttcggtcagcgcgaacagggcggcctcggcgtggaagaatacgtcgaagtcggcctcggcaacgccccgaccctggccaacctcggtaccaagaccctacgtctgcccgagttcgccggcaacgatacggtcgtctacaacgtcggccgcgatgaaggccgtgtctacatgaccgacaccgattcgctggttcccgacgacgagccggaagaggctgcggcctcggccccggtcgaaaccgctcctgccggtggttccgccgtcgccaagctcggatcgggtgctgctccggcaaatgccgtgactgaggctgctcagacaacggatggctccgtcgccggacagtccactggactgtccgactcctcgcgcggcctgcaatcagggcaggccgctgctggcgcaccgtctggttccgccgtcgccgacctgcccttcaaggcttccgatgccatcggcgtactcatggcctactccgccaaggtgcgcctcgaccagatcggcagcaacgacaccaccgacaccctgaccaacggtgtctcttctcgccgcaaccagctgctcatggacatcagctccgagctgggagtcgccagcgtggacggtgctgctgaagcgacgctcgacaagctcgcccaaatcgtcaacaaggccgccccgaactacaagccgttcggtgccgtgctctccgaggcgctgcgcgaccgcctgcgctcgctgttcggtgccgccggcgtcaaacagcagcacatccgcgaccgcgtgaccaacgtatggcagctcggcgaaggctgggtggccagcgtgctcgccgcactgctgctcgacacccgcgagggtgccagctcccgtggcggcgacctggccaagctgcccaccgccgccgtgcagaacaagccggaagccgacaagctgatcgatgcggccgttgaggtcgtcgcccaactcaagggtgttgccgtggccctgccgtccgccggtggtgccgctggtggcgctgtggtcgattccgccgcgctcgacgccttcgccgagaaggtcaccggttccaacggcgtgctcgccgccaccgcccgcttcgtgctgaacgagctcggcgtggccgctccggctccggaagaatccgaggacgagaacgccgccgtcgtggccgcggtcgaagccgaacttggctccgactggcccaagcaggtcgctccgcgcttcgacgccaacaaggccatcctcttcgatgaccggtgggcctccgcccgtgaagacctcgcccgcgcctactacggcaacgaccccgccgccttgaacggcagcttcatcggcctcggcaagaccatcgccgccgaagcccagtggttcgccaacgagtcggagagcgaggagcttaaggccgccttccagaaggccggctccgaggccctcgaacaggtcgcttccaacaagaacgcctcccgttacgcgaatgatatcgccatcgtcaccggcgtgagcccgaactcgattgccgctcaggtggtcgaaggcctgctcgcaggcggtgccactgtggtggccacctcgcacagcttcaagccgtccatcaaggcttgggccaagcaggcctaccgcgagcacgccaccggcaacgccaagctgtggctggttccggccaacctctccagctaccgcgacgtcgacgctctggtcgactgggtgggccacgagcagaagaagacctccggtgccaccaccacgattctgaagcccgcgtgggagccgaccctgttcttcccgttcgccgctccgccggtccatggcacgctcgccgactccggcgacctgttcgaatcacaggcgcgactgatgctgtggggcgtggaacgcgccatcgccggcttcagccacatcggtgccgacaccaacgtgcagcacaagctccacgtggtgctgcccggctccccgaaccgcggcgtattcggcggcgacggtgcctacggcgaagtcaagagcgcctttgacgccatcgtcaaccgcgcccgcgccgaaaaggtgtggtcgagccgcgtcaccttcgctcacccgaagatcggctgggtgcgtggcaccggcctgatgggcggtaacgacccgctggtcgccgtcgttgagcgtcacggcatccacacctactccaccgcacagattgcggccaagctgctcgacctgtgcactgccgaatcgcgcgagcaagccctcaaggccccgctcgatgtggacctgaccggtggcctcggctccgagcccatcgacatcaaggccctgcgtgccgaagccatggccgacgtcgagaaggaagctgctgcggcctcgtctcaggaaacggatggctccgtcgccggacagtccactggactgtccgactcctcgcgtgggcagcaaatcaaggcgctgcccaccccgatcgtcaccaagcaggcttcggtcgacctcaacgactggaccaacgtcaccgccaagccggaagacgaaatcgtcatcgtttccgtcggtgagctgggcccgtggggctccggtcgtacgcgcacccaggccgagctcggcatccactcggacggcactgtcgacctgagcgccggcgcagtgctcgaacttgcgtggaacatgggtctgctgacttgggccgacagcccgaagcccggctggtacgacaccgacggcaacctcgtgcccgaagaggacatcgccgagcgctaccacgacgaggtcgtggcccgctccggcatccgcccgttcgaggaaggcatgggcaacgactacaaggacggtgctgacgaagaagaagccgaggtcttcctcgaccacgacgtcaccttctctgtgcccacccgcgaagtcgccgccgaatacgtcaagttggacgaggctcacaccaccatcgccccggatgaggaatccggcgaatggaacgtgacccgccacgccggctcgatgatccgcgtgccgcgccgcgccaccatgacccgcacagtcggcggccagttcccgaagggcttcgacccgacccgatggggcattcccgcctcgatggtcggcgacgtcgacaagatcgccctgtggaacatcgtcaccactgtggacgcctacctgggcgccggcttcaccccggccgaaatcctcgagtccatccacccctcgctggtggcttcgacccagggcaccggctttggcggcatgatgtcgatgcgcaagctgtacctcgaccgcttcctcaaccacgagatcccgaccgacatcctgcaggaggccctgccgaatgtggtcgcggctcacgtgatgcagtcctacatcggcggttacggcaacatgatccagcccgtctccgcctgcgccaccgcggccgtctcccttgaagagggcgtcgacaagatcgccctcggcaaggccgacttcgtggtcaccggtgcgatcgacgacatcggcgtggaatccgtgatcggcttcggcaacatgaacgccaccgccaactcggaggaaatgtacggcaagggcatcgacgcgcgcttcttcagccgcgcgaacgatcgtcgccgtggcggcttcctggaatcccagggcggcggcacgatccttgtgacccgcggtgacatcgccgaaaagctcggcctgccggtcgcggccgtggtcggcttcatccactcctacgcggatggtgcccacacctcgatcccggctccgggcctcggtgccctggctgccggcctcggtggcaaggactccaagctcgtgcacgacctggctaagctcggcgtctcagccgacgacatcgccgtggtctccaagcacgacacgtccaccaacgccaacgacccgaacgaatccgagctgcacaacacgctggcccacgccatcggccgtaccgacggcaacccgctgttcgtgatctcgcagaagacgcttaccggccacgccaagggtggtgcctgcatcttccaggtcaacggtctgacgcagctgttcaagtccggcgtgattccggcgaacgcggcgctcgactgcgtggatccgaagctccagcgcgacgatcacatggtctgggttaggaagcccctgcgcatcggcggtggcgaggacgagttcggtcgcgagaccgctggtcgcccggtcaaggccggtctggccacctcgctcggcttcggacatgtttccggcttcgtggccctggttcatccgggtgccttcgaagcggccgtggccaaggccgatggcgaggccgcgctggaagcctggcgtgagcgtgccaacgcccgcctggccgccggccagcgtcacctcgaggaaggcatgatgggtcgcgccgcgctctacgagccgatcgacaaccgtcgcttccgcgaggatcaccgtggctacgaccaccacgaggtcgaaaaggcgatgctcctcaacccggacgcccgcctcggtgccgacggctactacgaggcctgattcctctggctcccctcggttgaggggagccagtagcgcaccggatctcggctcccctctttgaggggagctcccgcgaagcggatgaggggagtttcccctggagctttctcgctggcacaaactcagtgagagaaatatgcagaacatacgaaagcccctccctcggagtgggctttctgcgtttcaaggggctgatttggcattcgccggaggtctacttccgtttcaaggggctgttacccaagtagacaaggcgtaaaaacggcggaatggcgttggcgttatgctgtggatactcgtggtatggaggatgaccagccccttgaaacggaagtagacctccggaacggtcaaaatcagcccctcgaaacggagatagacctccgggcggggcgcggatgttttttggacggctaggcagccagcccaagatgtttgcggtattgcgcgaggtcatccagcatagtgaatcttttccccctgaaatggaaatcaggccccaattctgatgaggtgtagagattacgcgcgaagcggtacacaataggaagcatgaatacttgtggtttggggcatgacgtggtggatgtggccgcattcgccgaacagttggcggagccggggtctcgcatgcgtgcgctgttctccgtgcgtgaggtgcggcaggcatccgaccgcgcgcgccagaagaatgatggggaggccgtccatctggccgccaaatgggcgggcaaggaggcgttcctcaaagcctggtgcgattatcttggcgatgccccctatccgttcacgcttgataatttcccgtggcctgaaatcgagatcttggacgattcccgtggtgtgccgtatgtgtctctgggtaagggggcggcgtcagtcttccaaactgattacgcgaattcggctgacggcgctcgctattcctctgcttattcccctgcttccgataacgggccttatacagtgatgcaggagcggcggaatgcgcgttcggcgcagcgctcgactctcggtgcggggtcgatgccgcatatccatatttccctgagccacgatggtccgattgcctccgcggtggtgacgatttctgtggaatagcgcccgaggcccccgagtgctacatgctgtacaacgtctccatcatggttaacctgtggagcgcgctcaccggtcgcgacgtgcgcctgctcaagaaccagatcgacaagctcgactcgctgcccgaaaactgctggttcgtgattctgaatgcgatgggcgccgacctccaaccatacgagtcccagctcatccatttgtgatttcgacggtttccagctcccctctttgaggggagctgtcgccgtaggcgactgaggggagtcctcggcaaagccacaatccatcaactagattggctggtcctgctgcagccacacgcgtttgccatccccgaagaaatatgtataataactcaagtcgccaaaagcgacgtttaacgcggatgtagctcaatggtagagcctcagtcttccaaactgattacgcgggttcgattcccgtcatccgctccactatttatatgttggtgtatctaattgggaataccggaagggtgagctaccccgagtagtattagtactcatggtgttgagaatcgacgaagctgaactgcgtgccaagctctttgagcacaaagagcagattggtttcgggccgattgccaatggggtcgtcatcatcatcgaaggattgttttacattcctgctgctctcacatctggactcgaccaaatgtttcaaggattgctccttgcattgagcattatcttcatattctatggagtatggagtttgattactgcttgcagaaataagtatgatgccataacactgtatgaggatatcgccaacatggatagaaccgaacgaagaagctcgatcattgcggtgaaagatgctaaccgatatcttctgtatcgtgatttaggttggggatgcgactttttccctaatcatgcaaccgcaagcagtactgatgaggatgttcgtcagctgacgacgtattttgccgatgaattcgaaattcctgctaaagactttactctgtctcacatttgtgtgaaggattctgagaagccatccacggagcatgatggagagattcgttattacgaatacacgctataccgcgctagcgtaacggtaatgcctgacgcctggcgttccactgagttccatgttggtgccaaggactgccgctggatgactcttgatgagatgcttgccgaccccggcatcaacaaaatcaatcatgatgtcgttgcgatggtgcgggataacttgtaattgttgccacttcgggcatatgacgattgagccaaagcatgttctatgtttcgataatcatcaaaagcagagcatagtatgctctacggggatttttctataccctgaaaa

SEQ ID NO: 2316 - DNA, 41483 bp, Unknown
  R119_18m  MAG No. k141_34777
catacggttctcgcgacaccactgccacaccgtctgctcgttgaagccctcacgcctcgcccattccctgacacgcatgacttaattatatcacacgaaaacaaactaaagcaaataatcaatctagcaggttataaccccatcaccatctactttttaggaaacatcttcgctgagacctataagttgatccgagagtacattctgctgttggggagcaggattggcgtttattttattcctcgtccgccctgttctggcgcagctgctcaatgagatcgatgacggtttcgagttcaggagtcacatcgtctgaaggacgaacgttatcctcttcgtcgtccatctcatcatcctcatcatcatcggcaacggtgttgttgaggatgtcctcttcggtggcctcgtcgtcagcatcagacttggactcgtcgctggaatcagctgcatcaacatccacaacggaatcggatgcgttctgtgcaacagactcatcaccggcagactgggattgcgaggtcccgtcgcctgccgcctcctcagcgggctcagtatcgacggcgttcccgtcaacagtcttctgtgcttcgatatcatcaccggcaggctcgcctgtcttgtcggtttcgccttcggcctcgtcctgggcaacctgctcctgcttgcacggacggttggcaaccacgtcgatatgcagatcgtcaaaggctggcttggactgcacccacagctggcttggctcgggaggttcgatttcggaatgctcaccgcagccgtggtccagggagaccacgcggccgtcatccggactccacttgttggcgcacacgccgaacatacggtcgagttcgcccgcgagcggcacgaagaaaccacaggtggagcacaggttgcctccggcggttttggtgctcaacgctttggggcctcgcggaccttcataccagcgcttggcagcctgcgcacgacccaacgaggtcagcacgtgacggcgggtcagtcggaaggtctcgacggcatcgttgacatcccgcagcgaggattcctcgacttcgccttcctcgatgcgctcgtcatccggatcggtaccgatcgaatcggtgggagccagatctgtgggctcaaggcgatctttccaaggaatccacttgggcggcatcaacgcgccctcagtggggatcaaggaggattcgttgacggtccaggagtcgatctcctcgtcgtgatacagcgtcaccgaccattgccatccttcgtagccacggatattcgcggcgaagcggaagtcagtgacgtgatcctcaagatcatatgaggtaacgaaatcccccacctgatcgctctcgtcggccacttcgagcagcacggcgcgcgcgatggcgtgagggtccggtgtcacgatggtttcggtggtatcagtcatagatcagatcagtcctgtacatcgaattgatccgccaccgcacgcagcaacgtggccagctttttgctgtcggcagcagatgggtaacggtgacggcgcaacgtattgccggccgcatcaagcatcttgataaggtcctcgcagatggcggccatgtcatccgccttcgggcgggtggccttgaccaagctgggagtggaggcgatcaggcgaacatccatggcctgcggcccacgacggccgtccaccacggaatactccaccttggcccccttgcgcaacgtggtggcgccagtgggtagggcctgagccggcaggaacacgtccttgccttcctcactggtgatgaagccataacccttggctgcgtcaaaccaacgaactcgaccggtgggcattgcgaaccttccttaatcctcaatggaaatagtaaaccgaaggtacagtttacctcacagggcttgacctcacgctttgggctgagtcgcctgagtcttacgctcagagctgaaccaagaagtcttctgtttggcgtccttggttttgccggtgggccgcttgggctcaggagcgacgatctgctcaatcggcagcaccacggtgaaggtcaggcctcccccatcggtgccggtggcgcagataaagccgtgatgtgctttgaccacggattgcgcgatggccatgcccaaaccggtaccacccttttcgcgggcacgggatgggtccgcggtgtagaagcgttcgaaaatcttcgagcgcgattcaggcggcacgccggggccatggtccacgaaacgcaatacggcgtatcgatagccggtctgcatcgaggcacctacttcggcggcgtcgatgaaccgccgcattgacgcgtcgctggcgggcatgcgagcgagctgtcttggatcgatggcggccggcatcacaccgagcgcggcctcggcaggcgaatcggcaggcgtgtagcggtggatgttgcccacgatgttggtcaccacctggcgcagtcgagaggcgtcgccgggcagcacgacctcgggccaatcgccttcggcaaggttgaattcggcgggatggttcaaatcgcgcgccggttcgagggaaatctgcatgcggcgaacggcacggtccgggtcgagcgcatgcaagtcgtcgacggcgtcggtgaccagcgacgagagtttcaccgtgccggtcacatcgatgccgcgcccctcatcgagacgggccaaagacagcagatcctcaacaagaacagtcatgcgctggctggaccgttcgatatgttcgatggactcgtccgcacgctccaaggcaccaggcatatcgcgctgcatcttatacagctccgcatagccatggatggcggccaacggggtgcgcagctcatggctggcgtcggagacgaaccgtttcatcttgtcggtggtctcctcctgttcatggaaactggattctattcgggtgagcatggagttcagcgaggcggccagggagccgacctcggtgttttccggcgcggaaggaatacgttggctcaggtcgccggcggcaatctttgcagcggttttctcgatgcgcttcagcggcgtcatcgtgtgctggatgatcagcgtggacagggagccgccgagcagcaccacggcgatgccgaccacaatgcagtatcgggtgagtgtgttgacggtgtcgatctggtcggccagtgacaagccgatgtacaccacggcacggtccttgccgttttgctggaaggtcaccggcagaatacgccatggtgccctcgccgtgacgatggcggcatggttggcattgacagtggggttggccagtaccttggcgatggtgtcagaggaattggagtttccgttggccggatcgttctggctgtccgcactgtcggactgcaccgtgatgatctgcttggccactgcctgcgtagtgaatgcctggccgagcgtgatgccactggtatcaccataggtaggaagaatcggcaccgatacgataccgtcctgcatctgcggcatcagcggggtcacgaccagaggattgccctctttgtctttggtgccgtcggtatattgaatctgcagaaagtacgagttcggccccgatgagtcattttttgacagcagatcgatattgttgaccaccagctggctttgcgagcttaactgggtgtcggttttctgcagcatgtagttgttcaccaacgcgcggatggagaaggaaatcaccgacacgccgataagcagcacggcgatggtgcaggccaccagcttgctgctcaacgagatacggtcgatatgccgcatcagcatgtttttcttacgttcgcgccgctcttggaaatgggcggcgaacggcggcattgcaggcatgggattcgtgttcggggcggcgttcggcgtgctgctcggcggtacgccgcctgactgcttatcggggatactcatgagattgcgatgcgttatggatggggcgactagttcttcggttcgcgaatcatatatccgatgccgcgcttggtttcgatcagcggagtcaccttgcgcttgccgccttcgccgtcgtcgacctcgatgccgtcgactttcttgcgcaggtaggagatgtacgattcgacgatggctgcgtcgccgccccagtcgtattgccagacatggtcgagaatctgtgccttggacagtactcggccctcattgtccatcaggtagcgaagcagcttgtattcggtggggctcaggtcaaccggctgccctgcacgggtcacatcgtgggagtcctcgttgatttccaagtcggcgacgcgaataatcgggtcgtcttccacctgttcgcgggtacggcgcagaatggcgcggatgcgagccacgacttcctcgaggctgaacggcttggtgacgtaatcgtcaccgccgacggtcaggcccatgatcttgtcttgggtgtcgtcacgagcggtgaggaacagcacaggggcgttaatgccttcctggcggatgcggcgggtgacggtaaatccatcgatgtcaggcagcatgacgtccaacacgatgagatcaggctgcactttttcgataacctcaatggcttcggaaccggaagcggcggtgtttacctcgaatccggcgaagtgtagggaagcgaccagcagttctcggatggacggctcgtcgtcgacaacaacaatcgatgcttcaataggcttactcatgcttcctagagtgtcgcgctcttctgggcgtttcctgaatgtcatcttggagttcggccttggaatccttcttgatctccttgcgccgacgaatcaccaccatgaccacgatgatgatgaccagcgccaccaacaccacacccatgatgattatgcctacggtcaccgtggatgatgaggtggaggcttttttggatttcacgatttgatccatcattgccgttgccgcgccagaccagctcggcgggttttccagtaacggctgctgtgcggcttcggatagcttatcgacggttttgttatcgagaagccacttatcggagttcttggacacgacgaccaccaggttgccgtcattcgaggccacggcaagcatcactgtgttcggcttgggattcatggactccatcacggttgccgcccagtcttccggtttctgttgactattgaaactggaaagatacagcagatgcacgtgtacaccggtttccttctcggttttggcgatggcatccgcgacttcggccgcatgggagcccaggagattttccgtatccgtgatgttctcggtgatggtcacgccgctgtcggtgctgctgctggagctgtcagagctgtcgcccgagttatccccataggcatttgcggttatccacattgcgttcatcgctactgcagcaagggcgcaaatggcacaaacaagccattttcggaccatattcccgaaggccgaacaggacggctccgaagataggaccacaatagttgtttttccgtcttcccgattcgttgttgacatatcctccaccttagcggccggtattggcaagcggccgccatacataccattaaccctctagaaaaggagcaacgatgccccaatatcaggtagattccgagcgaatccaatcatcctcggccgcagtggccacttcgatctcgcagatcaggcaggccgtgggcggcatgtacaccaatctcaatgccttgcaggacgcatggcgaggttcggcggccacccagttcaccgcggtagccgaacagtggcgtgcggcccaacagcagatggaggcctcactcgagtccatccaacgctcgctgacgcaagcctccaccgtgtacgctgacgccgaaatccaagcttcgcgcctgtttgccagctagtttcttggctctcctccctgaggggagctcgatcgcgaagcgaaactgagggagtatccctacaccgcagctccccttagtctcactgcgttcgacagctccccccaaagaggggagccagaatacaaaaaaggggactcccgaaggagtcccctttcagctcaatcagctagcgatcgcttgcggatcagtagcccatgtcggcaccggcggccggggcagcaggtttcggctccggcttgttggcaacgacggcctcggtggtcaggaacagaccagcgatggaggcggcgttctgcagagcggagcgggtcaccttgaccgggtcggtcacaccggcggccagcaggtcttcgtaggtgtcggtggcggcgttgaagccttcgccatcaggcagggaacggacggtgttgatgaccacgtcaccggacacgccggcgttctcggcaatctgcttgatcggggcttcgatggcgcggaacacgatggcggcaccggtagcctcttcgccggtcagggaggcgacggcctcggccttctcggctttggcagcagcctgaacgagggccacaccaccgccgggcagcaggccttcctcgatggcggccttggcgttacgcacggcatcttcgatgcggtgcttgcgctccttggcctcaacctcggtggcagcgccgaccttgatgacagccacgccgccggccagcttggccagacgctcctgcagcttctcacggtcgtaatcggagtcggtgttctcgatctcagcgcggatctgggccacgcgagcgtcgatgtcttccttggagccagcgccctgaacgatggtggtctcgtccttggagacgatgaccttcttggcgtggccgagcacggaggtgtcgacggactcgagcttcaggcccagttcgtcggagacaacctgagcaccggtcaggatggccatatcctgcagcatggccttgcgacggtcgccaaagcccggggccttgacggcgcaggacttgaaggtgccacggatgttgttcaggatcagggtcggcagtgcttcgccgtcgacgtcctcagcgatgatcagcagcggcttgccggtcttcatgaccagctcggccacgtgcacgatgtcctgctgggaggagaccttgccggaggtcagcagaatgtacggatcttcgagcactgcggtctggtcgtcagcgttggtgacgaagtacggggcgatgtagcccttgtcgaaacgcatgccctcggtgaagtcgaggtccaggccgaagcggttgttgtcttcaacggtcacaacgccgtcctggccgaccttgtccagagcctcagcgatcttctcgccgacctcagggtcggcggcggagatggtggcggtagcagcgatctggtccttggtctcgacgtccttggcggcggcgacgagttccttgacgatgacctcggtggccttctcgatgccgcgacgcagggcgatcgggttggagccggcgaccacgttcttcagaccctcgtgaaccagggactgagcaagcacggtcgcagtggtggtgccgtcaccggcgacgtcgtcggtcttcttggcgacttccttgaccagctcggcgccgatgcgctcgtacgggtcttcaaggtcgatttccttggcgatggacacaccatcgttggtgatggtcggagcgccgtaggtcttgtcgagcacgacgttgcggcccttcgggcccaaggtgaccttgacggtgttggcgagcttgtcaaggccctccagcatgccctgacgggcttcctcatcataagagatgatctttgccatggttgcgtattcctccaaatggctaggtataccggttatcactcgcaagcgtcgagtcgtgacgaccagccgtcagccgccgattatcactctcgacctccgagtgctaacccagacattagcactcgcgaccgccgagtgccaacatcatcggcggcgattgcgctttgggcatgaaaaggccccaaccgtcgaaacggtcagggccttcaatgcacatccttgcgtgcgtgttgctcactcggagcgggcttcacccgaagacagcttgacaacatcctttgcttgcgtgcctttgccggacgaagcgggcgtatactccacgcgatcgccctcgtacagcatcttgaacttattggtgctgccgtcgtccttgatttccgcgtagtgcacgaaaacgtcctcgctgccgtcgtccggctggatgaacccgaaccccttcttggcaaggaagaacttcacggtaccttgtgccatatctgatctttcctttgttcccttaggcgtcgcgacacaaaacctatagggaacgtagaaagaaccgcatcgcgctcccctacctcgcgactagatgacgattgtacagtgacgagggaacaatcccaaccgcagtggcacattttcggtacgaattatttcatagacgtgagaacgctcacggttttcgatgtattccacgccgatatcagggacgcatcaacaacgctagttgagcagcaccaccgtaatgggaacggcgagtccttgcacctgctccacagccgaaatgccaagcgtggtcgccacatcttcggcggtggctttatcggcttcattctgataccataccacggaagaagccggcaatgtgccgcgcggattggtcgcctcgacgctggtgtaaccggcggtctgcagcacatcggcctgctgacctgcatatccttggattcctgtggcgttgaccacacgcacctgcgtggccttattcacagtcgcggtggctccggactgctgagactgctgatcggagtcttgattctcattcgaggatgtcgtatcactgttggtatcggattttgccgaatccgaagtcgagtccttggacggatcggtcgaagtggacgaggaatcatccttggtgctgtttttggtctcagccttgctggacgaatcggacttggaagcagtcccggacgtggtcgcagtctgggacgatcctcctattgcattcctgtattccccggaaatccatgcccagaccccgacaccgcacagtgcggccaccagaataacgacgatgaacgggcagaggcgggccactgccgaacgagcgccacggtgaactcccaccggtcccttcggaggattgtcgaaggaatccggttcataggattcgtaggtcatcatgtcgcgtgccataatcgccctttcttcctgtcaaaactacccatgagtgtaatcggcaaacaactcatcagtccaccacaccacgcctcgtgcaccggatatgcacgtttgactacagtggtgagtcatgatcaaaccattgagcgaactggtagagccggggtgggcccatgccttggccgacgtggagcccgccatccaccatatgggcgattttcttcgtgcggaaaacgccgccgggcgcccgtggctgccggcaagccacaatattctgcgcgcgttcaccatcccgttcgattccatcaaggtgctgattgtcggccaggacccctacccgaccccgggtcacccggtgggtttgagcttctgcgtggcgccgaatgttcacccgctgccgaaaagcctggtcaatatttataaggaattggttgacgaccttggggtgcccatgcccaccaacggcgatctgacaccgtggacggaacgtgaggtgatgttgctcaacagatgtctgaccgtcggcgtcgggcggccgaattcgcatcagggcaaaggctgggaggaagtcaccgaggccgcgattcgtgcgttgaacgcgcgcacggacgccgacggcaagcccaagccgctggtggcgattctctgggggcgtaatgcgcaaagcctcgagccattgctgaccaatgccttcattatcaaatcgcctcatccgagtccgctgtccgcttcccgcggattcttcggctccaaaccattctccagagccaatcaagccctagtcaccatgggtgccgacccggtggattggactctttagacagaccaacagtcattgtgagtagttacagtgagggcatgactttgttccccacgcaaccgaacataccttcgccgaccaccgccgcacgaccggtcaccgttcccgcgcccggcgtgtcggctccgctgggtgccgatgacgccaaacgcgcacgtatcctggccgacgccattcgggcgaggttcgcccagacactggtgggtcaggataatctacgcgaatcgcttatcgtgaccttggtggccggcgggcatattcttatcgaatccgtgccgggcttggccaagaccacggccgcccagacgctcgccacctgcgtatccggctcgttcaaacgcgtgcagtgcactcctgatctcatgccatccgatctggtgggcacgcaggtcttcgattttgcgtcgcagaagttcaccacgcagatcggcccgattcacgccaatttcgtactgctggacgagatcaaccgttcgaatgccaaaacccagtccgccatgcttgaggccatggccgagggtgccacgaccatcggcgggcagcgtatcgccttgcccaagccgttcatggtgatcgccaccgagaatccgattgaggaggagggcacgttcaacctgcccgaagcccagatggatcgtttcatgatgaaggccgtcatgacctatccttcgcccgacgaagaggctcgcatgctggccatgctcacccaccgtggctccgatatgatcggtcccgacaccatcaccggcgaacgcatttccgtgtctgacgttgattttctgcgcaaggcggcacgccgcgtgcatgtttccgacgcgatcatgcgttatgcggtcgatatcaccgccacgtcacgaggtgccggctcccgccccatcaagggactgtcgtccttggtgcgtttgggtgcctcgccgcgcgccaccatcgccttgacccgtatcggccaggcgaaggcgttgctgtccgggcgcgactatgtggtgcccgaggacctcaaggcgttcgctcatgaggtgctgcgccaccgtattatgctgacgttcgaggcactggccgatggcgtggtcagcgatcagatcgtcgacaagatcgtcgaaacggttcctgttccgtgagttccgattccgttcgcaagaaaatcgaggcccttggcactcagctgagcctgcctaccgtaaggaaggctttgggcgtgctggagggcgaacacgcatccgggcgtcgtggcggcagcggcgatgcgatggatgtgcatgcctatgagccaggcgacgaatcccgtcttatcgattggaagaccagcgcccgccaaggccgccccatggtggtcgagcgcgagcgcctgtcgacgtcacgggtctggttgctgatggacgttggcctggagatgactggcgtatgcccttccggagaacgcgcatggcaggttgccgccaatgcgctgcgtatgttcgccgcactgtcgttgcgccggtcggacgatatttcgctggtgttcggcgatgagtccagcatcacccgcgtgccgttcaacggtgggttcgcgcagttcgaacgcacgctggacaaggcgcttgatcgtgattgggatcatcaccgtaatatcgacgcgctgctggaatatgcgcgccgtatcaaggatcgtgaggcattgatcgtattggccaccgatgagcatgcgatggaggagcggcatatcaccacgatccgtcgtattacccgcacccatccgatggtgctgatcgatgtggcgacgatgaatccgttcaaggccgtctcatcccgccacgctcccgccgacggcttgagtgcacggcgtgtgccggcattcctgcgcaacgccaaggcagcggccgaggtcgatactcatcgcgcgtatatggccgcggctttggaacaggagctcacccgtgccggttcccatatcattcgagccgcatccagcgaatccatgttcgatcgtttcgtcgccctggtgtcccgggcattggcccgcaccacacgcaatagactgggcactgcacccgaactggtcggactgactttggcgggtgatctatgatgcacagcatgttccccatcatcccgctcgccactgatcccggcgatctcaggcccgtggagtcgttggccttgaccactcccctagtgatggccatcgtcgcatgcctgttgctggcggtaggtctgatcgcgttgatcatcatgctggctcgccccgcacgcaaacctcggaacagcgaccgtgcgcgtggcactcatagcaatgccagctccaaggccgagtggcgtgcccgcatcgacgatgtggtggcccgtcatgaatccggagcactgccccggcatgaggctttcgtcgaattggccgtcatcgcccgtgatttcgccggtgccgcatcaggcaaggagcttagttccagtacgctgaccgatttggcgtacctgaatcgcacgcccgcgaatcgccaaggattggacgcattgaagcagaccattagcgcgttgtatccaccggaatttgccgatgatgcccgcaaccgaatcgcccagacgaccagcgtgcagcaggccgccgagtgggtggcgaatctggtggaaaggtggcgttcatgatgctggcatggcattggccttgggccgctctggccggcgtcttggcagcgctggcgattatcgtgctgattgtcgtgttcgcccgccgtaacgccgccgacgacacccctgtattctcgatggacgacgatctcaataccgagcacgcttcccgtctgttccgtcaatggcgcgctttgggccgtctcgccatcagcgtgctggtgcttgcgctggcgctggccattgtgctggtggctcgtcccagccaagtggatgccggtgacgaacgcgcttccagccgagatatcgtcctgtgtctggatgtgtcgggatccacgctcccctatgatcgcgaggtcatcgatacctatttggagctggtcaagcatttcgagggggaacgtatcggtttgagtatcttcaactcgacctcacgcacggtgttcccgctgaccgacgactacgaactggtcaccaaacagttgacctccgccagcaaggcgctgaaaggcgtcgagtcgcaggatgacatcgataagatgtccgatgccgaatatcaggacatcgccaattggctcgaaggcacgcagaaccgcaaggacgccacctccttgattggcgacggcgtggtgtcttgcgcggcgatgctccccggtttcgcttatggcgaagccaatcatgcgaatgccgaccgtcagcgtgcggcatccatcgtgctggccaccgacaacgtcgtgtcaggcaaacccacctattcgctgaccgaagcgttggacttgacccagcagaccaaaatcaccgtggacggcctgtattccgggccgaaagccagtgaatcggaccaaaccacaacggatatgaagtccgcgatcgagtcgcatggaggcatcttcctcacccaatcgaatggcgcgtcgatagatgagctggtacgggatattcagtcgcgtagagatacggatgtggagaacaaggcgaaatcctcaatggtggacgctcccggtctgtggacgcttgctctggccgtgatactcattatctggatcgtatgtgcatggaggttgaggcgatgaacggattcaccttctcccccgccttgggctgggtcgccgacggactgctggcggccgggctcgccgtactggccattctcgaaatcgtattgtttgttcgccgccgtgcttccagtgacgagaccgtgtgggcttgcatacgacgtacgcttatgctgctcattgtcgcggtgatggtactgactcccagcgtggtatcgtctaccacctcacaggtcatcaatgccaccgacgtcatcgtggcggtggataccaccgggtcgatggcggtggctgatgccacatacgggtccgagaagaccattacccgcatcgatgccgcgcgtcaggccgtgcatgatgtgaccgctgcttacccggacgccagtttcgcggcgttacggttcggtgcttcgggaacacttgatgtgccgctgaccccggatgcgccggccatcgataattgggccaacacattggcggtggaagccacatccgtgtcggcgggatccagtctggatgctccgatcgatcaattgctgctgaccgcgaagtcgattcgtgaagcgcacccggatgatgcgattgtgctgtacctcatcactgacggcgaacagacctcgaatgtgacgcgtcgtacgttctcgtcactgcgacagtatctcaatgatgggtttaccgtgggcgtcggctcgaccgagggcggcaagattcccgtcatcgccgatggcgtcagtgccggcgattccaacaccacggaccactgggtggtcgacccggataccggcgaacccggcatctccaagatggatgagaagaaccttaaagacattgccgacgagatcagtggcacgtatgtggccgtggacgcttcacagactttggcggattcggtttcggccaggtcgtcgaagcagtggcgcatgaccaccacggtcaaggagcgcacacgcaccacgccggtggtatggccgttggccattgcgttggcgatattgcttgccatggaagtcggtgcatggatcgcgacctcaaggaggctgctgtgaggaacagtaacgaaatccacgagaacgatggctcggcgaatattcggatgcgggcgaaatgcccgctttgggcacgtatcgtcctggcttgtggcaccgtattgctgctgctggttgccggcgtggcggcagtaaacctgtccgcttcgattacgttcaatcaggccaccgcatcattgaatgccaatatcaaagcggctcaggatgagtcgactgatatcaccacgctcaaggcgcaacagcagcagaccgatgcgcaattcgccgaggccgggcgaatgcgtacgcttctgttgccgcaagtcaaggacgccatcgacaccaatgcttcgatttcttccgagctgacgaagatcaccctgaaacaggccgaggcgcagaacagcggttccgattccgggcaagcccagtcggcgcagcaatccgagagttcctcagccaatgccaaaaagggcggcgcgttgaccgacgagcagaagaagcaggtcgaggagctgatgaaggccaatcagcaatccaccgatacccagtcgaacaccacccaatccgagcagaaggcgacgcagaacaagggtaccggggccaccaagccgtggtaagcagtcgttcacggttgctctttttctcacatcctcacgggtcatggccttatcgcggctgtttcccggtttcggctgtcggctttggcgtttgtctgatcccgatagcccatggctgatccaaggtgtgcccaaacaggctatttgtggataatcgttacggctatacacaacacttgtgaataacttcgcccaaaatcggcaagctagaaccacattggtcgttccggctggacaagcatgagtcctgtccttttagctggatatatgaatacctacaccagcaccccagcacccatcgatcccgccggcggctttgccggcaatacggtgacgccgttcgattacggcacttgcccttgccatgcggcggtacagcgtagtcgcgacctcgtgtccgtccaacgtgcggccacactggcgcaatcggaccagatggcggtggccgtgaaccgctctcgcaacatcgtgtggaccggtaaagccgccgacctattccgatcgcggctcagtcgcaccgcacagtattcggccagtctcgcgcaagacatggagaccacccaccgattggcttgggggtcatcatgagcgagcacgattactggcaggtggaatcgtccgtttacggcggagtgggatatgcgccagccactcttgaagaatatgccgccatagccaaggctctcgatgacgaggcggcaggatttgcggccatagccacggcttgggaatcggccgcattacagttgcagtcacatcggcatagtgcgccgatgtgcgtcaccttgcagtcgggcgatccgagcgccgttgttcccggccatgtcactgcaccatatgccgcgctgggcaatcggtgttatgaccatgcaacggcatgtcagcggttgagcgatgatctgcgtggcgcggccgatctgctgattcgcgcacactctctgtattctcaggcggagatgacggctcggcgcatgtttaccgaattattgcaggccggtacacaggccaaaccgggatatgccgcggtgggtgttgccgctgtggcggcgggcggctttctggccggctgggctattgacggcaaaccgaacccagcatggatgtccacgttcacctatccgttccaggaaggagtgctcagcggcgcgggcggaatcattggcggcgtacctatcggcaagagcattgcgcacaccgatgaggtcaacaaggctgcggggaaaatcgccaatttctccggcccggcgaaagacgtcgtccaaggcaatcatctgaacgtgcgcgaggtgcaggcgaatgccgacgtcgtccgtgcaagcggatcggtggccgagtcaatggagaatctgcgcaggctcgccgaagaacggctcggcaaaatcgagctgaacagcggactcgaatatgggaccatcgccattcaacgctatgaacgggctgatggaaccaactcctggctggtcaccatcccgggtaccgatggacaacctgactcaccattcggctgggcgcagaacgtggaactgatgagcgccgatcaggagcgccgcaggaaagcggacagcgctcgcacggttgccgaggcgatgcgtcaggctggtatcggcaaggacgagcccgtggcactgatcggccactcccaaggtggcatcgttgccgccacgcttgcctcggattgggcagaggaatataccatcgagcatgtggtgacagccggatcgccggtggccaatcatccgattccgcaacgcacgtgggtcaccagcgtggaaatcgatgatgaactggtcgccgcgctggatggtgccgccaacccggtcaccgataattggctcaccgtgcaagggcatgtatcgcccgcgcccgcggcaacaccatccacagtgcattcggacgtctcatgcactcccggcgcaacgcccatcaacggtctgaccccatatgacgccgcatccgtggctggttcgaccaacggcagggagttgtcgcattggctcaaataccatcaggccgcttatcagaacgccaccgacctcggctcccccgccgtgcagcgccacgaagcgcattttcaggaagtcatcaacggagaactcaaggaaacccgctattaccaaggccgcatgacccagtccacaaccattgctcccggcgagcgcaccaccgagttcagcacgttcggcggttaaaagtaaataccacacttgacagagttgtcaagaaaggagttaacaatataatgatgagtaggagatggctcatcaaactgatgaagcaagcggcgaaacgcaagaatattacgtttgagagtatcaggcaaagagggagtcatgagatattccaactcgatggactcatgattcccatcccacgccataacgaaatcgacaacgacctcgcgaacatcatttgtaaggaagcagaagccaaactcgggaaaggctggtatcagcagtgaaaacatatcaggtcatcgttcgtcctggcgaaaaatactggattcttgagattcccggtatcggtttcacgcaggcaagaacaacagcagagattgaaagtatggcacgcgaccttatcaccgtcatgacgcaagatgctgatttcgcactcaccatagagacaaaactgccgcaatccgtacaagagcaccttgatgaagctcggcgactgcgcaaggaagaagcggaatgcagatcgaacgcagcgcgggaaactcgcgccgcggcacaagaactacatggcatgggtctcgccctacagcaaataggcgatatactcggggtctcacggcaacgggcacatcaacttgtcaatgctgtcaatgcttagcatcaatcggctacccccacaatgcaatcaccgcagtggcgcgcaaagagtgtcaggcgcgtcgctcgatgagtgcgcggccggatgcgaggcggtcgagcacaccggttttggcgatggccagcatcagataccaggccatcacgccgctgataagcacgccgccggtgacctcggaaatcatgtgcacgatgccacgcgggctgacgaatgacacacccacgtagcgaaacagcatcagatatgtgccgtattccaaggcgaccaacgcaccggatgcaatggaaatcggcagattgaacatgcggtaacgggtcaaagcgaacggaatctcagcgaaaacaccctgcagcagcgccgagataatcacgaagcccaaatcgaactggctaccaatcaccgtttcgaccagcgtgccgataaggttcacgtacagcgccgctccgggtttgcgcagaatcagcaccgccagcgtaccggagaaataccagacggcgtgcacgatgctggcgaaaccgggcagaaccgcaccaaacaccgaagagatcggcatgtacgcgaagttgaatccccagaagatcacgccgcaggccgcgcccagtgtggcaccgaccgcgatgtccaacggctgccatttcagcgacgatacggcgaccgaacgtttcggaagagtatgaatggtggttgcaggcatggtgatctcctagccttaaaggccgcacacagtaatcgaatcacgggcgttccttgacctgtgcggctcgggcgggaacgccacaccacagtgtagcagctcggttcacggctggaagtacccttggaggttatgaagcttaccgatatttcccccgcaatcgcattgaccccgctcgacggccgttaccacaaggccaccgccccgctcgtcgaatacatgagcgaacctgccctgaaccgcgaacgcatgcgtgtcgaagtcgaatggatgattcttctggccaacggctttgagggcaacggcaaccagccaatcgttgacggcgtcaagccgttcactgacgaagagcaggccttcctgcgcgccattcccgaggacttcggcgccgaaggcatcaagcagcacgccgctcatgaggccatcacccaccacgatgtgaaggccgtggagtactacatcgatgatcagatcgacaaggctccggccgagctggccaacatcaacgacgagctgaagaccctcgtgcacttcgcctgcacgtccgaagacattaacaacctctccatcgcccgttgcgtcaagaacgcgatggaaaacgtgtggaccccggagttcaagcgcatcatcgaccacctcgccggcaaggccgaggaattcaaggatatgccgctgctctccctcacccacggccagccggccacgccgaccacgctcggcaaggagctcgccgtctacgtctaccgtctgaaccgtcaactcaagcacatcgaaaaccaggagtacttgggcaagatcaacggcgcgaccggcacgttcggcgcccacctggccgcatgcccggatgtcgactgggtcgccgtctcccgcgaattcgtcaccaaccgcatgggcctgacctggaacccgctgaccacgcagatcgaaagccacgactggcaggccgagctgtactccaccgtctcccacgccaaccgcatcatgcacaacctgtgtgtggacgtgtggatgtacatctcccgtggagtgttcgcccaggtgccggtcaagggtgccactggttcctccaccatgccgcacaaggtcaacccgattcgtttcgagaacgccgaagccaacttcgaaatcagctgctcgctgctcgacaccctctccgccacgctggtggaatcccgttggcagcgcgatctgaccgattcgaccacccagcgcaacatcggttccgcgctcggctactccttgctcgccctgaccaacctcatggacggccttgagtccatccacccgaacacccacgtcatcgagcgtgagcttgatgagaactgggaggtgcttggcgagccgatccaaaccgccatgcgcgcctgcgagctcaagggcctgccgggcatggacaagccgtacgagaaggtcaaggagcttatgcgcggccacaccatcaacaaggaacaggtcgagcagttcatcgaccagcagtccttcgacccggaaaccgccgctcgcttgaaggctctgacccccgccacctacaccggtgtggccagccagctcgtcgctttcgaccgctgaaataggtgcgatgcgagtccctcgagcccatcgcatccaccacactactgcgctgagtcacaaaccaaaccgcaaactgaaccgaacaaggacaggcgtcaggtaactatttcatgactactgaacaggagcagtccactacggaagatcgcccggacaaggcgacctcctccactaccgaccggccgatcgcctctggtgacggccggtcggccagttttgctgtcagcggaccggacagcccggcaaccgacgacagcaacgattccggaccgtacatcgacgacatcgctccgcgccgcacgcgcgacttcggcgatctgacccgggccggtctgtcgctgttgatggccgccgtggtcatggtgttcgccgtgtatctgggcggcatgacgcgcggcgtcgaatccgacgcacacaccgcagcccaggtcatcaactggttggctgacttcccctccaccgtgctgacgcagctggccaccatcgtcatcgtgatcatcgtgctcgctcaattgctactggcccgggaatggctgcaggccgcggtgtccgcgctggccatgttcgccggctacggcatggtgtgggtcgtatcgacggcaatcagcagtctgaacgatttcaccctgccaatggcactagtctcagccgccacctcatacggctccgggctgttgcccgacatctacgccggcatggcgtccttcctgaccgccgccgggccacgccgcacccgctccacggtcaaatggagctggaatatcctgtatgccatcgctgcggtgatggtggtgctgtcgtggcattcggtcaccggcatgctggtgtcgatggccgccggccgcacagtgggcatgctgatccgattcgtggtcggcacgcagaacaagggcgtgtggggccaagatctggtcgccgccctgaaaagcatcggactggacaccgcctcgctgattcggcatcaggagcccggcgtcggccacggttcactggccgtcacgctggacgacgatctggccgaaggctcgcgcatctacgatctggataccacggacaaccgtcgtttcatcgtttccgtcatcgacgcgcagacccataccgtcggctatctgaagcagttgtgggactgggtgcgtttcaccagtgtgtccatccgacgtgaccgttccgtgcgtgacgccgtccagcatcatttcgccatgctgctgggtctgcacaatatcaaactgcccgcgcccgcaccctacggcatcgccgataccgacgaatccgcgattctggtgctggatgcacacaccatcgaactgcccgccaacctgaacacgcttaccaaggcggatgccgtggcctacatgcgctacctgtccgtggcgagccggcgcggctatacgcaccggcgcatcacgccggacacgctcgcccggcttgaagacggcaccgccgtgattgccggctggctcaacggcgacaacgcttccggtccggccaacaccgcgctcgacaaagttcagctgctagtgctgttcgccgcgctgatcggcgtggaaccggcggtggaggccgcccgcgaggcgtggggagacacgactctgacggccttggccccgttcattcagaaggtcgcggtcccctcccccacgcgcgcgctggaatcctgggacaagcagctgctcaagggcctgaggagtcgtatcaccgcgctggctgacgaggagacggtggaatccgccgaaccggtgacgctggcccgattctcctggcgttcgatgatcaccatgctgctggtcatcgtggccgtggtcgtggtcttcacccaactgaagcccgaggagatcatcaccgcgctgaccaacgccaacccgttgatggcggtggtgacgctcgcgttcggtgtctgcggctggatcggctcgtcgatttcgctcggttccctgatggcgcggcacaagcgtgacaatatgggcgtcttcatgagccaggtggcaggcggcttcgccaccgtatccatgccagccggcgtgggcccctcgttcgtcaacctgcagttcctgcgcaaatccggctatcgcaacacccaggcgaccgcaattatgagcgccgtgctcgtggtgtattacgccgtgtacttctccatgctggtcatcatcggcctgttcaccggccgcaacatgttctccggcgcaatcccgacaaacacgttggttatcgtgctgggcgttgtggtcgtggtgctgtccattgcgatgatgattccgccgttgcgccactgggtgacccgtcgtcttatgccgctggccaagacgtatatcaaccagctgctggacgtgctttcccagccccgacagctcacagtcagctgcctgggcgcgctgttccagaacgcgaccactgggctcgctttctgggcggccctgcaagcgttcggccattcatcgaatccgattgaaacgacgttcgtcttcctgctggcctatgcattgggttccgcagtgcccactccaggcggtctgggcggtgtggaagcggcgctgacattcgcgttcgtggcggtcggagtgccgcagggcgtggcgctttccgccactttgctgcaccgcgtggtgttctattggctgcgcattccgctgggcgcggcggccatgaagtggcttgacaagcataatcttgtctgattcgtctattttcatacccccttcggggaaatagatgtgaaaacccttataaaacgcgggttttcgcagaaacatgcgctagtatcattgatgacaacatggactaagcaaaagtgcttgtcccctgacccaagaaggatgctttatggcatacaacaagtctgacctcgtttcgaagatcgcccagaagtccaacctgaccaaggctcaggccgaggctgctgttaacgccttccaggatgtgttcgtcgaggccatgaagtccggcgaaggcctgaagctcaccggcctgttctccgctgagcgcgtcaagcgcgccgctcgcaccggccgcaacccgcgcactggcgagcagattgacattccggcttcctacggcgttcgtatctccgctggctccctgctgaagaaggccgtcaccgagtgaccttctgctcgtagcgattacttcgagcattactgacgacaaagaccccgaccgagatggtcggggtctttttgttgtggtgctgtgacgtgttgtccaaccgtattattccggactagttcagcgcttccataagctgctcgaatcccagggtgggctcggcctcgaagggatcgaggagtatggcttcccggcgttcgggggcggtcagggtcaggtgggtccagtcggcggagaactgggctccgacgttcagggccgcgtccacgaaccggccacgcagggcggcacgggtgtcggtcggcggattgtgcacggcgtattccacgttgtctcctgtcagcagctcacgcatctggttgcgggctacgagcgaaccgtacaggcgaccgttggcgatgtcgtggtagtcgagctcaagctgttccatctgggcgaaggtgacgtccgggcgacggcgtttgagcgcgtcgaacagacgcttcttggcggcccagtccacgcggtcggcgagcgcatcgtatgcaccacgctccagcgcgtccagaacgcggctccactcccccataatcgtgtcgatcgtggtggccggcagcgaacttgccagcgcatcgccatgggtttcgatgaaggccttgaccgccgcataataccggcgctgcagacccagtgcggacacggattcgcctgattcgagcgtcagttcggcgcgcggattgtcaaggaatcgactgaccgtgcgattggcggcagccggatcagcaaaggcatactgctcgaatccggacggaacgccatggcggaaggcgtcttcgatcgcgcacagcacaaggtgcgtgacggcaagcttcatccatgtggaccattgcgaacggttcgagtcgccgatgatcacatgcagccggcggaaggagtcggggtcggcgtgcggttcgtcgcgcgtgttgaccatcgggcgggagcgggtggtggccgaggagacggcctcgtccaggaagtccgcgcgctgggtgatctggaagccgtccggggtcatgcggccggcaccggtgtacagctggcgggtgatgaggaacggcagcagctggtgttcgatggtctccaacggcacgaagcggcggaccaggtagttttcgtggcagccgaaggcgtggccggcggagtcgacgttgtttttgaacacatggatcgtggcgtgtgcgccgtaggattcgcgcagcttgcgctgggccttcagggctaggttgcgcatcacgtgttcgccggcgaggtcctgggccagggcctcgcgcgggtcgcgcgcttcggcggtggcgtattcggggtgggatccgacgtccagatacagacgtgagccattggccagatacgtgttggtggagcgggaacgggagacgatgggctggaacatggtcatcgccacctggccggcgtccacggggcgttcggcaccggtgaccgccacgccgtattcggtttcgacgccgaaaatacggcagaacccgtccatctcggcggatggtacgggttccgtggcgtgcagggagcgggtgccgctgtcacgcagttggggcatcactcgccgcctttttgcacgaagctgttgacgtattcctcggcgttggtttccaaggcggattcgatgtcgtcgaggatgtcgtccaacacgtcggcttggtcggtggactcggtttgggcggcggcctgcgtggtggcgagggcgtcgtcttcctgggtcgcggcctgctgtgcttgaggttgttcgaattgttgtggcatgttgtcttctttttgggctgtcaaactcccctcagtcagccttcggccgacggctcccctcacccgaggggagccggaggagtcaaaagattatcgctggttgatggagtcgagccacggatactgctgcaggtaatgctgcagttcgcggatgatgagtccattggaagccactacatcgttatcgtgacgccagtggatgcgttcgccgtcccaacggctcagcgtgccctgtgcctcccagaccactacggtgccggcggcgatgcccgcgatatcccacacgtgcagcatcggctcgaagtaggcgtcataggtgccgtcggccactttgcacaggtcgagcgagacggggcccacgcgcttgatgtcggccgggcgtccggcgagcgaggaggccacgtcgagcgcacgctgcgattcgctggggatgaaggacatgccgtagctcagcacagaaccatccagcgaggaggtcatcgacggcacgaccttgtcgcgcttctcgccgaccgcggttttgtggatgcgcacggcacccgctcccctggcggccaggtaggtcaggccgagggccggggcgtgcacgatgccgatgatcggcttgggctcgttgtccgggccgaattcgaacagggcggcggtcaccgtccattcgctcatgcgacgtacgtagttgattacaccgtcgatcttgccgatgtaccagtaacgctggccagggcggctttcggcggggcgggtggtccagaagccgtcgaagtgggcgatgtcggcgattctggcgctcatgaagcgcatgatcttgttgtccacttcaagcttgtagcgggggccacggtccgcgttctcggtgctcggctgggcgaggttacgcggattgagttggtcgtggagggcatgctggccggcttcttcgagcaggccggcgactttgagcgcaaggttgcgcaggtcctgtggggtctcttcgcgtgtttcttccatagctaccaagtctatcgttcggcgttgatggccagcgacttcagcagatcgatggcgtgttcggctgaattgagttcggtttcgcagtgcgccttggtgaaggcgagcggatcggagatgtcgagggagaacaggtgatggtcggtagcggccatatggccggcattgccgtagaattcgaccgcctcgccctcgtctgcggcgcgcgggtcgcgaacagtgagtcgggaccagctggcggcggccacctcatcgccgaattgcgccacgagttttgccctgagccaggcgcgggtgtcttccggcggttcggtggtggcgcgtgcgatgtcggcggcgctcaccacccgttcggtgcggggttcgagtttggtgaagatgctgtccgcggggtcgagcgccgcccatttcaggtcgatgaccttcagtcgcggatcattccatccgttggccacgccgggtgcggacgttgtggtgattttgcggcgcagtttttcgagcagctgccatttgagcagccattcgatgcggctggcctcgccggtcatggccagacgttcgtcatcgtcggcggcatggcggatggaggcgcagtcgatgagcgcctgctgccacatcgccataatggatgtggtggatttgtccggccaggcgggttcgccggcggtgtcggtaccttcgaccagtgcggcaacctggtagacggcttggcgcagtttgagctggataagccatgcgttggtttcgccgccgttggccagcggcaagattgcccccagcgtcaggtcgcgggaaacggtgtgtatggcctcgactgggtcagacagttcgagttcgtcgaggaaggcgttcaggtcgaatccggcctcgtccgcatgttcgagcagccacagcagcatgctcgtggtgccgagtttcagtgcctgcggcacctccatgcgattggcgtcgccgacgatgacgtgcagacggcggtatgcatcggtggagtgggattcgtcgcgcgtattgatgatcgggcgttcgaaggtggtttgcaggccgactttggcgtggatgtagtcggcgcgctggctgagctggtagcccgggatctcgctgttctcgccaatccctacgcggccggagccggcgtagatctggcgggtgacgaagtggagggtcatcaggcgtgtgaccaagtcgaatggcaccgcgcgggccatcatatagttctcgtgcgtgccccagcaggagcccttgccatccacattgttgcgatgcagggcaatgggagtgccagtctgtttgcgggcgcgttcggtggcggcctgcatgatgaggtctccggcgtggtcgtatcggaccgcttcgaacgggtcggtggtttccggcgccgagtattcggggtgggcgtggtccacatagacgcggccgccgttgggggcgatcacgttggtgatgttgagctgcggggcgtcggtgagcatgtccgggcgggcggcggcgcgttcgagacgggtgccgcgcgcgtcgttgaccgggtcctcctgccggtagtcccagcggatggatttgctgtggctgtccgcggcgccgttcaccacgtcgaaggacagttgcaccggattgtagcggtccggggtgttcagggataccgcgtattcggtttcggtgcccatcactcgtttaacggtcatgtagtgctccttgagcttgagctattcggcggtgcggatgcggcggatcgggtccatgccgttgatgcgcgaccattgttcggggtccacgtcggccatggaatcgcgggtctcgcggtattcgtcttccacggcggcagcgagcagcagcacggtgagtgccacgtccaagccggtttcgatggattccttgaccgctcgggtcttggcccggtccacgatgttcttgagcatcgcgccggagaccacgtcggccaggaacaacgcatgccactggccgttctcctcctgcacgtcgcatagatggcggcgttcggaggttccgtagatgtcatgcaccagcacggcggacaaggcgtgcgcgtcgacgccatcttccagaggcaggtcgtcggtgaggtaatggtccacgatggcgatggcctgattggttttgggccggccgacgcgaatcttgacgtcgagacgccccggtcgcaacacagccggatcgatcatgtccacgcggttggaggcaccgattaccatcacattgtcgagtgattccacgccgtcgagttcggagaggaactggggcacaatcgtggtctccacatcggaggagacgccggagccgcgggtgcgtagcagcgaatccatctcatcgatgaacacgaccaccggattgccgtccgcggcgcgttcacgggcgcgctggaaaatcaggcgaatcagtcgttcggattcaccgacgtatttgttgagcagttccgggcccttgacggacaggaacacgcccttgacatgggtttcggccggactgattgcgccgtcgccattcgaatcgtaaccaccctcgcatagggcgttcgccacggccttggcaatcatcgtcttgccgttgccgggcggaccgtacagcagcacgccctttggcggcttcaaatcgtagcgctcaaacagcgcacgatgctggaacggcagttggacggcgtccctgatacgaccgatctcactatccaggccgccgatgtcggcgaacgtgacatccggggtctcctccagcaccagatccttgtcgccctcggcgggcagcacttcgatggcgaggcggacggacggatcgacgataatacggtcgccctgattgatgcccgcatacgcgagcgcgccggaacggcggatgagcacgggattgccggaggcgtcggtaacgatcagtcgaccgtcgtcaagtacctgcttgacactgcgaatctggcccacggtgtcagcatcgcgctgctcgaccagcacgagcttctcgttgagcatcacggtggccccggcggtcaggcgggcggcgttgacgttggaggccacaggcaccaccatgcggcgggtgccggaaatgacttcggccgacgcgtgctggatgccgtcttcatcggtgcgggtggaatcgaccttgaccatggtggcgaaggtgagcggcggctgagcgagctgggcgagctgtgacttcgccttggtcagttccttgccggcgcggctcagcgcttcggcgagcgcatggttcttggccatcaggcgatcgttcagcgcggcgagatcttcggtgtcgctcatgcgggttcttcgcttcccttctatccgggattttcggcaacttatggcagtcggcagaccctattcgttgccgtcggcggatttcctgttacgtataacagtacgcacttttcgcaccacgaaccatacgatgaccacaatcacggccgcgatgaccacgtcctcgaacacgccgagcgcgccttgaatcgagcaccactggtcgccgagcaggtaaccggcggaaacgaggatggtgttccacacggccgagccgagcagggtccagccggtgaagtgcaggaagttcatgcggttgaacccggcgggaatcgaaatcagcgagcgtaccacgggaatcacgcggccgatgagcaccgaccatgtgccgtatttggtgaaccagtcgttggctttgctcacgtctttgcggctgacgccggggattttgtctgccgcgagattgatgcgatgcaggcccacccagcgggagatgccgtacaaggtccaggcacccagtacggagccgatggtggcccagatgattgcgcccggcagactcagggtgccgcgtgcggcggtgaagccggagagcggaaggatgacttcggacgggatgggcgggaagatggattcgagggcgatggccaaggccacgccgataccgccgatggtttccatcagcatgatcagccagtcggtgatggtgccgatcaggccgggttcggtggtggtgcagatgggtgtggggtcggtcgcaagaatagtggcggctgccatggaaaaactcatagagggcattgtcccaaggttttcccagaatcagaagcatgacgcaagaagatgtgcattttgttgacaagtccgccgagagcgaagttgggagcccggctgattctgcggtttctgtgccgacgctgagcaagcccggcctgctggttatggatgtggactccacgctcattgacgaagaggttatcgacgagttgggcgtggtggctggctgcggtgaggagattgccggagtgaccgcacgcgccatgcgcggcgaactggagttctgcgatgcgctgcgcgcacgagtggcgctgctgaaggggctgccggtttccgcgttcgatacggtgcatgacaagctgcatttcaccaagggtgcgctggagcttatcgacacgctgcatgaacacggttggaaggtcggcgtggtgtccggcggcttccatgaagtggtcgatatgctggcggccgagggccatatcgactattggattgccaaccggcttgaggttgccgatgggtgcttgaccggcaaggtgctcggcgaaatcgtgagcaagaccgtgaagttgcacgccttgcagacatgggcggaccgtttgggtattccgatgagccagaccgtggctgtgggcgatggcgccaacgatattccgatgattcaggccgccggcctgggtctcgcgttctgtgccaagccaaagacccagctcgccgccgacaaagccatcaacgaccgcgacctaacccacgtactcgattacctgcgccggtaaaattttaccgacctcggctccggcacttatagttgagccatgactacttcaggcgcagaacagttgacgcttgcggggctggctccccgcaagcggcgtaaacgtgcgcctgcggagcatacgccggccgagcagcatcccatagcgcaagtcgtgttggatgtgcaggcgctccacctcggccagacattcgattacttcattgatgaaaaagacagcgaggccgcacagccgggtgtgctggtgcgcgtgcggtttggcggtcaaagggtcagcggcgtgatctgggcacgcaccgataccagcgataccccgcgctcttcgattcgctatatcgaacgggtgttgagccccgatgtgctggttcccgcttcgatgcgtgaggatatcggtctgattgccaaagcctatggcggcacacgggccaatattctgcgtttcgctgtgccaccgcgcgtggccaaggtggaggccgaacagcggttagccgcgtcgttccgccgaccggtcggcggctccctaccagataatacgcaaggcggttttgccgggcgtggcaccaatcccgatgggaccatgcctgctgactctacctttgccgttgccagtaccgtttcggagggggctgcgcaggggtatcgtcgtctgaccgccaattacgccgacgtcaatgtgcttcatgatgcgcttaccggtcagcgtttccgatcttttgtgtttgattcgctgcccggtgcacaggagtggcaacggaacatggcatggatggtggccactgcgctgagtgccggtaaagctgccgtggttgaattgcccaccatgcgcgaggtcgaagacctgatgcctatgctgcgcaattatgggctcaaaccgttcgccccggcacccgccggcggctgggtgggcgacgtcgccgtgcttaacgcggagaccatgcccgcggccgaccggtatcgcacctatctggctgtggcgttgggacaggtgaaggtggtgatcggcacccgtgcggtgatgtatgcgccggttgcaggcccggcgctgttcgccattctggaggatgccgcctatcagaacatggacggtatgatgccatatccacaggcccgtggcgtgatgcggctgcgcgccaagtcccatggcggcgtgttcgtggccatggccaatgcgcgcaccccgcaaagccagtgggaaaacaccggtccaggtacagtggagaccccagtgagcggctattccaccacaattcatccgctcgcctcgccgctgaaggacgccactccttgggtgcgttggctcaatcgcgatgaacttgcgcgtcttgccgacccgtccatcggggcgcgcgtgccgcatacggccgtccgcgtgctatctaaggctttggagagcggccccgtgctgctgtccattccgcaagacagcgtcagtgagactctgagttgtgcgaaatgccatcgtcaggcgcgttgtgccaagtgttctggaccgttgcaactaccggccgaccgccgggattccacaccgcgatgccgctggtgtggggctgctgccatcaattggaagtgcccgggctgtgggcatgaacgtatgcgtgtggtgcgcgtgggtgctgcaggcactgcggctgaactggccgggttgttccgcggcgtgccagtagttttgtccagcaagacgcagggcctggtgcgcgatgtggcttgtcagccgatgatcgtcatcgccactcccggtttcgaaccgcgcgtgcgtccggtcagtgccgagcagggatcggctggccatgagtatcgtgccgtggccgtgctcgacgcttggaccagcttgtatgcgttgggcgtggatgctcgcttggatacattgaccgcgtggatgcgtgcggtgtcgttgtgcgcgccgcgttcccgtggcggccaggcgttgattctcggcgaaaccgacccggccatcgcccaatcgctgatgctctgggattcgaggattcttgcagccaaggatcttgaggagcgtgtggagaccggtatgccgccggccgtggccgccgcctgcgtatggggacgccgtgatgcggtgatgacgctgatgcagcgtatcggcgcgctgggcggcgattggacggcctgcggcgagctgcccggcatgttgggcccggtgccgatcgcgcaaccggacacggtcgacgcccgggagctcgaagccacggccgaccgggtgaaggcagtaatccgtgtgccgcagagtcggcgagccgagctggcggcccgactgcaccgggaaaccgctcgtcatgtggcgtcccgcgaacccggcgagcttcgcttccgagtagatcccaaggacctgatctaatcgtcttcaacacgtgaaacgataattacagaatgaacatcgctagaaggaggacactatgaagggttggcctggagagccggatatggattacgacgtgctggtcgcggatggcgaggccgctgcgaacgccggcaagccgatcaccgacgtgatcttcgatttcggcaacgtgctgatttactgggatccggtcgccgtactcatcccccgctacagccagaagaccatcgacgaattcctcgacaacgacatctccggcttctacgatgtcaacgacctgatggacggcggcaccagcaccgacgaggccatcgccatcatgcgccgtgacaagggcgataagtgggcggacatcctcgactactacatcaagaacttccgcgactccctgaccggcatcgtgccgggcgcgcgcgtgctggtcaatgacctgaaggccgccggcatcggcgtgtggggcctgagcaactgggaatccagcctgttccacgtggccgaggaacagtgcgatattctgcagcagcttgatggcaagctcgtctccggttttgtcaagctgcgcaagccacacaaggaaatctacgaggccgcgttgaaccagttcggcatcaaggccgatggcgcgttgttcatcgacgacaaggccatgaacatcgtcggctcgaatgcggccggcatccgtggcgtacgtttccaggatccggtcaagctgcgtgaactgctcatcgccaatggcgtgaacattccggccgtgcagtgagcatcgacatttcaaggaggaccatgctcaaactcgtgttcgccggcacccccgacgtggcggtgccctcgctcaaggcctttgccaccgatccacgttttgatgtggtcggcgtcattacccgccccgatgcgcctaccggtcgcggccgcaagctcacgcccagcccggtcaaggctacggctctggagctcgggttgcccgtcatcgatctcaaaccccgctcccccgaattcatggaggcgttgaacgacctgcatgcggatatcgccgctgtcatcgcctatggcaatatcctgcccaagaacgtgcttgatgcggtgcccatgggctggtacaacctgcatttctccaacctgccgaagtggcgtggcgccgctcccgcccagcgtgcgatttgggcgggcgacccgaccaccggcgccgacgtgttcaaggtgggcgagggtttggatgatggcccgatcgtcgcttccctgaccatcgaactgaccggccgtgagacttccggcgaactgcttgaccgtctggccgaggaaggcgcgcccatgtatgtggatgcgctggccgccgtaggtgaaggcaccgccacattcaccgcgcagccggccgagagcctggaatacgcgcacaagatcacggtgaaggacgcccgcatcagttggacggacgaggccgaggccatcgaccgtcagattcgcgcctgcacgccacatcccggggcatggaccgaactgtttgcggaagggccaatcgccgataatgacgagtcaaccgctaaatccctcgccctgcatattctcgccgcacaaccggccgaccagtccaatcccaacactccggccgagcttcagcccggcgagctgaaggtgggcaagaagaacgtgtgggttggtaccggcagcacgccgctggaactcacccaagtcaaggcgcaaggcaagaaggccatgcgcgccgccgactgggcccgaggcgcacgcctctcccccgccgcctgcgtgcgataacaagcaatatcgctcccgccttcggaagcacagtaaaggcccggcatcttcataaagaagatgccgggcctttcagctatgcaatcggcgatcagttgagaccggagagcttgttgatcagctccgggtcacgcgtcgcacccttgtcggccgagcgggcgaaggcggcgtacgccttcagcgcctgggagacgtggcggttgcggtgagccacgtagccgtcgccagcctcaagctcgcgacgacgctcgtccagctgctcgtcagtcagttcgacgttcacggaacgggcttcgatatcgatatcgatgatgtcgccgttcttgatgagcgccaccgggcccttgttggcagcctcaggcgccatgtggccgatggccagaccggaggaaccgccggagtagcgaccgtcggtgagcatggcgacctgtttgccgatgcccttgcccttgacgaaggaggtcgggtacagcatttcctgcatgcccgggccacccttcgggccttcgtaacgaatcacaagcgccatgccgggcttcagggtatcgttcagaatgacctcgatggcctgctcctgggagtcgaccaccagagccggtccacggaacttccagatctccggcggaacaccggcggtcttgaccacgcagccgtcgggggccaggttgccgcgcagcacggcgaggccgccttcgtgaatctccgggtggttgatgtcgtggatggcgccgttggtgcggtcgcggtcgagcgagtcgaacagggtggtgtgcgtccacggctccggggagatgatgtggccaggagcggccttgtacatctgctgggcttcctcggtgcaggtcgggcgcatgatgtcccaatcggccagcttggcttccagcgtcgggtagtcgatggaatgcacgttggtgtgcagcttgccggcgcggtcgagctcgccgaggatgccggtgatgccaccggcgcgatgcacgtcggaaatctcccacttgccggacggcgaggccttgcagatgcacggcacggtgtgggaaatacgctcgatgtcgtccagggtgaagtccacgtcggcggactgggccatggcgaggatgtgcagcacggtgttggtggaaccgcccatggccacatccatggtcatggcgttctcgaaggcttccttggtggcgatggagcgcggcagcacggaatcgtcggaatcgtcgtagtactggtgagcgatcttgacgacttgcttggcggcacgcttgaacaggtccttgcggtaggagtgggaggcgaggatggtgccgttgccgggcagagccaggccgatggcctcggtcaggcagttcatcgagttggcggtgaacatgccggcgcaggagccgcaggtcgggcagacggtcttctcatagttgagcagttcctcatcggagacgctgtcgtcagcggtggcgtacatcacgtcgataaggtcggtgctcttgactgtgccgtcggcgagcaccgtggtgccggcctccatcgggccaccggagacgaacacggtcggaatgttgaggcgcagggctgccatcagcatgcccggcacgaccttgtcgcagttcggaatgcagatcagggcgtcggcgcagtgcgcgttgcactggtattcgacggtgtcggcgatgatgtcgcgggaaggcagggagtagagcatgccagtgtgccccatggcgatgccgtcatccacggccatcgtgttgaactcgcgcggaatgccgccggcttccttgatagcctcggaaacgatgcggccgaccttgttgaggtggacgtggccgggcaggaactcatcgaacgagttggcgatggcgatgatgggcttcttgcccatgtcgtctccgctgacgcccgcagcacggtagagggctcgggcgcctgcaaagacgcgccctgacataatttttgcagatcgcatttcagtcatggttctattcaagcctttgcgagggacacgccatttgtcaagagtcgaataatggaatttgcaaaaacgtaatgtttctcacacatttttttggaatacattcctctggcgagagtccggtatagggctgacagaagtccccccaaacggctacacttgcttcggttgagatagattttccaatgtttggagataagaacaatggcttttggtactgacccgacacccgacggtcttgcgaacccgccgatcgacgatctgatgaagcacgccgattccaagtacgcgctggccattttcgccgctaagcgcgcacgccagatcaactcctacttcacgcagctcaacgagggcctgctgcagaacgtcggcccactggtcgaataccagaacaacgagaagcctctgtccatcgccttccgcgagatcgacgagggtctgcttgaggagaccttgggcgaggacgacgccaacgagggcaactgatcgattcagacgattcgtttggattgtttggacagttcgtcgccgaatgatggtgtgagagttctctcacaactgattttgagcgacacgcttgcctgagttatcgcaatcagctataactcatcatcaggagcgaacaagacgtaaggctcgagccaccgcgctggttggcacgagcctttatttatgcccgcttccgcagtgacaagtaaaaattgacaccgtatcattgtgcctcgcatcccgcggggcgataagtcctgaagaaagggatgatatgacagaagaacatcggcttatttccgccgaatccgtgaccgaaggccaccctgacaaggtctgcgatcaaatctccgacgccattcttgatgatctgctggcccaggatccgtccagccatgtggccgtggagacctccgccgccaccggcgtgttcctggtcttcggcgaagtcacgtccaaggggtactgcgacgtgcagtccaaggtccgcgaaaccctgcgcaacatcggctacacctcctccgaagtcggccttgacgccgattcctgcggcgttgtggtggccatcaccgagcaaagcgccgaaatcaaccagggcgttgcccgtctgactggcgatcaggagaccgccgccagccgcgaagaacgttacgaagcacagggtgccggcgatcagggcgtgatgttcggctacgccaccgacgagactccgacgctgatgccgcttccgatctatttggcacatcgcctcgccttccgtctgaccgaggtccgcaagtccggtgaagtgccgcacctgcgcccggacggcaagacccaggtaaccattgagtatgacgataacgataagcccgttcgtctggacaccgtgctgatctccacccagcatgatcctgaggttacgcaggattggcttgctgttgagctgaagaagcacgtgattgacccggtgcttgatgaggtgctgggttccaaggtgccgcatgacaactaccgccagctggtcaacccgaccggttcgttcatcctgggcggcccggcggccgacgccggtctgaccggccgcaagatcatcgtcgacacctacggtggcgccgcccaccacggcggtggcgcgttctccggcaaggacccgtccaaggtcgatcgttccgccgcgtacgccacccgttgggttgcgaagaacatcgtagctgccggcttggctcacaaagtcgagatccagatcgcctacgctattggcgttgccgacccggtgtccgtcaacgtggagaccttcggcaccgagcagggtgtgacgcgaggccagatcgccgccgccgtgcgcaaggtcttcgatctgcgccccgccgcaatcatcgacaagctcgacctgaagcgcccgatctacctgaagaccgccgcttacggccacttcggccgtaccgacgttgagttcccgtgggagaagaccaacaaggtcgaggagctcaaggccgcgattgctgcggagtgaggtgctctaattaggacagagaaatcataagaataccataagaatagggtgctttccgctgttgatggcggaaagcaccctatttgtttttcgcagtgtcctacgaatctgttcttatttcaatggggctggtgccgttttgttggactcgtcattgattccatcaccaccaatcatgccacaagaccgagcccgcgtcgacgatccatgatgctcatgccgaactccgtcttgatcctcctgtcccgataccagaccatgtactcgtccagcatgccgatgaactcgtccatggtgacacctgcgaagctccgtttatggaagaactcctgcttgagacggccgaagaacccctccgcggcggcgttgtccggactgcatcccttcgcgctcatcgaacgcgtcaggttgttgtccgtgcagatgcggatccattcgggccaccggtagtggcagccgcggtcactgttaaaccgatgtcggtttaactccgattaagccgggtttgttgttaagccggggaacggttcggggtcttggtggctggccgtgtcccatgtggtttcccggcttaacgttccgggttatgttcgtcttgtcccatttgattcgaacgaaggagtttgccatgggtgagacgacggttggccatgtcgcgggcgaggtggtccgcgcgctttacggggccggttatatggaatccaccataggccagtaccgcaagtccatcagggcgttggaacggtacgccggaggcccggatgcggtgtacacgcgtgggtcgggcgcggggttcgccgcgtcgaccttcagtgagcggacgggtgtttttgttcaataggaagttgaggtttgggggtggtgacgttttgttggacttcgttgtctgtatggtcgttggtcagtgtaccggatggtttcaggcgacgagcccgagctggatgcgtttgtccatgatgctcatgccgtattcggtcttgatgcgcttgtcgcggtaccagaccatgtactcgtcgagcatcgcggtgaactcgtcgatcgtcacgccccggaagctcctcttgtggaagaactcctgcttgagacggccgaagaacccctccgcggccgcattgtccggcgaacagcccttcgcgctcatcgaccgggtcagcccgtgctcggtgcagatgcggatccattccggccaccggtaatggcaacccctgtccgagtggatgatcggcgtctcgccgggcttgagcgtggcgcacgcgtcgcgaagcatgccgttggccagggcggcgttggggctcgtgccgatcgtccaggcgacgggcatgccgtcatggcagtcgatgaccggcgacaggtacaccttgcccgccgggatcgagaactcggtgatgtccgtgacccacagccggttcggcgcggtggcgtggaagtcgcggttcacgagattcgcgggtgcgccgccgatctcgcccttgtacgaactgtagcgcttcgcgctcttgagcacggggaccatgccgtggctggtcatcaggcgcatgatgcgcttggccgacacgatgatgcccgcgcttttgagctcgaggtggatgcgcttgtacccgtaacgcctcctgctgttctcaaacgcctcgcgcaccagggacaggaggttcgcgttcttgtccggccggcgcatggccttcaactggtagtagtacgtgctgcgcgcgatgccgacctccttcagcaggctctccgcgttcacgcccaacgtctcactgatgtccttgatcagggtcgtcttctctcggcttgtcaggttgtccgggtctgcgcccggctcttttcccaccagttccgccgcacccttcatgatcgccaaccggatctccatggcccgctgttcggcgcgcagacgctcgaggtcggcgcgcaacgtggcgatctcgccgcgcagcgcgtccggatcgtcctgctgcgaggaatccccgcgttccggttccctcttcgtcaccatgagtcctttcgcgtctccgagcagttgacgcttccagtttcgcacgaccgacgaatccacacccaccgcctccgcggcctcgcgcgaactcaattcgccggacgcgaccttcaggaccgcatcccgtttcaattccccgggaaccgggccacggcgaatccggcgttcgcccggcgcgagctcgtcgatccacgaggcaagcacctccttgctcggataccccatctgacgcatcgtgcggctcgcacgccgcccatgcgtcagataatggtccacggccgcacgcttctgctcctccgtgtagcgcgcataccgttcaccacgctgcgaggacacgcccgtcccctgttcgtcgagccagtcccggtgccacatgcgcaacgcctcccggctgggataccccagctcgcggatcacatccgccgcgcagccctcgtatttcacatacaactcgaccgcgcgttgccgctgttccctcgtgtacttcgccatggccgtctcctcctcggatcacagtccaagaaaacggcaccacccccaac

SEQ ID NO: 2317 - DNA, 12150 bp, Unknown
  R119_18m  MAG No. k141_34903
gacctgagctatcagacccggtcttttacgatggagcggccgaccgatacggccggcgtgctgtaccccgaatgcgtgcggcagctgaaagtcatgttggggctgccagcctcggcggagtctgccactcccctgcccaaaactattcgcttggccggtatgagcacgtcttcgctcagtgaggcggcggctacggccgtgcagccttcactggatgacatgctcgaagaggcctacaatgcccgcggccagacctcacaggcacgcttgcatgatgccgaggccgcgctggatgccgtacgccgcaaatttggcagcaaggccgcccagtttggggcgtgacggccctgcggcgtggcttcccgccagccgcgcgggctttccacgttggacattaacaaacaccgggcaggcaccaagcaggcaccagcctcttggcgtacgtttccccagaccaatttccccatcatctggaacaacgtacgccgagacgaagcaaacgtacggcacctcagacaagaacgaaaacagtccggaacaacatacaccgagctgaagtaagcgtacgtttccccagacaaggacgaaaaaagtctggaacaacatacgctagctcacacgcggacggccgcgccctcccaggggccaagctcacggttggcgagggagaccacggcgtgcgaggcgtcgtaggtggaaatcacgatatccggttcggtcaccccgtgctgcaccagttcggcggcgtcgcgcggcagatcgaccgttcgtccggacaggttgaccgccaccagcagcttctcgccgccgagcgtgcgagtgaatgcgtagacgtactggtcgtccgcatcgatcagttgccagtcgccggcggccaccaacgcattctcgtggcgaatggcgatcagccgcttgtagaacgtgtacacggagtctggatcgtcgaattcgcccgccgcattgatctgggtatgattccggttcaccgaaatccacggctccacggcggcgtccggcgcggtgaaccccgcataggcggaaccatcccactgcattggcgtacgcgcgttgtcacggccgcgggcggcgatgccggccatcatcgattccgcggactgcactttggcttcctcgacccgctgatggtaggcattgagggattccagatcgcggtactggtccagccgggtgaagtggacgtcggtcatgcccagctcctcgccctgatagacgtagggggtgccgcgatgcatgtgcagcatcagacccaacgccttggcggaacgtacgcggctgccctcggtggagtcgtctccccaacgggagaccacgcgcggctgatcatggttgccggtgaacaggctcgcccagccggcattcttgacggccgactgctgcttggcgaaaatacgcttgagctggggcaggtcgagcggcagcggcttccatttgacgttgtcttcgcagtcgaagtccacgtgttcgaacaggaagagcatgtccagttcgccgttggcgggattggtgatgtgctcgttgcgctgggcggtgatgccgggggcctcgcccacggtcaggaagccctcgcgcccggcgaacacctcgcgacgcatttcggccaggaattcatcctgacgagggccgtccgcacagaacgggttcgggttggagtagccctcctcccccacgggcaggtcctcaagttcggaaccgtattcgccgggcagacggccggccgaatcgatacgcttggaaatgagggtgatgacgtccatgcggaagccgtccacgccccggtcgagccaccagttcatcatgtcgtacaccgcacgacgcaccgcaggattctcccaattcaaatccggctgcttcttcgagaactgatgcagatagtacttgccgcgttccgggcaatactcccacgccgaaccgccgaaataggaaccccaccggttcggctcggcccccggctcacccggggtggttcccgggcgggccggacgccaccagtaccaatccgcatgaggatcggacttgtctttggacgcctcgaaccacgcatgctcgtccgaagtatggttgaccaccagatccatcacgatcttgagcccccgcttgtgtgcctcggccagcagctcgtccatatcctcgagcgtgccgaacagggggtcaatgtcctgatagtcggaaatatcgtagccattgtcgtcctgcggcgacctgtacaccggcgacagccatagcacgtctacgccaagatcggccagataatccaaacgcgaggtgatacccttcagatcgccgataccgtccccgttcgaatcctggaacgaacgcggatagacctgatagaccacagcattcgaccaccacggattcggcgtggtgccattggttcgaacggaatcgggaagcacgacacgctgcgcagtagtcatgattgcaacctttctaacgaatgtgacgggaatcccggagggcggcaagaaccctccaggattccacagactgatgacgggatgagacggcttacttgttcgcgcctcgcatcacgccgctgatcacccacttctgggcgaagatgtagacgatgaggatcggggccatggccatcaggtagctggcaaacgccaccggatagttggcggtgaactgcgagctgaacacgaactgcgccagcgggatcgtctgatccgcggaattggacagcaggatcaacggcaggaggaagtcgttccacgcccacagcgcggtcaggatcgcgatggtggcgttgatcgggcccatcagcgggaagatgatggtccagaagatgcgccaggtggacgcgccgtcaatgcgggccgcctcttccagcgacaccggaatcgaacggatgaagccgatggcgatgaacaggttggtgcccaggccgaagatcatatacaggatgatcaggccgaacttgttgtcgaggttccacccgcccatctgcttggccagcggcagcatgatcacggagaacggcacgaacatggctgcgatgaagaagtagtacaggaagcggaagaaccgcttgtccatgttacgggccaccgcataggccacgaacgtgttggtcagcagggtgagcacgatggcgcccacggtgatgatcgccgagttcagggccgcgcgcggatagttcaccatgttcgaggcctcggcgaagttgccccactgccagctggtgggcagggcgaacgtgccggcttcggccggggttttcagtgcggtgacgatggtgaagtagagcggcaccagaatggtcaggctcagcaccgcgaccaccgcggtcagccaccagttgatcttatggtccttgcggaacttgtttttcttgggttgtgcagcaacagcgctggtcatgatcacaccttctccttgctaccgaagaacttgagctgaatgaacgcgatgatcgcgaggacgatgaagaacatcaccgcattggcggtctggtaggcgtattcgccaccggtcaggccgccctggtagatgaggtaggtgaccgtttccgtagcggagttcggaccgccaccggtcagggcgaccacctggtcgaaggtgcctaaggcgcccttcatcgtcaggacgaggttgatggtgaagaacggtccgatcagcgggaaggtgatctgccagaacttctgccaggcgttgacgccgtcaagggcggcggcctcgtagatgtcggtgtcgatggtctgcaggccggcgaggtagatcagtgtggtgtaggccacgccctgccatacggagagcaccacgatcggcgcccatgccagcgattcggaggtgatcatcgattcggacagccaccctatgcccaacgccttgccgagttcggggatcggcatcatgaagatgtacttgaacacgtagccgaccacaagcacggccagggtgtaggggatgaagtagatggcgcggaacccgttgcggaacgcgatcttggagttgagcagcacggcgatgaacatggacagcaggttcaccagaatcgtcaccacgatggcgatgaagaacgtgaacaggtaggcgcgcccaatgcgctcatcctggaacatggccttgtagttggtcaggccgatccatttgtatttgccgtagcccttggaattggtgaaggagtacatcacgccgcgcaggaacggccagtacaggaacaccatgaacaggatcatggccggaacggtcatccagtagtatgcgggatcgaccttgcgatgggagaaagcggagacacgcttcttgcgtggtttttcggcaatggcggacatggtgaacctccttactgtacggtcctggcttggatctgatcccactgcgtctgcattgaattggtgaacgcctcaacgttgccggtggtcagcaggctttgcaggctgccggccatggtcatggacgaggggatgtagtggtcggcgaaatcagcgatgcgtccctccttgtagaagtggaggatgttctgcagagcctcgtcgccggcgtaggtgtccttgaacggggtgaagcagaactgcgattcggcgtattccttgagccggtcctcgtccatcaagaattccacgaacatgcgcgattccttgggatgcttggtggtggccgaaatggtgagcacggtgtcgtcgccggcggtgagcacctgctcgtccggatcgtcggtggcgggcagctgggcgaacttcacgttgatgtccgggttgaccatgcgcacctgcggcacgacgtaggtgcccaggggcaagatggccgccttgccgttggcgaagtcctgggtggcctgctggtaagtaacgcccggattgtcctgcgtgtactggtagaactcgacttccttttccgccacgggaccccacaggtcggcgaatgtggcggtgccgccgctgagcttcgagtattcgctgatcggcacaagtgtgccggccagggaggcgaacggcgcctgagtggtccacggttcggcgaggctgccttcgatcggcgtgatgccggcctgctggatctgcttcatcgcggcgatgaactcggaccaagtttcgggcaggttgtccgggtccagcccagcctgacgccacaggtccacgttgacgacgtagccgttggcgttgccggcgaacgggatgccgtacgcgcggtcggcgctggtgtcgtacagtttggccagatccttgagcagcttgaccatctgcgggttgatgttgtcgaggatctcgtcgtcggtgaagtcctggaagattcccgaggcggcgaattcgccgaagtaacggccgccgtccacggtgaggacatccggcaccttgttcttgacgaagcgcgtgcgcagatcggtggcggcatcggcggtgttgatgatgtcgatggtgatgttggggtgttccgcctcgaatcccttgaccagcttcttgaactggctgactgcctctaccttgtactggaagaattcgagagtgacgtttccggcggtggatgtgccacaaccggcgagtgcggccacgcatgcggcgccggcacagacggcggcgatggcgcgggatatgctgcgggtctttgccgccatacggttcgggcgtcgatcatgcccggaggacgaccagcgctcggtccaagacgatgcggacttcatctgctgcttctcctttcatttacacttcacgacttcgctactccgcgactgtcgtgatgtatacgttaacacccatatttattgatatcaaacggcataattacaggatttctgtaaacggttacattccgtcatggtatgattgtggccattatcgagcacccatgaggaaggttcgcgcgtgatacattccacgatctacgacgtagccgtcagggccggggtgtccgtggccacggtgtcacgaacattcgccaaaccggatatcgtcaccgaggccacgcgcaagaaagtgatcgaagcggccaacgaactcgacttcgccatctcccggtccgccaccgcgctgaaatcgaaacacacgttccgtatcgctatgctcaccggcgaggcgatcgccacctggttcgactccaatctgtacaaggggctgaccgaggtgctgcagacccatggctacgacgtgtccctctacggcattgcggacaccgaacagcgcatgtcgttcttcgacgagctgcccctgcgccgcaatgtcgacgcggtgatcgtggcctcgttcaacgtaaccatggaggagatctccaacctgcagggcatgggcgtgccgctgatcggcgtcaacgtgccgcacaacgaggggttcaacgccaccgtgtccatagacaacgccaagagcatgcgcatggccatcaatcacctgcatgccctggggcaccggcgtatcgcctacatctgcatcgacgtctcggaggcgccgatggaatacagtgcggactcgcgcctgcagagattcgaatcggcctgtgcggcgtatgaggatatcgaacagttgaccatagccctgccccgcaacgacttcaccgtggacgaggcgatcgcgcgcatcaccgtcatggaccagccgcccacggccctatgctgcctgagcgacgggacggcgctgcccctgctgtacaagctgcccaaagccgggatcggcgtgccgaacgacatgtccctgatcggattcgacgacagcgactatgcggccgagttcgggctgaccaccattcatcaggatccgcaggccctggggcgcaaggcagcggaaaaggcgctgtcgctgattgattccgcgacgttcggcattgacctgggcgagccgttcgagaccgcgcgcacgttcctggccatccgcaataccacggcggcgccccggcggtagtcggtgtcgtcaggcgcgggccgattgcagacgttcgcaggcggaacggatggcctcgtcggtggcggtggcggagaaacgcaggtaggcgggagcgccgtagaattcgccggggctggggatgatgccgatcttggcgagctcggccatatcggcccagcagtcgccggacttggccttgacccatacgtacagcgcgccggagggcatttgtgccgaataaccatatgccttcagcgcgtcaaccagcgcggatagacggcgacggtaacgaccccattgctcgtgcacggcggctgtgtccttcagacccgcagccatggcggcctgcaccggtccggggataatctggccgatctgcttgcggtattcggccatttccttgaccagccggtaatcgccggcaatcagagccgtacggtagccggccatgttggactgcttggacagcgagtagagcaccaggatgccagctgccgaaccttcacacacatgtggattcagggcacatggcgtggcggagagactgaatgcggtatcggaggcgggctcgttggattcggccaccggtgcggcaggcacagacgcagcagatgcagacgcggcaggcgcagaggacgaggctgtattgcggcgcaccgaacgccagtccatcaacgcatagcattcgtcggagagcaccacggcaccgatgcgacgggcagcagccacgatgtcggtcagccagtcagcggagatgacctcgccggaaggattacacggcgagttgatccagatggccttgacattcggaatattcacccaggaatcgacgtcggtcacatcatcgactttgaccacggtggcgccggcaagttgggtaccgatttcgtaagtcgggtaggagacggccggttggacgaccacatcgccttcgccaaggtgcagcaggctggccatcagtgccacggcctccttggaacccacggtgggtacggcggcagcgttgatggacttcagatccacaccgcgcagttcgcggaaccatgtatcgatagcggccttaaggtcggcgctgccggcggtgaccgggtatccatgggcgttgggggcgtctgcgccggcaaccagcgcctgctggacactgctcggcaccgggtccacgggcgagcctacggacaggtcgatcatgccacccggcacggttttggcggtggctttgaagccggcgatacgagaccagtcgtatggcgacgaatatgcgtggaagcccatgagaacccctttcttggacggtatgttcctaagatacgacgaaccctcggccgtgatagaccgagggttcaatccgaactatgcgctgtgtgcggcgcttatccgcaaatcagcttactggttctgcggcggcagcgcggcgacctgttccgggtctttgccgattgggccattggcggaagcgccgcccaaatcgccgacttcagcgaagaagttgacagcggcatccttgtaccaagcccactcgtccggcagatcatcctcatagaagatggcctcggtggggcacaccggttcgcatgcaccgcaatcgacgcactcgttggggttgatgtacagcgagcgggaaccctcgtaaatgcagtcgacggggcactcgtccacgcaagccttgtccttgacatccacgcaaggctgagcgatcacatatggcatggaatcctccttaacaaatactgatacaagggtacgcgcccgttgggacgctcctcgctctcagccgttaacggccttatcggtttcggcggacagcgtttcggtcaggtcgcccttgccgaggcgcgcatgccagtagccgtagccgaagtagatggcgacgccgaccacgagccacaccacgaaacgaatccaggtgagcacggacaggttgagcatcaaccagaagttggccacggcgatgaggatcggaatccacgggtcgccgggcatcttgaaggcgcgcggcaggtcggggcgcttcttgcgcataatcgggatggagatggccaccagcgtgaaggcggacagggtgccgatgttgaccatgtcggagagcacgccgatgtcgaagaaggcggccacgagcgccaccaccgcgccgacgacgatctgcagagcggccggggtgccatgcttgccggtcttggacaggccgcgcggcagcagaccatcgcggctcatggcgaagacgatacgggtcaggccgagcaacagcaccatgaccacggtggccaggcccagcacgatgccgaagctgatgatcttggcggcccagtcggcacccaccagttcgaaggcggtggccagcgaggggctgtcttgcttggcgagatcggcataggagaccatgccggtggtcaccacggccacgagcatgtacatgacgatgatgagcagcatgcccacgccgatgccgagcggcacgttcttgtgcgggttcttggtctcctcggaggcggtggccaccacgtcgaagccgatgaacgcgaagaacacgagcgccgcgcccgaaaggatgccgggaacgccgtacacggatggggtcatgccggtggcgaactgccacagcggctgggtcatcacgccggtgacggcggaggaaccttccacggtggaggccggctggctcggcggaatgaacggggtgaagttggaggccttgacgtagaagaagccgacgatcaccacaaagaacacgatggcgatcttgagcacggtcatagcaccgtccacgcgggcgccgatcttggtgccgaatacgagcagcgtggtaaagaacgccacgatgatgatcggggcgatatcgatatggaaggagccgaacgccaggttggtgttggcgttccagcccatcaggcgcatgaagtcgttgaggtatacgccccaatatttggaaatcacggagccggccatcagcatttccagaatcagatcccagccgatgatccaggccatgatctcgccgaccgtggtgtaggtgaaggtgtaggcggagccggccaccggaatcatcgaagcgaattcggcgtagcacatcacggctgcgccgcacacgatgccggcgatcaggaagctgatgatcacggccgggccggcgtggaaggcggcggcctgcgcgcccaccgagaagatgccggcgcccacggctacggccacgcccatgattgacagatcccaccaagtcaggttgcgcttgagcttgcggccctcttcacccgtttcggcaatggtctgttcgacggatttcgtacggaacagttgcatagtgctcttctttttctctgttgtttgcgcaccgaatgcgcacaataccgacaatcgagtatagaagagcccgcgtgtcttgtctattaataagacttagagtccgcaatatatgggattaatatccaactccatcaatcaatagcgcgattacagcacgccgacgcagaccggttcgggcaccaagtccactccgaacgcgctcttgaccgcctgctgaaccgcacgcgccaaagctgcgatatcggccgcgctcgctcccccacgattggtcaaggccagcgtgtgttgcgtggatagactggccggcgcgtacgcatcgaccttatatcccttatggcagccggcatggtcgatgagccaggcggcggacgtcttggtgccgggagtgccgtcaggcagagtcgcgtcgaacttcggcgcatcttcgggcagggccgccgcttggccggcggtcagaatcggattcataaagaacgagccgcagctgtggcgattgtagtcgggagcaggcaggccgtcatcgccaacgggaatgccggcggcctcattgagggaggccagacgctccagatcggtcaggatattggccccgcgcttggcggtggccatgtcgggcaaggcgtagcgagtgggatcctcaagcatgcccttggcggcacgtactgcgagcacggctttgcggatgtcggcggtggccatacggtcgcccacttcgacgccaagcgctttggcaagctgtccgtaacctaccgtgccttcggccgagtgggtcagggcaaaggtgacggagagcaccacgtaacgtggcgtcgggaagaatcggtcggccggctggccgggaccggcgtacatgctggccttcagtgcggagtatcgatagccgaatcgaagatcggcgggtgtgaggtcgcgcgttgttttggtgtctcgatcccagacttccaccgattcgaccgaagtggcgacttcctgtccgtaggcaccgatgttctgcaccacggaagcgccgactgtgccgggaatgccggacagtccctcgacgccctcgagcccgagctctacggtgaaggccacgaaatcatcccaattggcaccggcctcggcattgacatgcacggtgcgatcctcgccctctaccggtgcagcctcgtccggcacagtgatgaggcgtcgggcgtctcgaaccaccacgccgtcaaaaggcttatcggaaacaagcaggttggagccgccaccgataacgaccaagggcaggcctttggaatcggcatcctccacggcttcgatgagccccacgcgcgtggtcggctcgatgaaatgggcgatggggccgcccacgcccatggtggtgatgtctgcaaagcttgtcatgacttcctatcttagtggcgcaggtgcgatatcggggcaatcatcggctgaaacggcagaacgcgcgaggggttcgttcagacgcgggatttctgccgtttctcacgcgatgcggatactgattccgcaccctaccactcggctctggagtcaatacgcaaaaacccggccgaatgggccgggttttgtaaagctgtgatgcttgcgatcaacgagtctcgcggtgcacggtctgcttgccgcagcgcgggcagaacttcttgagctcaagacggtcgggcgtattacgacggttcttagtcgtaatgtagttacgctccttgcactcggtgcaggccagcgtgatgcccggacggatgtcggcgctcttagccattgtcattcacctctgtgttcttaggtatagtgcgcgcccaccggttagcgggcgcgatttgtagcgaggaagaggctcgaactcttgaccttacgattatgagtcgtacgctctagccagctgagctaccccgccagagagccccgagtgagaattggactcacgacctcttccttaccaaggaagtgctctaccactgagctatcggggcgtggcggatagtggattcgaaccactgaagcacgaagcggctgatttacagtcagctcc

SEQ ID NO: 2318 - DNA, 18375 bp, Unknown
  R119_18m  MAG No. k141_37137
tcagaccaagcccgatgaggaggtcgtggccggtggtcttgaagccgccaagccgttcatcaaggtgatttgcgaggctcaggacgagctcaagaagatcgccgccaaggagaccaaggagttccagctcttcccggagtacaccgacgaactgtacgcccgcatcgacgagatcgcccatcaggatctggacgaggcgctctccatcgccgagaagctgccgcgccaggaccgcatccacgagatcaaggagcacgtgcgcgaggtgctcgcggacgagttcaccgacatggacgacgccgagaaggacaaggaactgggcaacgccttcaaggaactgcagcgccagatcgtgcgtcgccgcatcctgaccgaggactaccgcatcgacggccgtggcctgcgcgacatccgcaccctgtccgccgaggtggacattgtgcctcgcgtgcacggttccgccctgttccagcgtggcgagacccagattctgggcgtcaccaccctgaacatgctcaagatggagcagcagatcgacgcgctgtccggtccgcagtccaagcgctacatgcacaactacgagatgccgccgtactccactggtgagaccggccgcgtcggctccccgaagcgccgcgaaatcggccacggcgccctcgctgagaaggctctcgtgccggtgctgccgagccgtgaagagttcccctacgccatccgccaggtctccgaggccatcggttccaacggttccacttcgatgggttccgtgtgcgcctccacgctgagccttttggctgccggcgtgccgctgaaggccccggttgccggcatcgccatgggcctcgtgtccggcgacgttgatggcaagcacatcttcaagaccctcaccgatatcctgggtgccgaggatgccttcggcgacatggacttcaaggtggccggtacttccgagttcatcactgccctgcagctcgacaccaagctcgacggcatccccgccgacatcctggccgccgctttgcagcaggccaaggaagcccgcgccacgattctcgaggtcattaacgagtgcatcgacggcccggctgagatgagcgagtttgctccgcgcatcatcaccaccaccgttccggtcgagaagatcggcgaggtcatcggcccgaagggcaagatgatcaaccagattcaggaagataccggcgctgaaatcgccatcgaggatgacggtaccgtcttcatctcctccgagggtggcgaggccgctaagaaggccaagtccatcatcgattccatcgccaacccgcacgtgcccgaggccggcgaaacctacaacggcaaggtcgtcaagaccacgtcgttcggcgctttcgtgaacctcacccccggcaccgacggcctgctgcacatctcccagatccgcaacctggccaacggcgagcgtattgacgccgtcgaagacgtgctcaaggaaggcgacaccgttgaggtgatcgttcagggtgtcgatgatcgcggcaagatctccctggccatccctggtttcgaggatcaggagaacaacgcccgcccgagccgtggcgatcgcgatgaccgccgtggcagccgtggccgtggtgaccgtgacgatcgccgtggcagccgtggccgtcgctccgatcgcgatgaccgtgacttcgacgatcgtgacgaccgtccgcgtcgccgtcgctccgatgacttcgaggatgattacgacgaccgtccgcgtcgccgtcgctccgatgaccgtgacttcgatcgcgatgatcgcgatgatgatcgtccgcgtcgccgtcgttctgccgaccgtgacttcgacgatcgcgatgaccgtgatgctcgcgactcccgagatgatgatcgtccgcgtcgccgtcgctcttccgatcgcgatgaccgtggcgatcgtgatgaccgccgtggcggtttccgtggcggccgtggccgtggctcggaccgcaacccgcgctacgccaccgacgacaactacgacgactaccgcgccgaccgcgaagagcgcactgagcgcccgcgtcgccgcgtccgtcgcgactttgatccgttcgaggactaaagccctctcacggatcggtcgcggcatagccgctccccccccacctacgggaagcccgcagggcttcccgcttaacggttcggcattcgaggactgatcgttctctagcttctctcgggtgagaagagcttaatcgcaaaccaaaaggcttctataccgtttcattcggtatagaagccttttggtttttcggcttcttcgcgctacatatttcgatgttgaatagggcactcgtgctgctgccatgtacattcagttgtcagttgacaactattctcatgcatcaagaatggcggaaaacagccattaagatgattggagccacgctaaaaagcgttgacaactgacaacagtttgtacacggcaccgcatggcacctatcctgttgctcacgaccggatctattctctcgtctgttgttatgcccaacagcaaaatccgcttgccgtgccgcgccatgtccgagtcatggccagccgttgattgaatggcggatgatcatcgaaggtactcatgggcgttgatcactgtggcaacaacaaaggccgggcccttgtgagagcccggcctttatgccgtatggcggcggattaatccttaaaggctaatccgttgtcaatcagcgttacagaatcgccatgcacacgaagtccagaatgaacagcgcggccacaatccagatgatcgggtgaacctccttggccttgcccttgcaggtcttcacgatgcagtacatgatgaagccgccggcgatgccgtaggagatggagtaggagaaggccatgaacacggctgcgaagaacgccgggatggcttcggcgatgtcgtcccacttgacttccttcagggaagcggccatcatgcagccgacgatcaccagcacgccggcggttgcggcggacggcacggcggagacgaccggggccaggaacgcggacagggcgaagcagatcgccacaaccacggaggtcaggccggtgcggccgcctgcggcgatgccggcggaagactcgacgtaggtggtggtgttcgaggtgccgcagatagcgccaatggaggtggcgatggagtcggcgaacagggccttgtccatcttggaggagaagccgtggccgttctccagagccttctcatcctcggcggagaagatgccggtgcgacggccggtgccgatgaaagtgcccagggtgtcgaacgtatcggacatggagaaggcgaagatggtcacgatgaccagaggcagcttggagacgtcggagaacagcgccgggaagccctcagcggagaagatcgcgccgaaggtctgcggcagctgggagaaggtttcgctgatggactgcgagttggaccaggtggtaacgccgaacgggatgccgatcacggtggtgatggcgatggccagcagcatgccgcccttaaccttcatcacggtgaacacaatggccagtacgaggccgatcaggaagacccacagcaccttgtcgttgaagtcggccagactcggggtcgccgccacggcgcctcccttggccgcggctttcgggtcgccgggggtgaacttgatcagtccgacgttcagcatgcccacataggccacgaacaggccgatgccgccgccgatggcgtgttgcagggactccgggatggccatgatgatcatcttgcggatcttggtgacggtgatgaggatgttgatcaggccgcacaggaacaccatgcacatggtctgctgccagctgaagccgaggccgaagcacacggtgtaggtgaagaacgcgttgaggcccatgccggcggcctgggcgtacggcacattggcgaacaggcccatgaccagggtgccgatgatggccgcgatgatggtggccaggaacacgccgccccacggcatacccgtctgcgacaggatctgcgggttgacgacgatgatgtaggccatcgcgaagaacgtggtcaggccggccagaatctcagtcgagacggtcgtgccgttttccttcaaatggaagaacttctccatttactctctacttccttggttttatgcggggctgcgcaccgcgcgcataatgctgcggctggccccggcgagaattgcgactcgccctgatcggcctgcccaacgcgcgtcaggcgctgcgcatccaatcagaaccgtggccgattatagcttgtggaggtaacgtgaacaggtccgggagtagactgactgccagaataattcggaacaactcagggacacgcagggcacacccgtggaaggaaggcgcgcgatgaaaccggccgtcgaagtcagcatcacctcttggaagaagaatgtcgtcaagcccggtcaggagtacggccgcgtactgctgatgcctggcaccggctacaactgcgaccgtccgctgctctactggtcggcccaggctctggtcgaggccggctggcgaatcgaccgcatgaacgtacgcaacgcttccgacgacctgtccacggtgattccggtcctcaatcaggcgattgacggctggatggccgccgcgcgcgagtccggcgcgggtaaagccggtgattccggggatggcgttgccgccgatgattctgctaccgtgctggccgatggcgcagctggctcgccgaaccgtgattccgacaccccgtccggccctcgcctgttgctgatcggcaagtcgctgacgacgatgacctacccacatgtggcctcacactacggtctgccgttcgtgctgctgaccccggtgctgcatcacgccgacttcgatccatccgcccgggtgattccggtgccggctgtcggcgatgatatcgtcgccgaatccgaggctccgagcgtggccgaagcaagggcgatcatccgcgcagaactggccgaccagtcgcacgccgccagctcccgatactccggcccggcaccgctgatctgcgccggcaccgccgacccgttctacgatcgagcccgcgccaacgcgctcaccccgcacgtgcacgaatacccggatgccaaccattcgatcgaggtgcccggccactggcgtcgctcgctcgactatctgaaggaagtcaccgcgtccgtagcccagtacgccgccacgttgtaatgccttgcgacacgcccgaattctgcaatgtcgctgaccatccgtaatctaatcatccgtaaaccacagaccgttggttgaagtgcgcgcgagtgcatttccgaagtttggttcgccaagccagcgcaggttgagagatataagcccgtcaagggccggcgaaggtcgcttcgcgagattatattgctctgcctgtgcgcagggcttttttgttgcccggccgaaagttccgaactccaagtcaacggccgacttaggaaggaacgccatgaagaggcccgaaaaggaagcggtagtcgctcagcttacggaagaattccgtaacgctgacgccgtctacctgaccgagtaccgcgggcttaccgttccgcagatttccgatctgcgtgaaaagctaggccgcgatacttcctacaccgtggcaaagaacacgctggcacgcatcgccgccaaggaagcgggcatcgagggtctcgacgagattctctccggcccgaccgccatcaccttcgtgaagggcgacttcatcgaggctgcgaaggtcatccgtgacttcgccaaggacaacaaggctcttgtcatcaagggtgccgccgctgacggcactgtctacgatgccgagggcgccaagaagctggcagacctcaagtcccgcccgcagctgcttgccgaattcgccggcgacatcaaggcatcgatggccaaggccgcgtacctgttcaacgccctgcctaccaaggctgtgcgtacgatcgacgccctgcgcgaaaagcaggagaaggctgcctgatttacgccctcacggcatgaatcagtcgcttcgataatttaaacaataaggtttattaggcagcggatctaccacttcgtccgccgccaagattgaaaggaagccataatggctaagtacaccaacgatgagctgctggaagccttcggcgagatgaccctggtcgagctctccgagttcgtgaaggccttcgaggagaagttcgacgtcgaggctgccgctccggttgccgctgttgccgctgttgctggcgctgctgctccggctgaggaagagaaggatgagttcgacgtcatcctctccgccgtcggcgacaagaagatccaggtcatcaaggctgtccgcgccatcacctccctcggcctggccgaggccaaggctctcgtcgacggcgctccgaaggccgtcctcgagaaggccaagaaggaagatgccgagaaggccaaggctcagctggaagaggctggtgcctccgtcgagctcaagtgatttgtgcggcataagccgcaatcacagcttttcgaggaaccccgcacctgtgtttcaggctgcggggtttccgcatactgagtagactagttgacgagggcgaggcggagaacgcgatccgacgtggaatcacaaagctggcaatgagcgaaagttgtcaattctgtgcccagtaatccgccaaaagccggtaaaagatgacacaatggcacgtagtgtggtcaaatagtgtgtccaggaaggcggtcacggtgagcgagtggacggtgaagatcaacggtgtcgaccggatcagcgtcaagccgggggagtgcgtggaaatcggccgtaagccgttacgcccccttgccgatgatggcaacacccgccttgacgtcgccgatcagaccaaatcgatgtccaaacggcacgccatgttcacggtaaaaagcaatggtacggcttcggtccgcgatcttggatcgaccaatggatcgtatgtggtgcgggaaaatggtgatttgttgcgcttgccggccaatgtcgagttcctgttgccgacgtctcccatgcgcatgcagttcggtgatgtgcctgcggacttcattcgtatcgacgatccagtggcaaagccactcgaccttaaggtgcctgatttgtttggctatgcggttcacgaagcaccgcaggagccggatgcggcggatatgtctgtcgacgatattcttgatttgcgggccggcgagccgaccgccatcttcagcgcggataatgttcgacgcaaggtcgacgagcttgaacttggctcgctgaatatcacgcagccagtgacgaaaaacgatgagccggccataccccgtgacctgttcgcggatgcgttggcccagcatgccgagcaggagaccgaacgcaaaaaccagcaggccatggactccgtggtactgccgaagcagcagaccgaacctgagtcgacgactgtaacgcccgcatccaagcacagcaggatctccggtattgtcccggtagatgccatcgcccatgccgttgttaagcacgctcccagcacaagcgagccggcagtggcgtcggcggcggttgttgaatccgatgtggtggctggcgcaagcaagtcagccgaaaacgttcagtccgctccgaataccgacgattctcagccggtggacgctgttgcacagcattctgaaggcactcagtccgaagccgcccagtctgaaaacactcagtctgagaccgcccagccgacaaccacccagcctgaaaccgctcaaccggcaaccgacgcacccgaggatcagcagctggcgaccgaaaccgaaaccgcccagcagtcggtctccgaagcgtatgaagcgtctgatatctactccacgggcgtacacactccggtcttcgagcccggctcggtgttcgagcgtgtggccaagggcgagctgaaagcacaggagccggcagtcgaagtcgatggcctgacctctgacgaggcaaaaaccacgcaagatttcaacgttcagttcgaagtcgcccgtcatcccgaattactggcgttcctcgccatgaatccgtacctgtacgacgacatgtattcttggctcgccgcccgtggcgaggccgatattgacgaagccctgtctcacaacaagggctatcaggaataccgcgaagcggttggaaagtgagtcgagagatgacccagagccagactcagaaccagaatctcacggaaggtctgaatcgcatccgtcgctggcgtgaccaataccgcagcatgcagccgccatcgccgctcgaggatgtgaatcaactggccgcgaagctggagatgacccatgcccatccctccggcatcgcccagctgttcgcttccggccatgttcggttggattcgttgttccgtgacacgggtgtgcttaaggccgccgaacgccatatcgggcgcgtactggatgaccaggccgccaagcgcaggatttccggcgtggcggagttgtcgctcgtggttggtgtggccacgtggaggggcaacgcgctgccggtgctgttgtacccggtgagcgtcacgatcgaggatgatggcttgtcgaccaccattcgattcaccggtcgcgtgaccctgaacgccgcgttcgtcaatgcattgcgtgagcagggggtgttcctggatgaggattccctgtttgacggtgccagctatgacagtggcactcccgaaacttccgcgatgttcgcccgtatttcgtccgaagcatcggagcgtatctccggcttcgccatcgagcgccagattgtgctcggatgcttcatggacccctcgtcgcagatgatcagcgaaagccgacagttcatcgaccagctggagaatggccccaccggcaatgtgctgttggacgcgcttgccggcgacaaatccgcccgcaccgcgctcaaagatgccaatattccgcaatacagtcctttcgacgtagacccgcatgccgagtacgaagtcggcgatgtggacaatacggtgcgatatgccgcgtcacttgctgccaatggccatagcatcgtggtcgacggcaccttcccgaagggcaccgcggagcaggctgtggccatcgcatcgcgctgcctgatgaatggtcgttccgtgctgtacgtgcccggcgtggccgagcagaagcgtctgttcatccagacggcctccgccaatgagatgaaggcgcaggtactggatgtatccgatgaacacgccaacgccgcgcttgataagcagctgattgccgcagtcggattccagcccggagtcgccacccagcgattcgaccagctggccgacgaactcgtgggcgtgcgctcgcgcttgacccgctatctgggcgacctgcacgggggcaacgataagtggaatgtgtccgcatacgagaccattcagaacctggcccgtatctccgtgctcccgacacaccccgccacccacgttcgacttgacgagtcaagtgccctgagcatcgccaacgatattgacacatggatcagcaagatggaacgtgccggcgagctcggcgaatacaccatcggcccggaagacaccgcatggtacaaggcgtccatcaccactgaagaacaagcggtaaccgcttaccagcgcgtggacgatttgctgcgtcgcttcctgcccgccacccgtgagcaggtggcacgcaccgtgcagacctgcggattcccggttcctcccaccactcgcgagtgggagcgtcaggttacggttttgaagaatctgcgacgagtgcttgacgtgttccagccagagattttcgagcgagacatcagctccatgatcgaggccaccaagccgaagagccagcgcaaggccgagggcacgtcgatgggattctgggagcgccgccgccacgtcaaggaagccaaggatctgctgcgcgtcggcgcgcaggtcgaggacttgcacgaagcgttgaaggtagtcgccaagcaaggggagcagtggcatcagttcgtgcctcacggcggttggccggtgctgcccagcaggctcgacgagatcatctccacccaagaggcgctggtcagcaatatgaccgcgctggataccgtgctttccaccacacccgctggtggcaatctggaaaccgccgatttcgagaaggtggaagcacgcctgaaagcactgctggatgatcgcaaggcactggacaccttgccggagcgttgcctgctggagcaggaattcgcttctgccggtctgaacgagttggtcgccgatctcaacgctcgccgggtgggcgtggagcaggtgcgtggcgaagtgcagctggcatggtggaccaccgtgttcgaggacattgtgcgttcttccgccatcatctccaaccaggatggtgccgcgctgcagaccgcatccgaccgcttcgcacaggtcgatgtggagcacgtgcgctccatcggaccgatggtgtcgcaggaatccatgcgccgcctgtgcgacatgctgttctcccgcactcaggaagccaaccagatgcacaccgtgctggcagggcgcgccagtgtgtcgctgagcaggattcgccgtgatcatccggagattctggccgcggccaagccgattctggtggcctcgccgggtacgctcgccgcactcaccgagccgggtgtgctggctgatgtggcgattctcgatgcgtgcgcgcacattcccgctatcgagttgctgtccatcatcggccgcgtgcagcaggtggtggtgatcgcccactgcgcgacggtaaccagcgaaagcgtcaagcagctgatcgacacgttgcctcatatcgaggtggatgctgccccgtctcgccgtgcgccgcgcctgtccgcattccttgaatccgagggatatggtcctgttcgctatgatgtggccaccgagccggctgccggtgaggtgcggttccaccgtgtggaagcgagcggtgtgccggttatgtcttctggtctggtggaatccagccagtcggagattgatgaagtggtgcgtctgattacgcaacgtgccgccggttttgctgtggttccttccagctatcgacttgtggtcgtgatgttgaccgacgcattccgcacacgcttgggtgccgaattgaagtcgttggcaggcaaatccaaggcgatgggccgattcctgcgccatgtgcggctggtttccttgcgtgacgtggccggaggtcgtgccactgacgtgattctgtcgatgtgctatgcgaaaaccacgcacggacgtctgcttcagcagttcggcccgctcgaaagcacaggcggtcgcggactgttgctggatgccctggcattggcggaccacagcttggatattgtgtcggcctttggttccgaagatttggatgaagaacgactgcaccagtccggtcctcggttcctgaagaccatgttgacgtgggccgaacagcttgacgaccgtccggtgcttccgttgcgtgatgcggcaggcggcaacgtgctgttcgacgatatcgccgacaggttgcgcgcgcgaggactgaacgctgctgttgattatggattcgacaagggcgtgaagattccgctcgtggtgggattgaaggacaagccgtttgccttggccgtgcagaccgatgacgcgaactttatgtccgtgcaatccacgcgcaggcgtcatcgtttgtcggcacaggatctcatttccttgggctggaatgtgatgaccgtctggagtgtcgccgccttcgtgaaccccgataaggaagtcgaccgtatcgtcagccgtatcggcgagatctaccgcgaggttgaataatcatggcggaatactcggctacacggcgcacaccgcgcaagcacaagcgcgtggtgatgaaaggcactgagcagtttgacgctgacggcgtcaaactcgagcccggagacatgcagaccgaccaacaacggcaatccgacgacgacaaacgcatcctcggcgaactgcctccacactgggctgttttcaacgagcgcgagtaggagttgaggcgcactctgtgcgctctgatgttgtgttttccccagccgtacggctgcggaaaacacaacaacggccgaaggccgattccgcttcctaccgcacaacggccataatcgctccggcctgttgcagctccataaccttggccgcggcctccggcggcattgcgaacgacaccagtcggtcgttgcttcccaatgcgccagtcgtatccggtttgtcgacattcatcaccgtggcgttctcggccagcgtgcaatcggcaccttcgcaaccgacggcggaaaccagtctcacctgatcgccggccaatacatcgtcgacgctactggccaagcggacttcaatcaccgtagtgccggtcggtgctacgggcgcatctctggccatatgcgtggaaatgggatcggctgcttcgatatcgatttgcgccaccttgcccaccacatcctcaatattgcacgcccaagatgggcctatcgcagataccggcatatcagccaactgaacgtcggcggccagaataatgtcaccccgtcgaatcgagcgagcggccaccaccatcggctcggtctccaccacggccaatacggcttcaagcccaaacaacactgcgagtcccacgcacaacgcagcagtgagtcggcgcaaggcatccgccatgcgccgtcgccgcaatgagccgcgcgcaggcggcttaataaacgaaaaggtcaccatgcaaccatggtgacctgaagtttttcgtaagcgcaagctgaatcgacctatgtggttctagcttgccaagttatccacaacgcttcaaacccgtgcaacagacagtgcccgtagtgccaatatccgcggcataccgccgtcgacaccgtcgtttacagaggaaaaacggggagccgaccttacttgccggatttgtcggtgcggtagaatccgtgacccttgaactcaatcggcacggcggaatacaccttgcgcacctgctcctgcgagcacttggggcacacggtaatcgggtcgtcattgaacgactgctgttcggtgaagtcatagccgcagttcttgcaacggtaatgataggtaggcaacggattcctccaacaaagtcatatttctcgcgcatggcgtgcaacaccatgccgtgcaaccgttcatatcctagtcgccgccctgacacattggcgttacggtcttactggccagcctgcttttgccactctggttccatcggccagtgtgcgtggctggttggtcagtctggcttgcgccgagtatcttggccggccggtcaactcagccggcccgattcgccaagccgccggtatccccccggcgtcagcactccgtcggccggcacatcatgtggttcggccggcaaatcggtgtccaacacctcccacggccagcacaccgcaatcagggggcacgcgggcttgcgtcgagccaaggcccggtcataccagccggctccacgccccagacgattgccttgcgggtccactgccaaagccggggcgatgaccagatcggccttctccaacgcttcgggcggtagaactgcgccagttggctcatcgggtctgtgatggacggtgctgggagagctgcagctaccggcattgttcgcgccacccactgcatccatcgagcgcaaggattccaatgaatccagcacactccagccaatttccaacccagatcccaatcgtggcaccaacacgtggcagccatgagccaacagccatcgcaacagtggccgggtttcgatttccgaacccatcgacacatatgccgccactgtggaaccatcctgaatcatgtgtaccgggaaccgtcgcaccagcaattcaccggccgctccacgttcttccgctggaatgcgcttgcgccgagacagtatatggtggcgcagcgtcgctttatccatcttttctgttttctccgtgccgctgtggtcgctgccgatattcatgccattgtccgcttcgctcataccgcacaatctagtgtttccaccgtaaaacgaaagtggccgaggcgaaggcgcaagcccttcatatggctacaataaaggccgtgtcagttttccagtcgattaaagaggcgttcaagctggaccaccagatccgtccgccgcgcctcacccatcccggtttcccgataatcctgcgccccctgaccatggacgatgaggacggctggaacgaagtgcgctggcgcaacaacgactggctggcgccttgggaatccggcgacccgatgcatggcggctccatcaccttcaatcaatgggtgcagcgacagcgccgtaatgagcagcatggcgtcggcgtgattttcgccatcgaataccagatgcgtatcgtcggccagatttcgttgggagccatcgcgtatggtgccatgcgcaccggtgtggtcggatattgggttgaccaacggtacgccggccacggatttgcgccgatggcactggccatgcttgccgattgggcactcggagacccattcgggcccgcgttgcatcggctggaaatcgccattcttccggataacgcgcgctctttggctgtagtgcgtaaggtcggagcccatcatgagggactgcgcgagcggtatatgtatgtcaatggccagtggcgcgaccacgtaacatttgcgctgttggctgaagatatggggcaagggttctctgccagactcgccgccaccggttccagataagcgtcgaccggaagaattccgctccgacacgcccggacggaaagccccagttcgtcggtacgtctcctatccttgactctatgggttatgagtcactgagcactgtcgtcgtgctggtgattgtggcgattattatcgttgtatggctgcccgtacgtacggccaacggcatgaaacgtgtggacgagcaccggcaggatcgttattcgccttccctgcatatcgttgatgcagagaacggcagacgattcggagacatcaagccgcataaggcgaaaggggcagcaatgccagcatcaacaccgtcagcgaggctgacacctgagcacatcgcccatgtgcgggaactgcgccgcgcggccatccgccgccggcagattctcgccgtatgcctgcttgccataaccgtgttggtgtttgccgtatcgttccccctgcatttcagcccgctgcttgctcttattccgttcgtgctgttactgctggtgctggtgctgggagccaatgcctcacgccaggcccggcaatgggaacgcaaggtggtccgctacgagcggactcatagcggtacgggctggtccaagaaaccgtctgccgagtccaaggacagcaggcgtgtgaacaaggccgaaccggttgcggccgtaactgcgcctgccaaggagctttccgagcatgttgaggatgctgccaccgaggtcatggaacagcggcagattcgccgcgcgttacgcgatgccgagattgagcaggccaaggccaagtcgttgcgtcagtccgccgccgcatatcaggccgcggcggagcacgccaaacagtctgagaagtctgatactgcacagtccgccgccgataagcctgccgccgaaccgtctgctatggtcgatgaatccgctgaccgtaagtccgctgccgaaaccagtgaatcttccgccgcgcccgatgcctccgctcgcacggataagtcgactaagtcggataagtccgtcgcccctcgagttgaaccatcgcttacggtgcgtgacgagcgtgatgagcgcgacgatgccgctgccgacgctacgtcggaactggtcagcgtacgccctgcccgagcactggatgtcttcgatatggccacctcgcaggatctcatctccttcactttgggcggggaacataacgccgacaacgctccggaaagcttggagatcaagtcgacccgtcaggtgtccaaggcggaacctgtcgaacccgcagtggcggaaaagttgattgacgaggcccgagccgtcaaggccgcggacgatgccaaggccgccgatgcgggcaaggctgtcagtgccggaaacgctgtagacactgagtcggagcagcgcgatgatgccgatacgaacgccgctacggacgccgatgacgaggctgcaaacgccgcccagcgagccgcattccacgaatccgaggagcgtgccgacgtcgaagcgccagcggcgaccaccgattcgttgggcgcaggcttggactccattcttgcccgccgcggcaactgagcgttgcgattcgccgattttctctcacagcgttagcactcgagttggcagagtgctaataatcgcgctacgatgtgtcctagcgcaaagggacaacgcaagtgatcgtcagcctcttgaggcgttctggcgcggcattatcgaactacaagtagatacgaggtgacccacagtgtcgattaagctcacaccgttggaagacaagatcatcgtcaagcaggccgaggcccagacccagaccgcttccggtctgtatattccggacaacgccaaggagaagccgcagcagggtgaagtcctggccgttggcccgggccgtcgtgacgacaagggcgagcgcatcccgatggatgtcaaggtcggcgacaaggtgctgtactccaagtacggcggcaccgaagtccactacgagggtgaggactacctcatcgtcggcgcgcgcgacattctcgccatcctcggctgattagtcgcctagcgaacttcaacaaccccgactgttcccacgaacagtcggggttttctcttgtcaggcggaaaggggctcccctcagagaggggagccgaaaaccgctcccgccaaacgcccagccatgcctgctatgcataaaggtgcatgcgcgcagcgtagttgagttcggcgttgcaccgcatctacactgggtaacggattggggtccctatggaagaggctcagtcggcgacttggccgagcggcttaagacattttgcacaagacggcagtaggtcgacggtatgttgttttttttccgtgtcgcaggttcgtggtgtcgtcgctgtgccaatggttgtctctctaccgacgctgagtgccgtggcatgaggccagcgtcggcagtgggccacgaaatggcgatgtgccgatgctgagccgcgttggcgtcgttatagggccagtttttggaccattgccgacggcaaatcggcgttttgtgtcggcgacggtccaaaaactggcggtctgccgacgataagtgccgtcatcgtcggcagaccgccaggtattgtccctgtgccgacgtaaaaagccctgccatcgtcgtcaccgagccatcttgtgactccctgacggcggcagcagggcggaagaggccgaaatcatgcgcgcggtgcggtctcacacctcgaatccggcctccaccagcgcgtgatcgatgtcgcgaatcaaatcgtccgtatcctccagacccacggccagacggaagaagccgcggtggaactcaggcgggtacaggtactggcgctcgtcatcctcaccgaggaacacgatcagcgattagtcatggccgagcgagacggcagacgtaatcacattgagcttggaaacgaatcggttgtgcccgtcgtggtcggtgtcgaggccgaacgacagcacgccgccgaacccggagtccgggcgggccagctggctggccgccacctcgtggtgcaggtgcgattccagaccggggtacgccacgaaacgcaccacatccagcgattcgagatgcttggcaatcgccaaggccgaggcgtcgtagggcagcgcgtaggtgttcgccagcgtgatggggcgacggatcgcgccggtttcggcgtcgaccccgttgccgaggtgaatggccagcgtgccgaatccgagcggctggtcgtcgaatgattgtccgtgatgtacaagatcagaagccatgcgcccagcatgccggcatgcgctgtgccgccgcaagcaggcgacgccactcgaaaaccgcgccattgcaaggttctggaacaccatataagaaaaatgattggtagaagtgcggggtgcagccttggtcggggctgtttgcagggccgaagcggaccctgaaaccacgctgtgagacacgccgataaaaccgcagaattccgcggtaaaacaaggttcgcgtagaggtcgatttgcgtacttggaaaatatgtggttatatagccaagttgcctgttgaggtcaaacaccgcggcgggaaacagactggcggatttcccaagcggtcaaagggagctgactgtaaatcagccgcttcgtgcttcagtggttcgaatccactatccgccacgccccgatagctcagtggtagagcacttccttggtaaggaagaggtcgtgagtccaa

SEQ ID NO: 2319 - DNA, 18186 bp, Unknown
  R119_18m  MAG No. k141_38334
agaccagcaggttcatggaggcgatcggcttgcgccacggaatctcgcggacggtagcctcaagccacttggcgtgctggttcagcatggagtcgatcacgtggacgaaggactcgtaggagctccagatgccgtgacgaccggtcagcaggtaggcctcgaggaagccttccatctggtgctcggacagctgctcaacgacctggccggagacgtgcatgtgctcgtcgacctcgtcggagatgtagccggcatcccactgcttgttggtgacttcgtaggaagcctgcagacggttggaagcggtctcatccggtccgaagatgcggaagtcgcgcgggttgttcttgatgatgtcgcgagtgtaggcacccagggtacgggtggcctcgagctggccccagccgtggccgtactcagccacttccttgacctcgtagtcctcgaggttcggcagcttcaggtcgtcgcgaatcacaccaccgttggcgttcgggttggcaccgatacgcagctcacccttcggcatgaaggcaaggacgtcgtccttgacagcgccgttggcgtcgaacagctcttccggcttgtaggactcgagccagttcttgaggacctcgaagtgggcctcggtgtcgcgggcggaagccagcggcacctggtgagcgcgccaagagccctcggtcttcttgccgtcgatgtacttcgggcaggtccaacccttcggggtgcggaagatcagcatcgggtagaacggacggtgcacgttgtcggtctgagcggcggccttgatgtcgcagatctcgtcccagatggtctcccacagctcggcgaagcggcggtggatggacatgtggtcctcatcatcgaagccagcgacgaactcgtagggctcgtaacccatgccgtggaagaactcgtggagctcttcgtcggagatgcgggacaggatggtcgggttggcgatcttgtagccgttgaggtgcaggatcggcagcacgataccgtcggtgcgcgggttcacgagcttgttggactgccaaccggtagccagcgggccggtctcagcctcgccgtcgccgacgatggccgggacgaacaggctcgggttgtccatgatggcaccgtaagcgtgggacagagcgtaacccagctcaccaccctcgtggatggagcccggggtctccggagcgaagtgggacggaataccgcccgggtaagagaactgacggaagaacttctgcagaccagcttcgtccttggtgatcttcgggaaggtctcggtgtaggtgccgtccaggtaggactgggaggtaccggccgggccaccgtggcccgggcccatgatgatcacggtgttctggccgtggtcagcaatgaaacggttgatgtggccgatgaggaagttcaggccaggggtagtgccccagtggcccaccagacggtgcttcacatcttcgcgggtgaagggctccttcatcagcgggttggaacgcagataaatctggccgatggaaaggtagttggcaacgcgccagtacttgtcaacgccttcgagggcttcctcggaaaccggagcgttgagcttcttccaaggggtgccaataacaggactcgtcatgtgtactcctgtactcctgcacgtgatcgtgcgattgattatttctgttcggtcacggttcctgacccttgcggtgccaaggttttccgttcccaatcaatcgtcatggtacgaggacaacgcgacttttgaacgatttcttgcgggtgtgttcgaaattgttgcggaaatttcagtatttgtgcggttcacctgaccgtttgtcaacattagttttttcaacatactttttcagaacggcggaagcatgcggaaatctagcatctgactagaacagcgcacgttcgatttcccatgttcgaaatcggcgtgttgtccgactacaggcatgtagtttgttcgatttgcgcacatagtccctgcgtgtcggccttgtcgccttgaccagtgataatcaggggtgttcagcccacgtaaaattccaatgaacgttaggggaatatcaatggcaaacggtcctgtgcttgtcgtcgacttcggcgcccagtacgcccagctcatcgcccgccgcgtgcgcgaggcaggcgtgtactccgagctggtccctcattccatgccggtcgacgagatcctggccaaggatccgaaggcgattattctgtccggcggcccggcctccgtgttcgagcccggcgcgccgaccatagataccaaggtattcgaatccggtgttccggtgcttggtatctgctacggcttccaggtcatggcctatgagctcggcggcaaggtggataaggccgctctcggcgaatacggcaagacctcagccaccatcgacgacgccgacggcatcctcgccgactcccccgccgagcagaccacgtggatgagccacggtgtggcggtcgaacaggccccggccggcttcgaagtgctggcccacaccgaaggcgcgcccgtggccgccatggcggacgaatcccgcaagctctacggtgtgcagtggcacccggaagtcaagcactccccgcttggccagaagcttatcgaaaacttcctgcaccgttgcgccgcgctgcccaacgactgggacgcctcctcgattatcgaggatcaagtcaagaagatccgcgagaaggtcggcgacgccgaggtgatctgcggcctgtccggcggcgtggactccgccgtggccgccgctctggtgcacaaggccatcggtgaccagctcacctgcgtgttcgtggaccacggcctgctgcgcaagggcgaggtcgagcaggtcaagcacgacttcgttgccgccaccggcatcaagctcatcaccgtggacgcggccgacgacttccttgaggccctgaagggagtctccgagccggagcgcaagcgcaagatcatcggtgagaagttcatccgcacgttcgagaaggcccagcgccaagtgcttgaagaggccggcgcgcgcggcaaggaagtcaagttcctcgtgcagggcaccctctaccccgacgtcgtcgaatccggcggcggcgacggcgcggccaacatcaagtcccaccacaacgtcggcggcctgcccaaggacatcaagttccagctcatcgaaccgctgcgcactctgttcaaggatgaggtgcgcgccatcggcaccgagctcggtctgcccgacgaaatcgtctggcgtcagcctttcccgggcccgggtctgggcatccgcatcatcggcgagatcaccaaggagcgcctcgacctgctgcgcgaggccgacgccatcgcccgcgaggagctctccaaggccggtctcgaccgtgacatctggcagtgcccggtcgtgctgctcgccgacgttcactcggtgggcgtccaaggcgacgagcgcacctacggctcccccatcgtgctgcgtccggtgagctcggaggacgccatgaccgccgactggtctcgcgtgccctacgatgtgctcgccacgatctccacgcgcatcaccaacgagtgccgacagatcaaccgcgtcgttctcgattgcacgagcaagcctccggccacaattgaatgggagtaattgctctctgtgacgaatgggattctccatcggggaatccctttttttgttgccgacgatgcccggtataatttttccgcttacgacgtcgtccggaaagggatgccgacctctttgcgccagggattcgacaacgaaaaatacatcgaactgcaagccgccaacatctcaacagcgtgaaccgacgcttgcactcggatgaaacgctgattgcattgtcaatcaccagcgccaccagtcctgtggccgctcgcgtcatcgacgggctcaaacagttgcagggctgcgacgcctttttctccgttatcatctcatccacggacgaggcgttgtatcgcaaactcggcatcaacgtgtgctgcgaaccgaagtacgaacgggtgagtctgtatcaccggtaaacgccaccgataagcgcggtatgccgcgaatcgtcaagccggtaatcatgcagcatgcggcctgacgattcgctgctgtcgcattgtctctcccctcgaccatgctgggcttgttttccgtttgttggagagaacgggggatgccattagcactacggtgagagaaggattatccgtgaatcggttcgtgggtctagacggtattaaaggactggcgctgatagccattgtgctataccactgcatgcagcaactgctgccaggcggattctacggagtcgacgtgttcttcaccgtctctggattcctgattgccgtcagtttgattcgttctctggcgaaaaccggatcgctgaatctcgtgcgatatatccccaagcgtgcagtacgtctctatccggcgctgtttctgctgattccggtcaccgtctccgtcggctggctgctcgatcacgacattctagtttccatccgcgaccaagtcatcaccgtgctgctgggctgctacaactggtacgccattgccggaggccaaagctatttcgaccaaatgaacccgcaggtgtttcgccatctgtggttcattggcgtgctcatgcagttctacgtcatcgtgccgttcatcgtctggctgatgtggaagctccgccagacgaaactgccctcactcatcccactgggactcgcggcgttcagcagtatcgccatgtgggtgatgtacgtgcccaagggcgaccccacccgcgtctacttcggtactgatacccacagcatgggcctgatgctgggtgtggctctcgcctggtgggtcaccgctcctcagttgggccacgctcgtcagggagctgtgccgatgccccgcaccattagatcgagcgctgcggccgtcgcacctcgggcttcgttacctcggattcctgtaaagcatcgcatctggaatgcgacggcaccggtattggcgttcctcagcctgattgccttggtcaccatgacggttatcggcaaacaggatgcattcgccttccgcggcggcatcatattgtccagcctgttgtccgtgctgctgattgccggtaccatctccgacgattcctggatgcaaagcctcatggtgttcaagccattggccgccctcggcaagtattcgtacggcatttacctgtggcactggccgttgtggattctttccagcgcccttgccccgaagatcttcaaggcagcagggccttggcctctcatcatgaccgcgttgctcaccgccattgcggtgatgatttcctggctgatggtggagaaaccggcggcaatgcactcggtgatatccgtcgtggtgccccttcgcacgaacaagaagaatcatgtggcccgggttattgccgttgacgttatcctggcgctgtcgttggtcggctgcgcgcagggcattactcatgcacctgcgaaaaccgccatgcagatccagctggagcaacaggccgcacaactggaacgcatacagaaaaccgaacacgtgctgctgcgccatgccgtgccggcaccgcccaagcccaagcatgagatgcccaccggcgatcagattaccgccataggcgattcggtgatgctggcctcatcacagggcctttcggaagtcttccccggcattcagaccgacgcgagcgtttcccgctccatcatggtcgcccccgaactcatcggcaatgatctgtccgccggcagtctgcggcaatgggtgctgatcggccttggcaccaattcggcaatcacccctgatcagctggaccagattcgtaatatgatcggccccgaccgcgtgctggtactggtcaatgcccacggagaccgtacgtggattccacctaccaaccaggtgcttgccgactatgcggccgcacatccggacaatgtggtgctggtggattggaatgccacagccaacgcgaacgcgcaggtgctcggctccgacggcatccacccgagcatggatagcgatatctatgcaaaggcggtcaaacaggccatcgaacaatggatctcaagcggcaggtgaacggcaggcaacgctgagttgtccaaccggtcgtgaagaacggctatgctgaagactgcatcaacgagaccacacgttgggagacatggtgagcgcaatccttgaagggaagcccgataagaatcttattctcgttacgggaaggattcatccgaagttggctgaggatgtcgccgagcagctcggcatcgacgtccttgaaaccaccgcatacgatttcgccaacggcgagatgtacgtgcgctacaccgaatcggtgcgtggcgccgatgtgttcgtgctgcaaagccactacaaacccatcaacaaggcgatcatggagcagctcatcatgatcgacgcattgaagcgcgcctcggcccgttccattactgcggtctgcccgttgctcggctactcccgtcaggacaagaagcaccgcggccgcgagcccatctcctgccgtctggtgttcgacctgctgaagaccgccggtgccgaccgcatcatgtcggtcgatctgcatgccgcgcagtcccaaggcttcttcgacggcccggtcgatcatctggtggctatgccggtgctggtcgactacatccgtgatcgtttccaaggccatctcgacaacgtcgccgtcgtctcccccgacgccggccgcattcgcgtggccgagcagtgggcgcagcgtctcggcggcggtccgctcgctttcgtgcacaagactcgcgacatcacccgcccgaaccaggcggtcgccaaccgtgtggtcggcgacgtcgccggcaaggactgcgtgcttgtcgatgacctgatcgacaccgccggtaccatcgcgggcgcatgccacgtgctgcaggacgcgggagccaagtcggtgaccgtggtcgccacgcatggcgtgctctccggcccggccatcgagcggctcaagaactgcggtgcgcgcgaggtcgtgctgaccgacaccgtgccgattcccgaggaaaagcgctgggatggcttgaccgtcctgtcgatcgccccgctgctggccagcgccatccgcgccgtattcgaggacggctcggtcgccgaactgttcgacacctaccccgagcaccacggtcaaggcttcctgttcgcctgatcacgtgcgtgtttgttcaaggaaagcacacgatgcgagacgcgacatggcgtagtctttcggtaaataccgacagtatggtataaatgaacacttgtgggccgaaagcccacgactcccccatggtgtaatggcagcacacgggtctttggaaccctttgtcttggttcgagtccaggtgggggaacggctgacggccgctcgacatccgggcggccgtctattgttttgaggtgtttccaccctcaatagacattccgatcgaagggaatacgtcagttatggcattatccgcagccatcgtcctcgccgccggcgagggtacccgcatgcgttccaacaagccgaaggtgctgcatacttttgcaggcaagaccttcctgaacagggtcatggattcggtgaccgccctgaaccccgacacgctggccgtggtcgtgcacttccaggccgagcgcgtcgccgaagccgcccgctcctatgacgagcaggtcaccatcgtgaaccaagacgacattcccggtaccggtcgcgccgtgcagtgcgcaatggcacagctcaccgaggctggcaaggtcgatggcccggtgctgatcgccgcctccgacatgccgctgctcgacagcgagacgctgcaccgcctggtcgaattccacaccgcctccggcaacggcgccaccgtgctcaccaccatcctcgatgacccgaccggctacggccgcatcatccgcgatcgcgaaggcaacgtgctgcgcatcgtcgagcagaaggacgccaaccgcagcgaactcgccgtgcaggaagtgaacacctcggtctacgtgttcgaggcttccgtgcttaccgaggcaatcgccggactgaagtcgaacaacgcgcagggtgagttctatctgaccgacgcgctggaaaccgccaaggccgctggcaaggtcggcgcgttcgccgctccggatccgctcaccgtcgaaggcgtgaacgaccgcgtgcagctggccgcgctgtccaagacctacaaccgccgcgtctgcgagcgctggatgcgcgacggcgtgaccattcttgacccggaaaccacttggatcgaggacgatgtccagatcggccgcgacgccaccatcctgcccggttccttcctgcaaggccacacggtggtcggcgaggacgccatcgtcggcccgtacaccaccctcattgacgcaaccgtggacgaaggtgccgtggtcgagcgttcccgcgtgcaggaatcgcacatcggcgcacgcacgaacatcggcccgtggacctacctgcgcccgggcaacgagttcggcgaggatgccaaggccggcgcgttcgtcgaaatgaagaaggcgcacatcggcaacggcaccaaggtgccgcacctgagctacgtgggcgacgcccagctcggcgaccacaccaacatcggcggcggcaccatcaccgccaactatgacggtgtgcacaagaatcgcaccaccatcggctccggctgccatgtgggcgccggcaacctgttcgtggccccggtcgaggtcggcgacaacgtgaccaccggtgccggctccgtggtgcgccacgccgtgccgagcgacacgatggtctactccgagaacacgcagcacaacgtcgagggctggaagcccgcctgggagcgctgaaccatgcccgcacttcaggattccatcaacgccgtccgcgtggccgccgaggccgcagaccgtatcaaggccaccgacattgtggccttcgacgtagccgacctgctcggcatcaccgacatcatgatgatcgccggcgcctccaacgagcgtcaggtactggccgtggccgaggaaatcgaaaaggacctgttccttaagtgctccggccgtcagccgcgctctcgcgagggcctgaccgagggccagtgggtgctgcttgactacggtgatttcgtgattcatgtcatgcacgaggaatcgcgcgaattctacgggctcgaacgactctggcgcgactgcccggccatcgatcttgaactcgcacacccggaaacggtggagcatgcggacgctgctgccgtcaccaccgcgtaacgtgcgaatcacataacgctgatattcgctgatactcgctgatattcgtgtgtcgggctgcctgttgccgaacgtcattgacggcaccaggcagccctcccttttccctgtttcctcactggaatcgaaaggatcgtcactatggccaatcatgttcgttccattttccttatccgtcatggacgcacttcctataacgccgctcacaagctccaaggccaggtcgacattccgctggacgccgtgggtgaatggcaggtcaagcagaccgccgcggccttgaaaagcctgtacgtcgatcgtcggccggaaatcaaccaccggttcattgtctgctccgatttgaagcgtgcgcacgccaccgcgcaggctttcgccgacgtattgggtggaatcgagcccgtcgatgatcatcgcgtccgtgaacgcagcttcggcgactgggatggccatgccgtggctgaactggccgaacgctaccctgaggacttccgttcctggatggagtctcggggcggtgaactgaagtatggtgccgaacccaaggaagccgtaggcaaacgcggtgtggaggctcttgaggactggtccacgcgtgccggagacgacacggacctgttcgtgttctcgcacggcgcatggatcgcgcagacattgcagaccctgttgggcatttccgcgatcgatccgaccttctccacggtggtctcattgcgcaatgcgcactgggtgcgcttggtgccgatggacaatcccgatggcactgtgcgctggcgtctgctggactacaatcacggtccggccatcgccgacaccgacgaatgggaacgcgaacgctgatcatgttcccgactcccctgctaatccaataggtccggtgcattcggaaccgttcaagcaataactgaatgactcaatgcctgaataatggcggaaacaagccaaaaagtgtcgccaaatcacacttttgtcatttggcgacacgccggcttttgccagaatcgacatctcgtcgtaatgtatacgaggtccgaacaacgggccaacaattgaaaacggggctatagcgcagctggtagcgcatctccatggcatggagagggtcgggggttcgaatccccctagctccacgacgaagccatcaaatcgggtgatatggtggtttctccgctggttcgtggcgggtcttgtgactcccatgaatcggatagcttcactcggggctatagcgcagctggtagcgcatctccatggcatggagagggtcgggggttcgaatccccctagctccacaatcaaggccggtgcttcacacaccggcctttttcgttttctatcctatcgggcgacttttgcgcaacattcccgggaatgcgtcgcaaaacagggactggaatgcatgcagtgcgatactttccccggaaagtatcgccaaggggacgctcttccgattggcgcgacaccggcgtgagagataacagtaatcgccactacaatgaggtgtggtccctatcgtgttgatcatcaaaggagacaaaaacatcgtgaccgtcacccgtgtatatatcgccagccctgaaggcgccaatggccgcaacgtcgtcgcttacggcgtgctcaacgcattgacttccaagtacaagaccatggtgttccgccctgctgtgtccaaccatgacgaattcaccccgatcctgctcgccgcttccaatgccggactcggcgtggccctgtccaccggcctcgatgtgcataaggtgcgcgccgacaaggacaccgcccgcggagacatcgtcggcgagttcaactacgccatggaggtctcccgcgcgaacgccgccctgatcgtcggcaccgacaaatcccacgtcaacgacccgaccacctacgagttcaacgcggacgtcgccgccgatctgaaggccggggtgttcctggccgtgtgcaccatcgaccgctggccgcacgagctcgacgagaccgtcaagctgtccatcgagggcatgcgcgccgcgggcaatacggtgctcggcatcttcgtgaccggctgcgagccgcgtcacgccttctccgtcaaggagaccctcgccaaatacggcctgccggtctggactttgccgcaggtgcccttcaccgacgaatccaccaaggatctggcccttgagaccttccgcaagcacgctcccatcgacgaggtgctcgccgcgctcgatgtggacgtcaccgcgccggtcacgccgtacgccttccaattcgacctgctcggcaaggccaagagcaacaagaagaccatcgtgctgcccgaaggcgaggaggaccgcatcatcaaggcggccgattacctgctcgaacgtgagaccgtgaacctcatcatcgtgggcgacaaggacgccattttggcccgcggcaaggaactggggctgaacagtctggggcgtgcccgattccaggccatggacgacgagaacgtgttgaagcccatggtcgccaagctgtgcgagttgcgcgccaagaagggcatgaccgaggagcaggcccgcaagcaactgaccgacgccagctacttcggcaccatgctggtggtgctcggctacgccgatggcctggtctccggatccgtgaattccaccgccaacaccgtgcgccccgccctgcaggtcatcaagaccaagccgggccagaaactggtctcgggcgcgttcctcatgtgcttcaaggaccatgtggccgtgttcgccgactgcgccatcaacctcaacccggacgccgagcagctttccgaaatcgcgttgcagtccgccgagaccgcccgcgccttcggcatcgacccgaaggtcggtatgctctcctactccaccctcggctccggcaagggcccggacgtggacgtggtcgaggaagccaccaagctgctcaaggagaaggctccggatctgccggtggtcggttccatccagttcgacgccgcctggtcccccaccgtggccgccaccaaggccaagggcaacgatgtggccggacacgtcaacgtgttcgtcttcccggacctgtgcgccggcaacatcggctacaaagccgtgcagcgctcctccggcgccttggccatcggcccggtgctgcagggtctcaacaggccggtaaacgacctgtcccgtggtgcgatggtgcaggacatcatcaacaccatcgccctcaccgccatcgaagcgcagtgagcccggcttggctcccgccagcgggagccactgtaatgcttattttgtagcaagcaacgagtaatctaatcaacggtaacccgtgtctcacgggaacattcaatcacaatggaggatgcccacaatggcgaaaaccgtccttgtcatcaattccggctccagctcgatcaagtaccagctggttgatctcgaatccggcgaaggcctcgcttccggcctcgtcgagaagatcggtgaaccggtcgacggccactacaagcacgagtacaacggcgaaaagcacgagcttgaagagccgattcacgaccacgagcagggtctgaagcgcgtgctcggcttcttcgaggagtacggcccgaacctgtctgaggctggcattgtcgccgtcggccaccgtgtggtgcagggcggctccatcttcccgaagccggccctcgtgaccaacaagaccatcaaccaggtcaaggatctggctgtgctcgccccgctgcacaacggcccggaggccaagggtgccgaagtcatgcgctccctgctgccggacgttccgcagatcttcgtcttcgattcctccttcttcttccagctgccgaaggccgccagcacctacgcgctgaacaaggaaatcgccgatcagtaccacatccgccgctacggcgcccacggcacctcccacgagtacatctcctccgtggtgccggacgtcatcggcaagccggctgaaggcctgaagcagatcgttctgcacatcggcaacggcgcttccgcttccgctgaggtctccggcaagccggttgagacctccatgggtctgaccccgcttgagggcctgatgatgggtggccgtaccggtgacatcgacccggctgtggtcttccacctgatccgcaacgcccacatgaacgtggacgagctcgatgccctgttcaacaagcgttccggcatgatgggcatgaccggctacggcgatctgcgtgaggttcaccgtctggtgtccgaaggcaacgaggacgccaagctggctctggatgtctacgtgcaccgcatcgtcagctacatcggcaactacacctaccagatgggtggctgcgacgtgatcaccttcaccgctggtgtgggcgagaacgacgacgtggtccgcaagatggtgtgcgacaagctcgctccgttcggtgtcaagctggacgaggagaagaacgccacccgctccaaggaaccgcgcatcatctccactccggactcctccgtgatcatcgccgtgatcccgacgaacgaagaactggccatcgcccgcaagtccgccgcaatcgccgaggctggcaccgatacctacggcaacaccttcgccaagtaagtaaccgccgttaggcatctcactaatctctagttgcaacactatgggggggctgattccgattggaatcagcccccccattcgtatggtcatgagaccactacccctgccgtcatactcccctcagtccgctacgcggactgaggggagttccaccagaacacaggaccccttactgcctcagcatgccactccacataccgacgaaatcaggcaaggtcttgcgcgtggtggccacgttgatgacctcgatatcgggaatacgcagccccagcatcgcggcgaacgtggccatacggtgatcagcataggtttccatcacggcaccgtgcaacgtctccgccggcaccggttcgatacgcaatccatcaggcaattcctcagccgctcccccaacacgacgaatctcgttgaccaatgcctccagacgattcgtttcgtggccgcgcaggtgaccaataccaaccatgtctgtcgacttatcagcaaacaccagaatcgccgccaacgagggcgcaatctccccggccgccgtcaaatcgaacgtacccagcccacgcacggtgccgtcaccggtcacctcgcaatagcgcacgccgccgatggtcgggaacgatacttcggcacccatctgctccagatatccgggcaacaggccgcccggctgggtggtggtttcaggccaatgaggcacccggaccgtgccgccggcgatcaatgccgcgccgaggaatggcgccgcgttcgacagatcgggctcaacggtcaccttgctcggcagttgcattgcgcgcggttcaaccgtccatgtgcgggcggattcgtcggcctcaaccgcaccgccggcaccggtcacatcggccacggtcatgcgaatgtgcggcaggctcggggtcttctcccccgtgtgcgcgaggtgcagaccgccaggcagtttggaactaatcagcaacaggccggagatgaactgggaagaaccggacgaatcgatgctgacctgcgcctgggcagccggcaaggttgcaggcggcgtaatagtgaacggtagacggccaacctcgccgtggtaatcaaccgttgcacccagctgttccaaaccgtcaagcaccggcttcatcggacgtgcataagcctgttcgtcgccatcaaaattcactgggccatctgcaaacagggcaaggccgggcacgaaacgcatcaccgtgccggccagtccgcagaacacattgacgttgccatggaatcggccggatacaggaggagtaaccgttacggtggtgtcggttgcggaatccacgtcgcagcggacaccgagggcttcgagtgcgcccatcataaggtccgtgtcgcgcgaacgcagcaggccaatcagagtaacgggcttgctgccgagggcggcgagaatcaggtagcggttggatagggacttgctgcccggcaccgttaccgtagcgttcaacggctgtgcggcgagcggggcaggccagagattcgtgagtcgttcagtcataaggccaaatctatcaaacaaattattcaccggtcggcagcgatgcgggattcgatctgctgatcaggtgcggaagacggctgctcaaaaccgccttcgatggcctgcgcgtgcaacaactgagcggccgcgcgatcggcctcgatggcggcgatctggcgcgagaacacgatgaaccagccgaggaacgccagaccagccaacgcctccacattggtgagggtgttgtgacccatcatcatattgacccagaatgcagcgcatacgagcgcggtcaggtcggaggccaccatcactgctttggacaggcgtggcgcaagccacggcaggagcacgaacagcagcagcatgacgaacggcaggcctttggcgcatatattgtgcaagagattgtgtggcgtgtaccgaaacacgccgatgccgatgaatgccaggccggccaccatcagcaggaaggacagaatggagatgcgcagcatgaaatgtgggatttcgtagccgcgattcggatctctgttggtgcggtcgtgccagaggcgctgtagccgttcggtggtcaccagttcggagatggcgaagtagctgacgatgatgatgcatgtgccggcaagaatcagcgtggagttgaacatacgggccgcaaacgtggttctgtcgccgagctgcgaaaagttgttgtgataccagtatgggtcgtcggtggtcatgccggcggtgaccacgccggagatgacgaagaacggcaacagactggcaatagttttggcgttcatcatctccgcctgtacaaaggtcatgtaccccaccacgccggcgaaggcggcgcagacgctggagatatagccggagaagatggcattgcccatcatgtcgttggccgcaccgatgagtgcaaaagacgacaggaaaatggtcgaggcatacaccaccgcaagggcgacgatttcgaaaatgcgacgaatcggcgcaaaccaaccatgtttgaggttcaatgaacgtgatttgcgcgcatagccaataatgaaggaaatgacgccgcatgccgccacgatacctgaacataccatgaatcggcgttgcgtcagctgccagatggccggcgcgtattccatgtacaggttcatcgataccgcgccaatgatggcgcaaatcaagaaggagatgagtccggaggtttctgcacgctgatgacgtcccatgccgggcctcccctatctattcgatgccgcgttatctttcaacaacaaacaaaactccccccgaggacaacgctttactagcaagccagcgggatttggctgtcgccattctactgaaaatctgaaacactacaaaaaaacgattatgtacgggcttcttagcctttgcgactatcgttaccgccttgccgagtaccgttgttcatgcagaaagaaagcagtattggacacaatcgaatgagcgtgtcggtatcgttgaaaaagtaatgaatgacggttctatcggttcaacctttaagggacgaaccagccgcggcaccatggcgctgatgcatgactatgccgagctcatcaatgaattacgtccgacagcagagcaattcaccgagatcgagcaatactgggtcaaacgaattcaggcgttcttcaccagcaaaccattcaagctggagtccgacaactcgctttccgttgatgcggccgtggaacatctgctgcggcaggcagcgcagcggcgaagggagaatccgggcaccatgtacgtcggcaccgtcctgcagcatctcgtcgcggcaaagctcaccatcgttgctccggaagtgggaatcaacggcgcgtccgttgctgatgatccaagtccgcggcttccaacggtgaggccgcggaccgtctcacaaaaccgtccgcggctccgccctcctgtttcgtcgcaactgactacaccgacgggttcgggcgcttcgtcacgaaaacgccattgcgatgcaccgtatacgcgccgccgtcactgccccgttccgcccggaacaggacgatcggctcccctgcgatgtcgcgcagttcgacatccgatctgccacgtgtcagatagaagtcgaatatggcgtcgtcggattgacgcacggtgtgcagaacgtcagaggtcacgccgctggcgggcgaccgcaggttggcttccggctgccggccatcctgcggctgcacggcaagccagcctcccacgaatcgcgtcagatcgctcacgcccagatcgcagccgaggaaatacgcctccccttcaccgtacgtgttgcgggtgatcgcggccatgccgtcaagctcccactcatccgcttcttcgccggcatacgaggcaagcacctgcacatgcggtccggcgacggtcacgtcaccgagcttgtcgatgacgcgatcgagccagtcgaaatcccaatggtcttcgatgggctggaggcgatctcagctgaagatggcaagggccacggtgttgacgccggcctggcccatcaggcggatgtcgtcatcccagatttcctccggccattggtcgggactatagtcgccaccgaaagcgatgccgcgtccgtccgcggtcagcagttttggccatgcgaagtcacgtcatgcacgcacggttatctcctttggcaggcggcgcagggccacggcccatatcggataccagctgatactagctgatagacactcctggccgatagtcgacacgccgccggttccggccccactgccggaaccgacatgggtatgttcatgaccgccgaccgcaggaacgaacaggcccgtccgccacggaccgcatcttgcggttcaggcggacgggccttatgggagggatgggaac

SEQ ID NO: 2320 - DNA, 16793 bp, Unknown
  R119_18m  MAG No. k141_38491
acgccgatcagggcgccgcgcatcatggagcgcacgccgcgggcggcatgcagcatgctcgacgaatactggtcgttgcgcgtgatctgatagttgttccaatccaccgggagtttctttgcggcgtccatggtcttctccacgtcaacgcccttggacagcacgaaggtggcgtcctggtatatttccttgccgtccttgtactggtacagatcgcgtgtggtatccagatcggtgtagatggtgttggcggtgagttccgctcggctggatacctttctggcgctgtcgcccttgaatatgcccacgatggtggtcttgacggtcgccgtcgaatgtgattcgttgtcggcgtcgtaggcgttggccttgagcgtgagcgtgtctccgactttgagcccgttggctttggcgagatcctcatggatcatcgacgtgtacttgtcggaggccttcagatgccgtccttcggccatgccgagcgtgcgcgacgtgaacacgttgagtttcgacgaatcattcgtgcctatgacgttggcggcgttgccgaattgctgctccttggtcgcatcgtaatcatcgccgccggggaccttcgccacattcgcccccacgagatcggcggtggcgttctgacggaccatatacgaatcgactccgggcagttgggcgatcctgcgcacgtcggcgggacgcaccatgccacctccgcgaggcgtgagcatgctgccctgcaggttgctggccagcacgaacccgccgaccgcttccttctcgattcgtccggcggcctgttgagctgcccgagaaaccgcgatcgtggatagcatgctcgccgttatgatggtcaatactataaggagcactatggttcgtactcgttttctgagcacatagcgcaccgaccgtgcaacgaacgtcatcaatacctcctgtgggccttgggcttttcgcccaaaatgcgaaacatgccgcgtttcgccggttagttagccgcgacaatacatgatgcacctcaagatacgggtagatatacgccttgggcgaaagacggaacagcggcgaatgtcggttattctggattttggtccatctcgggccgcgtcgatgcgtcggcccgcgaggaatcagcgctcgcgcctcaccttcgaggcggcgaacacgaggagcggcagagcggcgaacgcatagttctcgcattggatgtacaggtatgcgaccaggacgagccagcagatgacggtcttgtgccagacgccggattcgcccgggcccgcgccggcaacgccatcaccactattgcccccggcaacatcagcaacgtcggcaacgtcggtgacacaaacaccgtgcgccagcccgtcggacgatgcgccatccgcaccgccacggcataccgtcctcccgcgcgtcatgcagaccatcgaggctccgaccagcatggccagcccgatcagcccgtattcggcgatgacgctggtatacgcgcacatcgtccacaccgtgtccgcgttcacgccggccgcgaatcccgtgaccgcgccgccgttcataccaagaccgtccagcagccgtccggctttggccgcgccggcccacaccgcattgatgatgttgcccgcgccataaccggtgagcagcgtccacggatgggtgagcaatccgcatatcggatcgaggctttggtagatccgcgcgaagaacgagccgtctccctcggccccgttctccgcgatggcggagagtctggaatccgccagcacacccagcaggcccagtgcgcatgcgccgagaatctgcagcatgccccggacgcggcgtgcgccgtcatgccaatcggtgcgcgccacaagggcgatcagcaacgccacgacggaatcgatgacgattctggtgccggcttgcatgagcaccgcgccgacggcatacgtgacgatgaggtcacgcagccgtttggcgtagatgcggtcgcgcccgcgcatgagccacatgagcggaagcagtatgccgaacaggtgcatgccgatatagctgggctcggcgaacaggaactgcggacggccgccgccccacaccgagttgtcgctgatgtattgccggtacatgaggtgcgaaaaatagtcggtcaacggtttggcgcgcagacggatggacagccattgcacgacgcccactccgaaggaaacccagtatgatgcgatgagaatccgcaatggcgtacgccacggaatgcgtttgatgtcgaacgcaagggcgatcgcacccaaagtggcgagcacgcccagcaatccggtgatgctcatgaacgcggcgttgaggtggatgccgaacttcagccatcccgggatggacaggattatacagaccaccggtaggaggaacattggcaggtaccggttggctgcgatgcgcagttgccgccaattgcataggcagtacacggcgaacagcgccggactgattggcgaccagaacggcgcgtacaggccaagcgtggtgccgtccaccggaagaaaagcgacggccagcaacagccaaatgacgttgcgttcctgcgatgtcagaaatcgcaggaacgaccggtattgcggtcggccatgatggttgcccgcgtcgatggtgtcgttgcgtacgcatgcctggttcatgtgattctccctccccgtcaaccttactcgttcatcacgatgcgcggacggggcatgctttccccgccgaacgtgcaatggcccgaacattgacaaggtcgcaccgagcccccatcattggcacattgtgcgatctcgtcgtggctggctgacgaaataatgttggccgaccggttacattggttcggtacagtgacggcattattggccactggatcaagcgatttgcggcagaacgacgaaagcgacacttgggcgaaaagaggcaggcatgaccacgaatcgaccgctcattgcggtgactccgctgatggattacgggcgcgatagtctgtggatgctgcccggatatatggaggcgataatgcgggccggcggtacgcccatcatgttgccgctgaccgatgacgccgacattcttgcgcaatgtgccgaacggtttgacgcgtttctgtttacgggcgggccggatgtgggaccgatggttggtgcagcggcctccgccaccggccgtagcgaggtgctctctcctgagcgcgaccgcatggagtcgattctgctgccggccgcaatggcttgggacaagccgattctgggcatctgccgcggcattcagttcatcaacgcggcactgggcggcacgttgtggcaggatttgccaagccagcatccgagcgatatcgaacaccatatgaatccgccgtacgatgcgttcgggcacagcgtttccttggtgtccggcactcccctggcttcattgttcgcggggcagactgagattgcagtaaacagctaccatcatcaggcggttcgtgatgtggcccccggtctcgaagtcatggccgttgcgcccgacggcgtgatcgaggccctgtaccggccggcaagccacttcctgtgggccgtgcagtggcatcccgagtttctctacaaggtagatccatgctcgcaggcgatttttgatgcgtttgtggggagttgccgataacagcaaaaggggctgctccggttttccggaacagccctttttcagcggtagcagtcagcagactgatttagtcatcggtgctggcttgccagcgctgattggcgcgtgcggagaccgccgtccgaaggcgaggggcgtacgaaggtacgtcgaacctgaggaaaggcggtatacgctccgccaatcagtgctggttgttgagacggtggtacatctcggacagctccagttccttctcgaactggcgagcggtggtgttctcgtcgatgacggcgagctcaacaccggcgatgcgggcgaagtcttcccaagcctcacgaccgacggaggtggtcatgcaggtgtggtgagaaccaccggcggtgatccagcactcaacggcggtcttcaggctcggcttcggctcccagacggcgcgggcacacggaagctccttgagggagccctgcggctcaacgacgtcgacgacgtccatgagcaggcggaagcgttcgcgaacgtcggacatggagaccacgacggcgtccttggtgggcttgccggagaagaccaggcggaccgggtcggccttgccgccgatgcccagcgggtggatctccagcttcggcttggcgatggtgccgatggacggggaaacctcgagcatgtgggagcccatgtcgagctcgtcgccctcggtgaagttgtaggagtagtcctccatgagggaggcgccaccctcaaggccgtagcccatgacggcgccgatgcgcacgaggacggcggtcttccagtcgccttcagcggaaaagccccagccgtactcggacgggaagcgctgtgggccaacgcccggcagctgtggcagagcgccgaggtcctcgaaattgtcgacgccggcggtgcagccgttggcgcgcatcatgttgaccatcgcggcctcttccttggcggcgatgaacagggagtcgtacttggcgtccagcagagccgggtcgacgtcgtacttggccttgtagtcctcgatgatctccttgacctggtcgtccttgacggcgtcgtacgcagcgacgagctcgttgacggcccaagtgttgatggaggcgccgaacacgcgctcggcctcggtcttgtcgccctcggtgacggcgacgttacgcatgttgtcgccccagcgcatgaccttcatgttgttggaggcatcccagccggcgcaggcgcgggcccaggtgccgaccttctcgacgacctcaggatcggtgtagtggccgacgacaaccttgcgcttgatgccgaggcgggagacgatgtaaccgaactcacggtcgccgtgggcggcctggttcaggttcatgaagtccatgtcgatggtctcccacgggatttccttgtggtgctgggtggccagctgcagcagcggcttggtcagcacttcgaggccgcgaatccacatcttggccggggagaaggtgtggcaccaggtgatgacgccgatgacgttcgggttggcggaagcctcgaccatgaactccttgacaccgtcggaggacttcagggtgggcttgaggacgatcttggccggaatcttgccggtgttgttcaggtagtcgaccatttcagcggagtgaatggcgacctggcgcagggcttcctcgccgtacaggtcctgcgaaccaacgccgaaccagatttccttgccctcgaaggggttttccataaccatagggttacttcctttacttctttgtttatgggggtttgtttaagtttcattcgccgaccgaggctcccctcagagaggggagccaagacaccaccgtgctggcggagtcagcgctgatttgatgtgtgtgcccgcaaggcgcggaaggcgaaggcgtacgaaggtacgtcgagccttccgcaacgcggcggacactccatcaaatcagtgctggccgtagacgttctggtagcggtcgttgagcttatcgatgtcggcctggtcgatctcgatgatgtcaccgagctgacgggcggcccacatggtgtgagcgacttcctcggtcatggcagcggccttgacggcgccttcagcatccttgccgatggtgaaggggccatggttctgcatgaggacggccggggacttcgggtacttcttgagggtctcgacgacacccttgccgatcgcctccgagccgatcagacggaacgggccgaccggcaccgggccgccgaactcgtcgcccatcatcgtcaggccgcacgggatgttctgaccagtggcagcccaagcggtggcgtaggtggaatgggtgtgcacgacaccgtagacgtcgggcatgttgcggtagatgtaggcgtgggaagcggtgtccgaggacggggcttcggcaccgtcgaccacgttgccgtcaaggtcgcacacgaccatggaggacggggtcaggtactcgtagcgcaggccggagggcttgatgacgaacaggtcggcggtgtgcagacgctgggaaacgttgcccgcggtccacacgaccaggttccacttgatcagctgctggtgcaggttggagacgacctcacgaacctgcttgacctcggcgcgaacctcggggccgtaatcagccaaagttgccattattggttttcctttccactgtgatggatggacgttttttcaaaatctcaaggacctctctcaatagagggaggtcagaaaggcttacttatcttcgaggttgatggtttcgatggcagcgtgctcgatgggcaggcccttggtgaagcgggcgaagaagtcctcgaaaccaaccacatcggaagccaccggcttctcagtggtggactgggcgtccttgaacacgaaaccatcaaggaagtcagcgaggttgctgtgatcctcgttggtgttccacaggtagttggcgagcacggccataccccaggcaccaccttcggcggcggtggacatgaccttgatcggggtgttgaaggcagcggcgagaatcttctgagccaccttcggagtggtgaagatgccgccgtggcccacgagagagtcgacctgcacgtgctcctgcttggtcatcacgtccatgccgatcttgaccggggagaacgcggagaacagctgggcgcgcatgaagttgccgagggtcatgttggcttcggggctgcgggcgaacagcgggcggccttcaggcagaccggccaggaattcgccggaacggaacggatagttcagcaggccgccgcagttggcgtccacgtcgtcggcgatggccgcgcggaacaaggtgccgtacagcataccggcatcaaccgactggccgatggccttggcgaactggccgaacaggccgacccaagcgttgaggtcggaggtgaagttgttggcgtggctcataccggccagatcgccggccggggtggtgaccaagtcaacctcagggtggagggccttgagcttgtgctccagaaccaccatggcgaagatggaggtgccggcggagacgttaccagtgcgtacgcgcacggagttggtggctaccatgccagtaccggcgtcgccctcaggcggggcgagcacgatgccgggattcagggcaccggacggatcgagcagcttggcgccttcctcggtcagctcgccagccggagtgccggccacgagcggctcaggaagcaggttctccagcttccacggctgggctgcgacctcaggcagagcgtcgaacttctcgatgaatgcggtttcgtaagtgtgagtggtcgggtcaatcgggaacatgccggaggcatcgcccacaccgaggaccttctcaccggtgagcttccagtgcacgtaaccggcgagtgtggtgaagtaagccacctcggagacgtgctcttccttgttgagcacggcctggtacaggtgagcgatggaccaacgctcggggatgttgtactggaacagctcggagagcttcttgtgagcttcggaggtgttggtgttctgccaggtgcggaacggcaccagcagttcgccggcctcgtcgaatgcgaggtaaccgtgcatcatggcggagaagccgatgtggccgacgtgcgtgagcttctcgccataggcggtctcgacgtcgttggccatggaggcgtaagcggactgcaaaccgccccagatctcctcggtggcgtagctccacagaccatcctccaagtgggaggcccagctgtagtcgccggaggcgatggtctggaagttgtcgtcgatgaggacggccttgatgcgggtggagccgaattcgatgcccagcgtggtcttgccagcgcgaatcttctcggcgatgtgggcggcctgctcggccgcgttgtcggttgctgccatatctttcctttgccttggagcgccggcgttgttatccccttccttggggaggatgttagcgctcacaatttcaaaaacattgtaccgataacctgcattcgacacaacttataccgtgtcacgcatcataacggtttgataacagcgccaatttaccgccggggagccggccccaaggaccgccgagcacgcacctcggcgggaatcagccccacgccgtgctgggcggtcaggaaggtcggctcgccgccctcccccagcaaacgcagcgtctcgcgcatggcggccacgccgagcccctcgaaatcgggatgcacggtggtcagcggtgggtacatgttatccacgccagacatgtcgtcgaatccgaccacgctgatgtcttgcggaatccgaagcccatgctcatgcaacgcgcgcatgatgccgacggcctgattgtcgttcgcggcgacgaccgcggtgggcaacgccgtgcctcgacgcccatactcatcaatgagatgattcatgtgcgcatatgcctcagaggcatcccacgtatggcagcgcacgatctgtgaatcgatggatcgggaggcggcaagcttgcgccacgcatccagtcgggtgtgggcgtcgcgccattcgttgggaccggcaaaatacagagccgatttgtgcccgtattcgcccagcaaggccaccactttggccattgcaccccactggtcgataccgaccagcgcggtgcgacgcttgttttcggtggagataaggcccaatccctcacgcacggtcatttggccgtgggtggcggtgacgatgacgcgtggctgagtgactcgcgcacggcaggcggcggcgaacatcacgtcggtcggggtcaggaagatgaaggcgtcgacgttctgctcgttgaaggtgtcgcacaggttgtcgaagtcggactgcatgcacaaggcctcgtggaccatcatcacgctcatgaacagaccgtgttcacgggccatggattcgatggatgagatggaggaaatcgggccgaagaatttgaagcccccggcgatcagccctatggtgcgcgaacggcgggaagccagtgcgcgcgcggagttggaggggcggtagccgagttggtcaatggcggcctggactcgcgcacgggtggcgtcggaaacgtccggcgagtcattgatcacacgggagacggtttgatggctgactccggcgagcttggccacttcgaacatggacggacgtttgcttggcttgcggctggtcaccatgctacctaacctccccgctggcggccggcatccgtgcacggccaggcttgtaccttaatcagtactgactttagcgcgtccacaacagttttgcgttagcgctcacactgtcgtgtcgcacgcggctcaggtcaggtgccatgagacacgatggagcggagtcggcccgtgttcggcgatggcggcacggtgtgcggcggaaccatagcccttgttatgagcccattcgtaggcggcgtaacgtgggttgctttgcgcgaggtcgaccatcagccggtctcgggtcactttggcgatgaccgccgcggtggcgacggtggcgcaatgctggtcgcctttgactttggtcgttatatcggctggaatcggcacgtccggcgcgtcgaacgtgttgagcgccttggtgatgtaatcgctcggcccgtcgagaattccggcgactttgggcagggcgcgaacgctttccccacaatttccaatggattcccctacggagtctcccggacgaccttccacaatctcccccgcagccttttttgccgtcaatccccctccaagccgtaagccaagttcgcgttcgacttggctgagcgcgcgcagggcggccacgccgagcgcataggtgatgccccattcgtcgatctcggtgttgctggcctggcctacggcgtaggccgcgcaccagtcgcgcagttcgtcgaaaatcgcctcgcgcctatgttcggtgagcatcttggagtcggccacgccgtccggtacgccgaggtaggtccgcccggacagttcggcggaatcatcgccgtcaagcggcgccaaatcacaggcccagatggcggcgcacccgaccatcaccggaccggcgagcgcgccgcggccgacttcatcgaatccagtaataaggtcatagccctgggccgcaaggctgcgttccaagtcaagtgtcggggtaatcatgcgcggctcccatcgtctcacaatggttaggattcagacggtccaggattcatatggttcaggattcagacggcccggaactcaatcagttcaaagactcacacggttcaaaaaagactcaggaattcgagccggaagcgtcagacacgtccttgaagacttcgtggtggtcatcaatcgcaccaagccggtcaagcggccagtatttcgcgattccgactccgaccacatcggagatgggaaccaagccgcgatcgccgtcatcctgatgatagcgggagtcggcggaattggcgcgattgtcgcccatgacgaacacgtggccctcggtcacggtcaccgagaacgggaaggcgctcgggtccacgccggggcgaatgtaggaggtctcattgatggccacgccgttgatggtcaccggctggcccgcgcccttgcattcgaccacgtcaccgggcaggccgatcagtcgcttgatgaggtacccgccaccgggagcgctgctctgctcctcgttcaaccagttgttgggatctttgaataccacgacgtcgccgcgctgcagatcgaagatcttgggggtgagcttgctggtcaccacgcgatcgccgggcaccatggtgtccatcatcgagcgcgaaggaatctcgtaaaagccgacggcgaaaatgcgaatcagcagcacgataagcacgggaacgccgcaccacaggaaaaagtcgcgtagggtgaagtggtcatcatccatcgatgatgctgccgcggcattcgcaccagcggaagaagcggcgtacgccgggcgcgccggtgccgggggaaccggggacggggcgatgccgtggtcggcgacttggaacgtacgggaatcgcgggcatcggcctcgtcatcatacgaggtctgattgctctccggattgtcggaaaccgggaattcgccgttatcctgatcgtcctgcataccatctcctcgcgattcatgctgccggatatgaggggtgccggcgcccgtccatcatacgtggaaaatacggaaacagcccgaaaccgaaacggttccgggctgaatttcacggtttattcgcgcacctgcatcatcaggcccacgattgcacccgcgaatcgactcacttagcggagttgtcgcggcgctcggcaatacgagcggccttaccgcgcagagcgcgcaggtagtacagcttggcgcggcgcacacggcccttacgcacgagcttgatggagtcgatggacggggagtgcaccgggaagcgacgctccacaccagtgccgaagctgatcttgcggaccacgaaggtctcacgcacgccagcgcccttacgagcgatcaccacgccggtgaaggtctggatacgggagttgttgccttcctggatcttcacgttcacgtcgacggtgtcgccgggacggaaggccgggatttcctcggccggcttcatgtgcttggcgtcaaaagcctcaacagcgttaaccattgttgttccttcagtgctgccgcatatcagccacagatctggggccatccacgcgattgcgcatcacgtgcgttggcctgttctcgttatccctcgggtttgcccttgggaagcctgccgatccgccgaaagtcaggccttgcggccgttcggactggacccatggagacgtgggcttatgcggcggcccacttctcgacacagcaatcgtcaattgtacggattattgcggacagaatggctgtcggatggcattccaacaccaaggcactgcgacgtagttgacagacctgcaggcgggctttatcttgggagcgtcggtaggcgaggctaccgcagggatatgggttgctgccgctaacagtggagacactgcacgcaggtcagcagttcttgtcggatcaaggcatgaactaacgcaattccaccgccctgcgatgctgaagcttgaacgatggctcgaatcggcggattcgaatactttccgcccctcctgctggtcgcatggataccgacgatggtattgatctggcgtttcagcgcacggcttgaaggaggtgagagtccgatggacggtgattattccagtagttccgccgccggcaacagtcatagttgcggtggtgatgaccatgttttcttatattccgttatccggaagtcgggctctcgcctgtagtgttccttggctccccggataacccttgcataattcgtctttcctatgcatagggaggtcttttcatgaccatgttttcattcaatcgcgtcggcgcgcgtccaaatgcgtcggcccgcaacccttccaccgccgcgtccgaccgccagccattcgccgtgcgcctggcctccgacgtactggtcgcggccggtattctggcgctgttcggtctgatcgcttggattctgccggcgatcggcgaaccgatcggcccgaaaggagtgccatcacaagtcagtacgaatctcgccgacctgccgtattacgcgctgcgctcggtgttccgtatgttcgtggcactgttcttctcactggtgttcacgttcatctacggcacggcagccgcgcgctgccgccgcctgagccgcgtgctgattcctctgttggatattctgcagtcggtaccgattctgggctttctttcggccaccatcaccatctggatggtgctgttccccggctcgatgctgggcgtggaggccgcgtcgattttcgcaatcttcaccagtcaggcctggaacatggcgttctcgttcacccggtccctgaccagcgaaccaactgaactcgacgaggcggcccgctcactacagctcacacgctggcaacgattctggacactggacgtgccgaacgcgatgattccgctgctgtggaactgcatgatgagcgtgggcggcggatggttcttcctgaccgcctccgagatgatctcggtgaacaatcgcacctatgcgttgcccggcatcggcagcttcgtggcacaggcggcggccgaggagaatctcgcggccatctgctgggccatcgtgacgatggtgctggtggtgctgcttatcgacgtactgctgtggaagccgctgaccgcgtgggcggagaagttccgcattacgcaaagcgagtcggcggtgcgcaagaccagtgtggtgctgaccatcattcgtcagtcacatatcgatgagatggtggcctggctgttcaggcctgtcggcgacctgttcgacacgctggcccgcccgttgggtcggaccggtggacgttgggcggcggacgtgaagtccgcacgcagccgcgcgcttgacgtggtattcacagtactggtgttggcagcgtgtgcgttcggactggtgcagcttatgctggtgattcatcgcgatgcgggattcggcgagctcgggcaggcgttcgtgttgggcatggtgacgttcctgcgcgtggcgctgcttacgctcgtctgctcggtgatttgggtgccgattggcgcgatgatcggcatgaatccgcgcgtttcgcggtttatgcagccgattgtgcaggtgctggccagcttcccctcgaacttcacgttcccgttcgtcacgctctggttcgtggcatgcagcgtggatatcaactggggcagtattctgctgatggcgttgggcacgcagtggtacatcctgttcaatgtgatcgccggggccagccagattcccgacgatctgcgtgagatgacgcgcagcttccagctggggcgctggcagcggtggcgcgatttgattttgccgacggtattcggctcgtgggtcacgggcggcattacggcggccggtggggcgtggaatgcctcgattgtctcggaaatcgtaagttatggacggcatacgctgaccgcctccggcttgggcgcgtatatcgccgaggccaccgaaagcggcaacaccgtgaggaccatcatcggtgtggccgtgatgagcgtgttcgtggtggccgtcaaccgcttgttctggaacccgctgcagcgcatggccgagcgccgtttcgcactgaactaaagacttaaggagaataatatgactgttgcaatggaaaccattcgttcgctgcgggcggtgaccccgcagaacaccatcatcgaagcccagcacgtcggccagcgcttcacggccgacaacggcaccgaactcaccgtgttcgacaacatctcgttcaacctgtacgagggcgagatcgtggccattctgggccgttcgggtgccggcaagtccacattcctgcgtgcgctggccggactggtcaagccgaccagcggcacggtcaagtatcgcggcgaggccctgaccggtccgaatcccggcatcgcactcgtgttccagaccttcgcgctgatgccgtggctcaccgtgcaagacaatgtggaactcggtctgaaggcgcgcggcgtaccacgtgcggaacgcaccaaactggctctggatgccatcgacatgatcggcctggacggcttcgaatcggcgtatccgaaggaactgtccggcggcatgaggcagcgcgtgggcattgcacgcgccttggtgctgcggccggacgcgctgttcatggatgagccgttctccgccctggacgtgctgaccgccgaaaacctgcgtcaggaagtgctcaagctgtggtcgagcgaacagcgcagcatcaagtcggtgcttatggtcacgcataacatcgaggaagccgtggagatggccgaccgagtggtggtgttgggctcgcacccggggcatctgattgccgatgtgcgggttgatctgcagcgcccgcgcgaccgtcacagtgtcgaattcgaggcgatggtggaccgactgtacgcgattttgaccggacaggcctcgcagcctacgcaacaagccgaggctctatcgccatcggcatcgctcacgaacgcacccgtcacggacgcatctgtcacggacgcatcagaccttcagcccgccaagaccatcgagaaaatcaaggagcatccgctgcccaacgccacgccgggcgggcttgccggtctgctggatgtggttgccgagcatcctcacggcatcgacttggcagatttggcctcggctctttcgttcgaggtggacgacctgttcccgctggtggatgccggtacgatgctgcgcgtcatcgtggtacgcgacggccatgtgcagatcaccgaagcgggcgacgcctggcataaggcggacattctgcgggccaagcaggtgttcgcctcactggcgatggaacacgcgccgctggtgcgcaacattgagcatgcactgcggaagtctgcggaaggcaagctccgcggcgagctcatgctggacctgctgcgcgcccgttacgccaacgacgaggcgcatcagcagttcgccatcgccgtggagtggggccgttacggcgaactcttcgattacgatgccgatgacgatctgctgagcttggatgaggcgaataagggcgaataagcgaatcagccacgtgagttggccagatagtgcctttatgcctgcaaacagatgccgaagcggaatatgaccatgttcgactcatctgactgacagcaatccgtatatgcaaagtgcccggcatccgaagatgtcgggcactagtcgtgagagagactccctcagtcagctacactgacagctcctctcacccgagggggcaccagaggaacgaatcagaactcgcgacgtgggcagtcgccagagtgcccaccagacagcacagctgcggtcgcgcgaatcacgaattctgaccgagcaaagcgaatcagaactcgcgacgtgggcagtcgccagacggcccaccagacagcacagccgcggtcgcgcgaatcacgaattctgaccgagcaaagcgaatcagaattcgcgatttgcgcggtagaacttgatcaggctctgggtggaggcgtcctgggcggcgagggcgtcgtcgtcctgggagatggccggggtgatctgcttggccagctgcttgccgagctcgacgccccactgatcgtaggagtcgaggccccacacggtgccttcgacgaaggtgatgtgctcgtacagggcgatgagctcgccgaccgcgaacggggtcagggccacaccgaagatggaggtggtcggacggttgccggtgaacacgcgggccgggacgatctcctccggggtgccttcggcgcgcacttcgtcggcggtcttgccgaacgccagggccttggtctgggcgaagtagttgcccaggaacagctcgtgcacgtcctggtcgccgtccttggtcgggttcggggtgttgacgaacgcgatgaagtcggccgggatgagctgggtgccctggtggatcagctggtagaaggcgtgctggccgttggtgcccggctcgccccagaagatctcgccggtctcggaggtgacgggggtgccgtcccaacgcacggacttgccgttggactccatggtcagctgctgcaggtaggccgggaagcggtgcaggtactggtcgtacggcagcacggcgtgggaagcaaccttgaagaagttgcggtaccagacgttcagcataccgagcagcaccacgacgttcttctcgaacggggtgttggcgaagta

SEQ ID NO: 2321 - DNA, 4821 bp, Unknown
  R119_18m  MAG No. k141_38671
ccgtttttttgttgcttctgggcggtacaccggcgtatccatggggcggcaaaacacccatagggcggtaacttgcccatggggcggtttgaaagatatgtgaaaccgcggaattaagcccttctggcataccgccccatgagaggtttaccgccccatgagggttttaccgccccatggggtaatcaccgccccatggggatttggcaggcatagcaaaggggagccacacattatgtgcgactccccttacagcttgtaccgtgttagcggcttaggctcacttctggccttgagcggcgacagcggcggcaccggcagcagcagcctccgggtccaggtactcgccacgcggcttgatcggcttgaagttctcgtccagctcataaagcagcgggatggcggtcgggatgttgaccttggcgatctcttcctcagacaggttgtccagcatcttgacgatggcgcggagggagttgccgtgagcggcaatcagcacggttttgccggccttgagctccggctcgatggcggactcgaagtacggcttcacacgctcaacaacgttggccaggcactcggcttccggaaccggatcgccggcgtagcgcgggtcgttgttctgggcgtactggtcgttcgggtcgatctcgggcggcggggtggcgtaagaacggcgccacagcatgaacttctcgtcgccgtactcttcgcggatctcggtcttgttcttgccctgcagagcgccgtagtgacgctcgttgagacgccagtcacgctgaaccggaatccacagacgatctgcggcatccagagcgatgttggcggtgttgatggcgcgacgcagcagggaggtgaacacgatgtccggaaggacgttcttctccttgagcagctcgccgccgcgcttggcttcggcttcaccctgctcggtcagcggtacgtcgacccagccggtgaactggttggttttattccatgcgctctgtccatgacggagcagtactagtttataagtcatacggttcagtctacagccgcgtgcgcccaaacacgagtattcgtcttattatttcgctctcatagcgccacggcaaccgccagcaccaccgcaaacagcaaggtctggaagctggcggcgggcagagccgggcggaattgacgtttattcacgctggagaccatgcgcacaggtattccggcgcccgagagcaacagcaccgcaccccacggccaccataatgtaccacacatcagcagggcgatgatccatgcgatgacgcagcacacaatcagcaacgtacgcgcgccggactcccccagccgtacggccagcgtgtgtttgccatgctcacgatcctcgtcgatgtcacggatattgttcaccatcatgatcaggcaggagaacaggccagccgccacagcacccaatagtccgccgacgtccaccgtgccgcacagcgcgtattcggtgcccaataccgcagccaagccgaagaacaggaacacgccgacttctcccagcccgacgtatccatacggatgcttgccaccggtgtagaaccagccggccagcaaggaggccgcgcccacggccagcaaccaccatgcttgggcgagcacgaccgccacaacaccgcatatgcaggcgatggcggcgcaaatcatcgccgcgaacagtacatgcttggccggtaccagtccggatgcggtcagtcgctggggtttgcctgatttcgattcgtccgtgtcacgcccggcgtcagtgccgcggatgccgtcggaatagtcgttcgcatagttgacggcgatttgcaggaacagcgcgactagcaggcacaggatggtcaccggccagaatcggtccatcagcagggtctgctgttcacgggccgtggcgcaggaggccggttctggatatattgcgatgcaggtgcccgaccgctcgatatgcacgtacgccatcaccgccccaaccatcaccgacgcgatggaagtgaccaaggtcttgggacgcgcgccccgaacccacaagccgatagacataagcaatccctttcatatataactctggctcccctctctgaggggagccagagtatgcctaatcagccaacgagcggcttgaccagcgggaaggtgatggtctcgcgaatcgtggcaccggtcaaggcgataagcagtcgatcaatgcccatacccatgccgccggccggaggcatgcccacgccgagagcctcgaggaagtcctcatcgatgtcgcaggcctcttcgtcgccggcgagtgcgtccttggcctgggccacgaaacgctcacgctgcacgatcgggtcgttgagctcggagtagccggtagccagctcgaagccgcgcacgtagagatcccacttctccaccacgccgggcttggtgcggtggcccttgaccagcggggaggtttcgaccgggaagtcacgcacgaaggtgggctcgtaaagcttgtcctcgtagaagtgctcccacaggtgttcgacgagcttgccgtggttctccacgtcgtcgcgctccacgccgagcttgtcggcgatggcgcccaaatgctcaacggaggtgccgggatgctcagggccgccgttcggcacgatttcctcgcccaatgcctcggacagcgaatcgtacatgctgatggtcttccattcgccgccgaagtcgtattcggtgccgtcgagcagggtgaccttgtgcgagccgtagacgtccatggcggtcttctgcacgagctccttgaccagctggccgatggaatcataggtgccataggcctggtaggcctcgaccatggtgaattcgggggcgtgcgtggcgtcgacgccctcattgcggaagtcgcggttgatttcgaacacgcgatcgatgccgccgaccaggcagcgcttgaggaacagttccggggcgatgcgaaggtacaggtcaaggtcgaaggcgttcatgtgcgtggtgaacgggcgggcggccgcgccaccgtgcagggtctgcagcatcggggtttcgacctcgaggaagtcgtggtcgtcaaaggtgcggcgcagggaggccacggccttggagcggttgcgcaccatgttgcggatgttctcgtccgcgatcatgccgatgtacggcttgcgggtgcgggtgtcttcgttcaggtccttgtgcagggccggcagcggctgcagggccttggaggcgatagcccactcagtggcgaatacggacagctcgccggtcttggaggcgatgacgcggcccttgaggtacaggtgatcgccaaggtcgacgagctgcttgaactgcttgagcgagtcggcgccaatctccttcttggagatcatgccctgaatcttggtaccgtcaccggcggacagctgcacgaagcacaggccgcccgcgttgcgcaggaacagcacgcggccagcaatgccgaccatgtcttcggtctcttcgccagcctcgagcttgccgtcatacttggcgcggaccgcctcgatggtgtcggtgacgtccaagtgcaccgggtagggggcgatgccggcctcaagcatcatcgcgcgcttggccacgcgcatctgcacctgctcggggtgagccagcgggccgaactccttgttggaggggtccacggcttcgtccagcgtggcaccggacttgatcttctcgcggatggtggcgtcctgctcgagcagcatttccgcacgttcgacggtgctcatctgcgggacggccggggtttcattctcagtgttttcggtattttcgacaacttcagccatgattcatcagtgtacgcaaggccggcgattatgagcccggcagaccgtacggccatctgaacacccgctcacatgacgcaaaaccggctctgcacaaggcttgagagacctgtacacacggcgaatccaccatcacgcaacactcgcgacatgccgatttgcattgtccaccaccacaatgtaatatctacgtctgttgccaaacgggctgtagcgcagcttggtagcgcgcttcgttcgggacgaagaggccgcgggttcaaatcccgccagcccgacaattggaccggattgttgagaaatcagcaatccggtttttcgtttcctaacccaacaatcagaccaagcgatcggacagcggtaaacaacccgccgcgcacagcgacaaaccgcgtcgcggcaaggcccgtatttgttggcggaccaccgtaatatatcgctcgaatcaatcgattgccgcactgtttttgtaagtaatactgaagtaattagaggaaccatgaagaagagtctgcttgcactggcttcgggcgcgttcattctcggtgccgccgagttcgtgatgatgggtattctgccgcaggccgcggccgccaccggcgtgggcatccccaccgcaggccattacatttccgcgtatgcgatcggcgtgtgcttcggcacactgattctggtgttcggccgcaaggtgccgccgaagaacctcatcatattgtttatggtgattgcgcttatcggtaatctggcctccgcgttctcggtcaatgccgccacgctgattgtcgcgcgcttcattgccggcctgccgcacggcgcatttttcggcaccgccacactcatcgccaaaaccttggccgacaagggcaaagaagcacaagccgtatcggtaatggtcaccggacagaccgtggccaatatgctcggcgtaccggcgggcaccttgatggctgagttcctatcctggcgcctcgcattcggtattctggctgcatgggcggcaatgaccatcgtgctagttctggcatggatc

SEQ ID NO: 2322 - DNA, 44949 bp, Unknown
  R119_18m  MAG No. k141_39240
cgaggtggcgaagccaatcacgcgcgccctttgatgggtggcgtcgagggcgcggttcaccgcctggttacaggccttctgaatcagaggcttgttggtgccatagtcactgacctccacgcctgctttggccagatcactgagcagatcgctggtgttggcgttgtccctcgtgccccagccggtgggcggcttgcccgcagcagtttgagccagattatctttgagccacaggacgaagtcattcgggccgatgccggtgttgccaccaccgccgataatgacgccgttgccggagttgtcgaaggcgttggcagaggaaacggccaccaaaccacccgtggcgagggtcgccacagccgcaagcgacgcaatacccctccttagccaaccctgcttttccttgggcggagtgggcttgctatgctctttgtatttcagcatatctctcctaaatcgaactatattgaccaagcaacgccgcgcacccaccgaacccaaccggcggcgcacgacctgcttgccccaaagtaggcaatcacaccacaagcatcacccacgccagcaagagcatgcgtgaagacatggaaaacccccacctcaatgagatggggcttccaaggagaaaaatgactaagctcagttgccaaggatggagcaagcaaccttggagcaatcaaccagcgggccggtgccgccgccaaggactccattgttgggacgttggatgggggcagaagcaggggctgaggcgccgccgttgctggagggcgtgtaggactgctgcggggcggaatacccacggttggaggaatacccgctgccggagccgccgtaacgattgtaggactgggagtaggagcgttgcgactgcgcggctgccgcggctgcctgcgcttgggcttgggctgcggcctcggcgtcagcctgctccttcgcggccttcgaatcggtcacctgcctgacggcggcgtcgagcttcgccttggcgtcggtgtaggccttcgggtcggtgacgcccttcttggcgagggtgttgttcgcctcgtcgatggccttcgcgaggccgtcgcgggtggcattgtccgccaccttcccgtccgtgtccttgagggtctggctcgcgccgtcaataccctgcttgagctggtccttcgcggtgtccagctccttcgccagcttgctgtccttgacggccttgagcgcggcgttgagcgccttcacctgggcattggcctcgtccacgtccgtggcgctggccttcctcgcggaggcgagctgccacgccagccactcgcccggctggtcctcggggacgcccttgagcgccttggccttcctgatggcggcgtcgagcttgtccagcagcttcggctccttgagctgatccgccttatatgtggtggcggtggcctgctcaatggccttcgagagcgccttgtcggcgttctcggcttgggctaccgcctcatggtaggcgttgccctcgtggtgcgtccagtaggcgtagccgccgccgatgcccgccagcgccacgatgatgacagcgatgatgatggcgacggtcttcctcctgacgccgtgggcctcgtcgttcctgccgtcctctggcacgtccttggtttcgtcggcggtctcgtcggacatcgttcctcccggtctgtcgttctgctcttccgagtccatcatagaccacggaatactacatctatgaagtaatcatatatgcagtggtgcacttggatggaaccatgcacgagcgcatatccgacgaactcacctggcggcagtacgccaaggggctcggcatacgcctgcgccgcctgcgcgaccaacgcggcctcagccaggagcgcgtggcctcggacgccggactctccacggtgcagtaccaacggcttgaatcgggaggcttcgccggacccacgcccaaccccacctccaagaccctgatcgccatcgcccagatcctcgacgtcaccatcgacgaactcctgcccccgccatggcccgacctacgcacgaagtgatgtgtcacgaagcgtccccatgtgctagaatcggcatcgtttaaggttcacatagccgccttggacatgaaaaacccaatgattccaagccttgcgaaacctcggcatgtagcccagtggactgtccgtaggcgagggtgagccgataggcgaaccagcatgtcgcgagcgaagctcgtccttaattgcggacgagccagagcataaatcagtccgcggaggtgaagccctgcggctcgccggcctcggcgaacttggcgttgtgagccttcttggcggcggcgatcatcagcttgatacgattgagctggttcgcctcggaggcacccggatcgtaatcgatggagacgatgttggcttccggatgcaggcggcggatcttgccgaacatgccgcggccggtcacatggttgggcaggcaggcgaacggctgcgcgcagatcacgttcgggcaaccctgttcgatgagttccagaatctcggccgtcagcagccagccttcaccggcctgcacgccgatggaggtgacttcagcagccttcttgaccagttcgggcatcggctcgtcctgcttgaacttgccgttcgatgtggccagcgcggccttgatcggcgcgttgtacaggtcgaggcccttgcgcatcagggcgtaaaccgtcttgttgccgcccatgccgaggttcttctcgttccagtcggtgatgtaggggcgggtggtcatgaattccatgatgccgggcaccacggcctcgcaatcctgggattcgatgacgtcgaccacgtggttgttcgcgtccggctggtacttgacaagaatctcgccgaccacgccgacacgcaccttgcgcgggatgtcgcgcagcggcagattgtcgaaggacttcacgatctccttggccagcacgttatacggcagatagcccttcttgatgctcggcgtcttggctgcggtcttggaatagccgtgatgctcgatggtctcacgcacgatggtgtcccacagctcgtacagcttgttggccgaacctttctccacctcatacgggcgtacgcggtagaggcacttcatgagcaagtcgcccagaatcagcgccttgatggcacggtgcagcaggggcagggtggccttgaagcctgggttgtcttcgaggccctgggtagaaatggcgatgaccggaatctgcgggtagccggcatcgaccaaggccttgcggatcaggccgaagtagttggtcgcacggcacatgccgccggtctgggtgatggcgagcgctacatggtcgggatcgtatttgccttccagaatcgcgtcgatgagctggccgacgaccatgatggccgggtagcaggcgtcgttgttcacgtatttgaggccggtttccacatcgccacggctcgcgtgcttcaggatgtcgaacttgtacccaccggaacgaatcaccgcttcgaccaaggacatgtggatcgggctcatctgagggccaacaatcgtatagttcttcttcatgtccttgacgaacttctcgcgatgagcgtagcgggacatagtggcgttgttgtggccggacttcttggcgttcttggcgttcgtcacgccggtggtgccgtccgaagtgccgttcttgctggcgactgcggcctgcaggtcgcgttcggcggcacgcttggaggcggcgcgcatggccttggtgagcttcgggttggcggccatggtgctgtcaagcagaatctggcggccgggggttggcgcggtggagccggtcttgcggaatccggtggacttggggccttgcacggccttggccgcggcggcttcgcgggccttgttggcttcgcgttcctcgacggcggccttgagcgagcgcagtcgaatcttggcggcacccaggttggagacctcgtcaatcttcagcagcgtgtacacgtccgccttgtctgccaggatttcggccacctgatcggtggtgatggcgtcaaggccacagccgaaggaattgagctgcacgagttcgaggcccgggtaggaggccacgaagtgtgcggccgcgtacagacgggagtggtaggcccactggttggtgacgcgcaacggcatcttggtgactgtgcggtctcccacgtggcggaatccggcggcgttcttggagcgcgggtcggcttcgccttccgagaggaattcggtgaggttgagcttctcccccggctgcagttcgcagatggaatcctcggagagcaccaccatgccgagcgagcagatggtttcggggatgccgtggttgatttcggggtcgatgtggtagggacggccggcgagcacgatgcctcggcagttgtgctctttcatataggcgagcgcggtcaaaccttcctgctgcacgtcatgcttgaagaccttgtcttcggcataggcggccttgaccgcggtttcggcctcttcgcgggtcacgttggcccacgcaaactcttcgacgatgcgatcaaccatgagctcatggttggcaaggttgaagtacgggtgcatgtagcgcacgccgtcctcacgcagctcaggaacgttggcgccgacgacgagcggatagttggccacaaccgggcagttgtaatgattgtccgtgttgggcacgaggttctcctcgtagctcacgcacgggtagaagatggtcttgatgcccttgttgatcagccacttgatatggccatgcaccagcttggccggatagcagatgttttcggaggcgatggattcgatgccggtctcgaacagctcgtgggagctgcggccggagatcatcaccttgaagcccagcgtggtgagcagcgtgaaccagaacgggtagttctcgtacatattgagggcgcgcggaatgccgatctcgccacgagtggccttcttgtcggtcaaacggcggtaggcgaagcaacgcttgtacttgtagtcgtacaggttcggacggtcggaacgcttcttcttggcgtcgccgccgcgttcgcagcggttgccggtcacgaagcgcgagccgtcggagaatgtggtgatggtgagcttgcagtggttctggcacagcttgcacacgtcacgctcggcggtcatgctcatgttgtcgagcgcttcgccggtcagaatggagctggcggtgtgggtcacaccgtccacgacaacgacatgggcttcgggcttggccggctcggtcttcttgaaggctgcggccttgggctcggacttgggtgcgggctcggccttggactgttcctcggacccatcggccttaaccaccacgtccaagtggtcggcctcatcctgatagtgcatgcgggcggtcagggcggcgccgaacgcgcccatgaggccggcgatgttcgggcgggtgacctgacgttcggtgagcagctcgaaggcgcgcagcacggcgtcgttgaggaacgtaccgccctggaccaccacagtgtcgccgagttcgccggaatcacgcaacttgatgaccttgtacagggcgttgcgcaccacggagtagcataggccggcagcgatgtcctcgatggaggcgccttccttctgcgcctgcttgaccgaggagttcatgaacacggtgcagcgcgaaccgaggtccaccggatgggtggaagccagagccttttgggtgaattcctgaatcgtcaggcccatggacatggcgaaggtctgcaggaacgagccgcagccggacgagcaggcttcgttgacggcgatcgagtcgatgacgccgtcagtgatggccagatatttcatatcctggccgccgatgtcgatgacggcggtgacgccggggctgaccatttcagcaccacgatagtgggccatggtctccaccacgccctcgtccaggtgcaggccggtggtgatgaggccttcgccgtaaccggtggcgcaggagcgtgcgatccatgcgccttcgggcagctcggattggatcttcttgacgatgttgatggcggcggtcagcgggctgccttcgttgttggcgtagctggaccagacgatttcacggtcgtcattgacgagcgtggccttgatggtggtggaaccggcgtcgatgcccaggaagtgcgggccatgcgcgccttcgagggtgccgatgtggatgtgttccttgtggtggcgcttgttgaagtcctcgcggtcggcctcggtggggaacagcggcggcatggtgggcgtgttggagggcaggttcttcagctcgtccagacgcatgaggatctcatcgcaggtgtgggcctcgaaatggtggccctgatcgtcggaatccatgtcggcctgcaatgccgaaccgtaggccacatacaggtgggcgtcggtcggcacgatgaactcgtcgaccttgccttcaagggcacgctggaaggcggcgcgcagttcggacatgaagaacagcgggccaccgaggaagatgacggtaccgtggatcgggcggccagcagccaggccggcaatggtctgcgtggccactgcggtgaagatggaggcggcgagatcaggcttggccgcgccgtcgttgatcagcggctgcagatcggttttggcgaacacgccgcaacgcgaggcgatcggatacaggttctcgtagctcttggccatctcgttgaggcctgcggcgtcggtgtcaagcagcgtggacatctggtcgatgaacgcgccggtgccgcctgcgcacgaaccattcatacgctgctcgggcgtgggcttcaggtaggtgatcttggcgtcctcgccgccgagctcgatgatgacgtcggcctgcgggtattccttgtcgatcgcctcggtttcggcgatgacctcctgaatgaaaggcacatgcagattgtcagcaagcgccagaccgccggaaccggtgatagacaggcgaatcggctcatcgcctcgacctagttccacgagctctttacggatgtcgaccaacaggccggccacggtggcacgcacgttggcgtggtggcgtcggtaatcggagaagagggtgtctttcagggaatcggactgatcaagcaccacggccttgacggtggtggaaccgatgtccaatcccacacgcaggggcttcgggtgtgaagcgggctttacgctcgcgtcagtgacgatgtcaaccatgtgttcctcttaattccgacttccgggtatgtgcgccttcaggcatcatgagccgtttcgggacggctggcagatacctgcggacggcttcgcccggctacttcttctggaatattagtccgaccacctgcccaacgtgacgccgggcatggtgatttcgctcacgggaagggcgttccccaacagttccgacgatattgctgagtgcggcattccggacctgctactacgaggcctgttggccttcgccggcttcgcggtctctcaaatagatttcggggatatctcgttcttgatcgtggagcttggcccagatgaccggttcgccggcttctagggacttggacacatcgaggatgcgctggtttctggagccacggaattgcagcagcgagtccttctggtctttgaggtagcggccatcgacgaggatgtcgataagatgcagcaattcaagcttgtctggtgtttctccgaggcgcataagctcttcccatgtgtagccggtccacgaccagatatctttggtatgaccgaattcctggcggatacgttgtgcgagcggcaccagcacgggagtgttgaggaatggctcgccgccaaggaacgtaatgccttgcacccatggcgctttcaggtcttcgatgatcttgtcttcaagtttttgcgtgtattcgtggcctgcttggaagtcccagatggaggcgttgaagcagtcgacgcagtggaaggggcacccggagacgtaaagggagttgcgcacgccttctccgtcggtgacgatgaaggttttgtagtcggcgatcatccgcttggacatgcgccggccatcccattgaccggctttcggatcgttggcaagaccgttggagggtacggaggggccacgcccggtctcgccggccgcaaagtcatggcgcttgggttcgggcttggtcgtatgcaactccggcatgattccctccttgcggaaagcattagctcccctctttgagggggagctgtcgtcgtaggcgactgaggggagcttcggaatagctcttcggactcccctcagtcagctttgctgacagctcccctcagagaggggagcctactcacgaataaccctacttggcctcttcgaaccactcgcgggtggtgccgtcatccagcgtcacacgaccggtttcgccgctcatgtgcttgactcggtgggcgatctcctcgtgacggccgtgcaccatcgggcgctggaccgggctgccgaggtagccgcaggtgcgcttggtgacgttgcacttgtccgggttggagttaccgcactccgggcacttgaagccttcctcggtcggctcgaagtcgccctggaagccgcacacgaagcagtggtcgatcggggtgttggtgcccaggtagccgatgccgatgttgtaggcgtaatcccacacggcttcgagcgccttcgggttgtcctgcaggcacgggtactcgcagtagttgatgaagccgccggaagcgtagtacgggaagtccttctcgtagctgagcttctccatcggggtgggctgcaaccacaccgggtagtggaaggagttggtgtagaagtcgtggtcagtcacgccttcgatacggccgaacttttcacggtccatgcggttgaagcggtcggtcagggattcagccggagtggagtacacggaatagtggtagccctccgctttgctccactgcttgcacagctcgttcatgcgcttgacgatggacagcgcgaactccttgccttccggatcccagccgtggtcgcgaatccagttcttgccgtagaagaccgcggtggtctcggcaaggccgatgtagccgagcgacacggtggcacgctcgttcttgaacagctggtccacgttgtcgttggcaccaagacgaccaaacgcaccgaagcggaacagggtcggggcgttgaccggggtggcttccttgcagcgcatgatgcggaactggagggcctgatgggcgacttccatacgctcctcgaacagcttccagaagcgagccttgtcaccgtgggattcgatggcgatacgcggcacattgacggtgaccacgccgaggttcatacggccatcctcctcgtccttgccggtctccgggttgatccaaccctgcaggaaggagcggcaacccatcggagccttgaaggagcctgtgatcttgacgatgttctcgtagaacaccacatccgggtacatgcgcttggtggcggactcgagggcgagctgcttcaaatcgtagttcgggtcacccgggtcggcgttcacgccgtgctgcacagtaaagacgagcttcgggaagatggcggtgtggtgttccttgccgaggccgcgaatacggttcaacaggatcgcgcgctgcacctcgcgggagaaccagtcggtgccgagaccaaagccgacagtcacgaacggggtctggccgttggacacacggttggagttgatctggtattccatggtctgcatggcatcatagatggccttgcgggtacgaatcttggcgaggatttcacgctcctgctcaagttcgtcaacgtcggtgtggaacggggtgtccatcggcagcggttcacgggaaccgaaatgcagcttggcgggctcgttcttcttggcgctctcgacctgacgacgggcgaattcaaccggcatgccgtcggggatggtctcacgagcttcctcaaggaacttctcgtaatccttcttggcatactgggcaagatgctcgtcggcacggttggcggtctggccaccatactggctggaggccacgtccttcatgatctgggtaatctgggtggccgcaatggcgatggacttcggggaagccatcggagcgttgccaagagtgaagccattggccaacatgtcccagaagttcggcaaagagcagttggactgggcagtgaacggcgagtagtcggcatcgtggaagtgaatgtcgcccttcatgtgggcgttggacaccgccggcggcagcatgttgaacgcggcggccttggacacggcaccggccagcagatcacgctgggtggagtagacgttggaatccttgttcgcgttctcgtgaatcagggtcgggtcgtggttgatgaagcgggaaacggcctcgttgacatcagtggccttggcacgctgaatgtccttgtcgagacggtagttggtgtaggcgcgagccacatcgtacaggtgggcgtcaatgagggcgtgctccacgaggttctggatgtcctcgatcttggcggggccggcgtaacgccccttgatttcgccttcgacttggttggcgaaaccacggatcatggcatcttcttcggggccgacttccttgttcaggtcaccgaaagcagacttgaccgcagagatgatgttaatggggtcgaagtcgaccacacgaccatcacgcttctcaacgagcacggtggaggccttggcggccaccttggtctcgttatcggtgacgatttcctccaacacctgtgcgcccatcgggcacccctttcctataaggcgaacactctcctgagttccgcattttggccacactcgacgtgggccacacgaaattacattgatgtcgtttttttgaacctctagaagaatacggcatctccaccactatatctagtgctcaacagtggtgtgtcgaactatttatagggttttcggctattttccgccaaaaccacaagtgtgtgattagcgtaactgttttctgctcgcgtgtcgcacagcgagctcactaacgactctcaatcgtcagcgcaacgcatatctcactcctcttcatagcacccgtttcttcgccataatgactcctttcttctgatgcaccagaccatctccatcatcggctgatacatcgcttcgtacggttctcgcattcatcatcacaccgttttcaggcgacggtaaatatttaccgtcatcaaccaacgcacttatagtggagtgcatgactactgcaatgggctacccatctaccggccgtccaccgaccgccgcttcactggcctcggctggctttgagccgggtcaaggcactttcgcgcctgatcagggcaccatcaatctgccgaatgagcctcgccctatcgatcagctgcctgcacgcgccgctgaaaccagcgcgcaaaatccgtggccggtaagtgtgctgagccagaagttctacggtgccgtggaacgatggccgtccgcgtgggtcaccggccagatcacgcagatcaatacccgtcgcgccggctcggcctacatcacgctgcgcgacgacttcgaggatatcgccatggaagtcaatggcttcggcaggttcgcggccgcggccagccagttcgttcagggcgaccgcgtggtgattcatggcaaaccgaacctgtggatgaagcgcacttcgctgtcgttgcgcggggacacgattctcaaggtcggagccggtggcagcctcaaggccatgatcgacgaattgcgcaagcagcttaagggcgagggcctgttcgatgccgatcacaaactgcctctcccggagtttccgaagactattggcctgatttgcgcacctcaggcacgcgcggaaggcgatgtgatcaccaatgtgaaccttcgttggccttccgtaaccttcaaggtggtccatgtgcatgttcagggcgagcaatgcccggccgaagtggttcaggccattgcacaactcgatgccgacccgagcgtggatgtgatcatcgtggcccgtggcggcggctcgtttgaggatctcatcggtttctcggatgagcgtgtggttcgtgcggcgtatgcctgcaccacaccattaatctcctccatcgggcatgaggatgactggacgttgctggatctggtcgccgatcttagagcctccacccccaccgatgcggccaagcgcgtggtgccggatgtgcgtgagcagtcgcagctcatcgaaggtgccatcgaccgtatgcgactgcgggtccgttcgcgcgtggagaacgagattcgacttatcgagggatatgcgaaccggccaagcctgacccaaccgcataccatgctcgaaccgcatcagcggctgatcgacgattccctgcagcggcttgacatcggcctgcgacgcatcgtggacgatgcccagctcaccgtcgagcgagctcacgcctcactgaccgcactcagcccgcaatccacattgaatcgaggctatgcggtggtgcagtcctccgatggccacgtgctggatgacgcttcgcgggtcagtaccggggatgacatcaccgtcaccctgaaaaagggcgtcattaccgccaccgccacatccgcaaccgcaaccgcgtaatgcaccatatgcattcacgcatatataccgtatatataaggagaacaagatgaccgagaacgccacacccaccgacaagaacacccccgcctcgtccctgacggacaaggaacgcgagctcatcgcccagatgccatatgaggaggcgcgcgacaagctgattcaggctgtccaggcactggaaaccggcggcctcaatcttgaccagtcgatgcgtcaatgggaaatcggcgaggccttggccaagcgcgcccagggcctgctcaacgacgtacgagccaagctcgaccaggcacaagccgagcaagccgccaacgaagccaccgcaggcacgcagtccaacctcgactgagttgcctcccggcgcggcatcatcgtgcaagcttgcggatgatgccgatgcgctcctgcatggcggagcagatggcgtcaatcacatcagcggacagccggcggttggtggcgagctgtgcccgtatcagttcaggcacctcgtcgagcatccccaaatcataacggtcccaatcgtcgataagtcccaactgccagtaggcgttgtccgcatcgccgtagtcgtcgacccagaacggcttcgccgggtagtcttcgttggtgatggcttcggggtccatgccgttccacaggctggcgccgctgtcaaaaatcggggccgggcgaatctcgaatgattcgacgtcacggatgagaccgaagttgttgtaatgccggtcggtgttgcgcagaagaaaatcaaggaacagaaaatcgttggtcgccgcatttgccgtatcatgacttacgccgagttgctgacatgcgtccagccatatcatcttgcgttcggtgttgtcgccgcgtcggaagatgcgcataacctgccctgcgggaatcagctcttgcgtgtcttcgagcatttcatcgcagacggagacccggatgcccttggcgcggccgatgcggtattcgacatggtcgatgccgaacagtcgtgccgtatgccaggcgatgcgctcgttgtccggctcctgaccggtgcgccctcccttgatcaggctgcggacgccatcgggaccgataatccaacgtttcggcaggtcaccggcactggtgacatccggggtgttcacgttgccgatgcgcgacgaattaccgaagaataaggcctgcccaagtcgttcgtcaaaatcgttgtggaaaaagttcagtttttcccacgtcagatcgggccggtcgagaggccgcacccaatactggtccgacaggctgagtcccaaggaacggtccagcagatcgttcgtcgaagcgatacccgaaccggcaaatacggaacgcataccgtcacgggtcatgggaatgccgcgagaacgccaccacccggtaatcgactcaccggtgggctcaggtttgccgtccacatacatgccgatcgggattcgggactcgtcgtagatctcccctgccctcagggcgtatccgccgcgttcgaaatactcgaactccattaccggatgggtacggcacatcagcatgcggttcatggtcatgtgcgcctcccgttattcagtccaccgacgatatccgcgtcatatcccatcctatccgctttaggactcgtatatgcggcccactgaagcttcagcgccaaatcatcagtcagcatcctttcccgcgtcaattactcatccgcggcatcccgcggctcgcatctgaatccggactggactgagttctgcttcccggcatacgatagtggtgattaggccacattggtagcagttatagaagggaaatcccatgtcaacgctgattcttgtattccatccgcacctgaaggacggctcgcgagtgaacgcccgtctgcttgccgaactcgccgcacaaggcgaggacgacatcatcgtacgcgacgaatacgccgaatatccgaacttctccgtcaacgccgacaaggagcacgagctactggaggccgccgaccgcgtaatcctccagttcccgttctactggtactcctcccccgcgctgctcaaggaatgggaagacgaggtcatcaccgcaggctgggcctacggtggaggccacgcactcaagggcaaggagctcaagctggtggtcaccactggttccgacgccgccaagtaccgcaaggatggcgagtacagccgcaccatggaggagctgctgagcccgtttgaggtcgtggcgtacaagatcggcatgaactatgctgagccgttcctggtgcagggcaccgccaccatcggcgatgcggagctggatcaggccgccgccgattatgtttcggcgattttggactgaataagctgaggccgggtgcaagtcgcacccggccttgttgtttcgcgggctagccgcggtctctcccagtcagcctgcggctgacagctccctcgtcagagagagcttattttttggatcagagggagttgatagctacttcttcaacggcacgtagatcacgtcgtcaatgagctcgcgatagtgctcaacgatttgcgcgcgacgggtcttcaggctcggggtcagcatgccgttggcctcggtgaattcgtctggcagaatctcgaacttacgaatcgactcggcgcgggaaacgccctcgttggcggcgttcaccgcacgctctacctcggcatgaacgatggcgttcttggccagcgaggccagatcgggttccggtttggcgccttgggattccaaccagttgttggcatccgccagatccagcgtgaccagagcggccacgaacggcttcttatcgccaataaccaagcactggttgaccacgggcgaggtcatcacggaagcctcaagcagacccggcgacacgttcttgccgccggcggtgatgatgaggtccttcttacggccagtgatggaaatgaatccgtcttcggagatatcgcccaaatcaccggtgtgcagccagccatcggtgatctgctgggtggtgacctcagggttgttgtggtaccccttgcacaccagcggtcccttgatcaccagctcgccatcctcggcgatgccggcggtgatgccgcacatcggcatgccgatggtgccgatgcgattgtcttccggcaagctcacgcacaccggaccacaggtttccgtcatgccgtagccttccagcaccggcatgccgatgccgttgaagaagtgggagagctcggaatccatcggggctccaccggtgacggcaaagtcggcgttcgggccaaagatggtacgaatcttcttgtacaccacctgctcgtagaaagcgtgagcaatacgaccgggaagcggcagcttctcgcccttctgctcggccttggaccattcgcgcgcgttttcggcggcgcgcatgaacatcttgcccgcaaaaccgctgccggcacgctgggaggcggcgttgtagaccttttcgtacacacgcggcacggcaagcagcagcgtggggccgaaggtctcgaagtccttgaccatggtcttcatattggagctcagggccagagaaatggtgccgccaaaactgaagaattccaggaatcgggcgaacacatggctcaggggcaggaacagcagcagacggcggttgggccatgcgccggcacgaggcatgtactgcaggccggagcgcaccaggaacgcgaagttgcggtgggtgagctccacgcctttcggggtgccggtggagccggacgtgtaaacgatggtggcgcggtcgtcgccgtgggaggcgctcttgtattcccagaattcggcatcggtgacgctttcgccataggtcttgatggcgttcaggccgcctgcttcgatgacgaacacgttgcgcagggtgggcacctcgctgcgcacggattcaatcttgtcgcgctgaccgtcatcctcggcgatggcgagcgtgaccttggaatcgttgagaatccagctgacctggctggcggagttggtctcatataccggcacggtgagtgcgccgatggacatgatcgccatatccagagcggtccactcccaacgcgtgcgagacacgatggccacggagtcgcccttgttgacgcccagaccaatcaggcctttggccagatcgatgaccatgtcgcggaagacctgggcgctgtacggctgccaggtgccatcctcagttttatattcgatcatggcgccatcgggatcgcgcttggctcgctcatcgagcaaatcgaacaggttgatgtcgctgtcaatcggctccttgacgggattggtgaactgcttgacgatatgagtatcgtttatggccttatcagcgatgttttcagtcatactccccatgtaactccacggatgctacaaaacacgcgcgaaacaacggattgtccagaccaaatggccccggcaatccgttatttcgggcaaaccaggtaaatctgtcgcaccgtacattcagcagattactcggcggagtcattggcctttttcagctcgtcgcgaatctcctgcagcgtggcgagagtctgctcttcaacgctaggcccctgttcttcagcgtcagcctcatcctgggcagcagtgagatcacgaagcttattaatcggcaaaatcacacagaaatacaccgccacgccaacaagcaggaagctaatcagcgcgttaagaatcgcaccaaatgaaacagtcgagttgttgaacgtgatggtcagcagtccggaaagatccggtacgccgccaatcatgccgattaatggactgatgagattgtcgacgatggaattgaccacagcggtaacggcagagcccatcaccacacctaccgccatatcaatcatcgatccgcgcgacaggaatttcttaaagccattcaacggacctttatcggtcaaagcaacaactttgcgagcggttcctcccgtggccttggcaaagtcggtggcaatattcatgggattgtggttactcataacggcactccttacgaaattcagacacttcacttgtatccgactggttttcccacgactccattatgccgcttgttggaatatccctataccactgcggcgtcccgtacgtgactatgtacgagaacgccgccacccctgtttgctgagaacctgttagagctgcttagaactgaatgtaatcgacttccgtatgttcgccggtttccaagtatttcgccacatcatcaggaccgacgaacaccagttcgaccgcttgcgcaatcatcagattgacacgatccattggcgtaaggttttcgaaatagccgtacaccgggattcccagcgcatgcgcatatccgatttcgaacatcgtgcccgggtcctcgtccataagattggcgaccacggctttagcagcattaatgccatggatatcgtccgcaaagcatccttcagggcctacttcttcgatctggctgacaaaccgcggcttgaacagtaccttgccatggtcttccaatatcttttccaaacgttccatacttgacgtttgttcaggatcaaagaacggaccggccacatagaagtcatactgtttgtcttcactcatggtctctagtcatagcgcagcaacgtcggacgccagccgttattttcactgtatggacaaggggtcgtatcgtgaacattactacgggataaccgtcaatgactacgtacgttgcccccgatcagcacactccgccactttcgccccctcccgtatcgtcgagcacgcgaaccaagccgaccaaatagccgccatcccatgcgctgattaccgtatccgaatgctgcaatgccttgaacaaccgttcgggccactgcgccgattcccaaccaaccgacttgaacagcgcctcaacctgttcgacagtaaaccgcttctcttccgtgtattcgatagccatggaccctcacgataaccgtgaagccccacatgtctttgcatagtttcacatgacgggatgatggatggtggaacctatacgtttacacatgcctaatgcctatggctcatcaccgatgaatagaggctgagataccgtcatgtttccgaagccaagtgcccgagatcggattcgaaccgacgacacccgctttaggagagcggtgctctatccactgagctactcgggcaacgacgtttcattgtacacggccgcacgcccagtcgcatcatgttcgcgtggcagcctacataagacgcatggcagtctgtgtaagctacctggcagaacccgccaccaaggcatggccggttttcgtgctggtttggtgcgaactgctcttgcgcacggcgaaaagacactgaaagacaagccgcacacggtacagtggcaaatcgcacgaaaagcaaggtaacagtaaacaagccggaggaaagggcagcatggcaaaggcacggagtactaccacaggtgcaagcgtacgagctcgcgccgctgccaagccacgctctgccaaagccacggcacgcccagtatccaagtctgccgtgaagccacacaaacggcatcgtctgcttggttttctcgccacgatgttcgcgcttcttgcccttgccggcactgccgcccgcgcgctgcctgccgatttacaggaactgccatttgtgccgattgtggtatcggcaacgccctggttcacgttgcttggcctgattgccctactgttggccatcgtgtcgcggcgtatccttgccgcactaatcgccatcgccgcaatcgcatgcaatggctattggcaatatccgttcttctactcgaccgacccgctcccccaagccgcgcagaacgccgtggctgcggcctcccccaacaccagcgatgcctacgcgcgcgtcatgaccttcaatgtatacaaggggcaggccgacccacaagccatcgtcgaactagtccgcgatcagcgcgtcgaagtgctcgctttgcaggagaccaccgaggatttcgtcaaaaaactcaacgaggctggcattgagcactatctgccgtatgcgcaggtctcatcgtctgacggcgtattcggtaacggcctctggtcggccacgccacttgccgatccggccgacgatgacgtgaattccagcgcctcattcatgcccggcggcacggtggatatgggtggtcagcagattcgattcgtatccgtgcacaccaccgctcccgtacccggctattggcggcagtggaagcgatcgctggatgagttgggtccgatgcgcgggcatacggatacacggtatattttcatgggcgatttcaatgccacttacgatcacacgccattccgtgattttcttggcgaccggttcgtggatgccgcacgtgaatccggacatgggtttacgttttcgtggcctacgaaccgcgtgtatatgccgatgttcgccggtattgaccacgtggtgcttgatcagggcatgaaggccgggcaatgcaaggtggtcaaagtcgagggctccgatcatgcggcgttgttggctaccgtggcggttgggtgatttcgtattcctcggccagccgcatacactgggacacggcttccagaatcgcctcgatgccggacttcttgattgagccgtcatcctttaaatacttcatcaggcgcactgtggatttggtgctggcctcggggtcagggcgagcgccgggagcggcgtcgacgataagcatgtggatagtgttcgaaccgatatcaagcacaccaagtcgcgtggtgcgcgaacgcagattgaccatgatccctattcctgaccttacccaacccgtgatggccgaacaacgggccgaccatcgcaatcagccagccgtgcgccaccatggcgagtcgttcggccggcaaccaacaccgcgaggccagccgaacatcacacaaactcgactaccgtacaacaatcacaccggatgccgcgccgttcacaacgattcgacgaacgttccgagacgttccagcccctcggtcagggcctcacgtgaggcggcatagctcaggcgcacatgcgtatccgctgtggccgcaccgaagtcgcggccaggagtcagagccacatgggcttcatccagcgcgcgttcgcagaacgtccaggcatccagaccagtacgggagatgttgaagtaggcgtagaacgcgccattcggctccacctcaaccggcaaaccgatgcgcttgagcccgtcaatcacaatgcggcgacgggcaagcaattcctgacgacgagcttcacattcggccaaactctccggcgtaaaacaggcgagcgccgcatgctgggtgggcgtgtgggcgcacaggtagtagttggtggccaggtcgtcgaccgcttccagcacggtggggtcgtcgggcagaatagcccagccgagacgccagccggtcatgccgaagaacttggagaagctgttgcacacgatggcaccgggatcgcaggccagtacggacttgacttcggtgccgtccggctcacggtcggccaaatcaaggtaggtttcgtccacgatgcgccatgcgccgcggctggcggccagcttgcacacctcgtccaatacgttgaagtcgatggtggtgccggtggggttggacggcgacgtgatcattacggccttggtcttgcttgtccagtactggctgcacaggtcggcggtcaggtggaagcgggtggcggccgaggtcggaacgtcgatgacccgcccctcaaaggagcgcacaagttcgcggttgcacgggtaggaggggtcggccacaatcacatcgtcaccggggtccacggtcagcgcggtggccaacagcagggcggccgaaccgccggcggtcacgcagatacgcttggggtcgatgtcaaggtcatgacgctcgcggtagaagtcggcgatggcttggcgcagttcaggtaggcccatggcggcggtgtacggcagggcccggccatcgtactgttcgcgcatggcgtcgcgtacggcgggcggcgcgccgaaatcgggctcgccaaggcttaatttgatgacgctgataccttgggcgatcatcttgtctgcttgttcgccgaataccatggcacggaagggattggcctcacgcgctcggcgggacatgactggagacgcggccggagattggggctgctgcgctgcttcgttttccatatttcggttctatccgcctcacgggacaaggtttcttcttctataatcactgtaggtcgattgagtgtccaacccgtattcaaggaggaataatgagtcgattcaatggcaaacgcgccgagttcgaggccagcggcgaaaagatcaacgtcgcgattctgggtgcgggccgcatagctcacaccatggccgacaccctgacccagatggctgaaggttcactgtattcctcatggattcacccgtatgcggtagcggcccgtgatattacgcgcgcgcaggcttttgccgaccaatggcattttgacaaggcttatggatcgtatgaggagttgacggcggacccggatgtggatctggtgtatatcgccaccccgcacagtctgcacgccgaacaggcgatcctgtgtatgaaagccggcaagaacgtgctggtggagaagtcgttcaccgcgaacgccgggcaggcacgtgaggcgctggccgtggccgaggaaaccggcatgctgtgcacggaggccatctggacgcgctacatgcccagccgcaagctcatcaacgaagttatcgagtccggcgagatcggcgaggtgaaagcggcgagcgccaacctgtgctatccggtgtccggcaaggcacgtatgaccgatccggcctgtgccggtggcgcgctgctcgatgtgggcgtgtatccgctgaacttcctggatatggcgatcggtgccgaccatggccgcacgctggatcatttcgatacgtcgatgatggccgccgaaaccggtgtggatgcacagaattccaccacgttgtattacgatgatggcacgatggccgtgtccaccagttcgatgctggtttcctccgatcgcggcggctacgtgtggggcaccgaagggtatttggtggtcaccaatatcaacaatcccgagtccatcgatatctacaacaacgatcacaagcccgtgcgcagtgttgcggtgccgtcgcagttgaccggttatgagtatgaggtggccgatgcagccaacgcgctgctggatggcaagatcgaatgcgaggcgatgccgcacgccgacaccatccgcatcatggagctgatggatgcgattcgcgaccgttggggcctgaagttcccgtttgaggtctgatttcagctcccctccagaggggagctgaaattattccgctgaatctgcatctccttcaacaatctgctcatacagccgtgcgaggcgttcgtcacgcacggctttcgttaattcgcactcccatacggtaattacacgccagccggcggcctccagttcagcccgctgcgcgatgtcccgattgtgattgcgcagtagcttcgtctgccagaattccacattcgatttcggcatcgaatgtttggaacagccttcatgcatgtgccagaaacagccgttgatgaacacgatggtgtggtatttcggcagtactacatccgggtggccggggtaacgcttgtcgttcttgcggaatcgcaaacccttgcgaaacagatagctgcgtaccagcacctcgattttggtgtctttgccacgaatatgcgacatcgtgtacgaacgggtgccccgctcatacttctccactggctgtttcttgcgattcacgcactccagactaccgtgacgttgcggcgaggatgaaagcctgaacgaacaatcacccatcttgcccgtccgtgtctcttatcgcgggcaatgatcatctgccggtcgagactgcacgattagaccgaatcaaatggatgacatgatgattcgtagggccacggcggccgatattccccaaatcgacgaactgctgcggcaggtgctcgaagtgcatcatgccggccgaccggatctgttcaaaggcggtgtcaagaaatacacggacgaggaattgaaggcgattccggccaacgatcagacccctgtgttcgtggcggttgcgccatctgccaatgacggcactgacgtcgaacataacgccgactcccccgccaccgaccaagtgcaatggcatagcgccaagcgacgtctgctttgcgagatttgcgagagatgaatgcgataccagcgttcatggctatgctccttaatccaatatcaatggatgaacctgcactgccccgtatgtcaccatcataatatatcgaatatcaatataaagatatcgaaaatcactttcaccattcacccacacacaccgcgacgcgatcgaccgttcttgccttgctcgcagcatccacgaccaacacgggaaagtcactttaaaaaagcactttatcaatgtggataactcggaagctagaaccacatacccccgttcagcttgccaatcagaaacctcatcccataccgtcagatgcacccgcacgcaacgacgcgtcagacaacagaaagaaggaccaatgaacatctctacgtttacccacaactcccacccggcaattcggcatacgcattttgtctagtgcgagattgagagttatgatgacacgaagaaaactcatcatcaagaaacttcggcaagcggcaaagcagcgagggctcgatttctatttgttacggcaaggcagcagacatgaggtttactgcctggacgggttgaggatacccatcccccgccataatgaagtctcagaacgaaccacgctggatatcatcaacgagagcgagcagaaactcggaaaggggtggtggcaatgagcaactatgacgtgcttgtgcaacccgatggccgatattggtacgttcaggtaccagctatcgaacggtcgacccaggccaaaggacttgacgatatcgagccaatggctaaagatctcatcactgtcatgaacgacgacgacaatccggagctcaaggtgacgtttgtgttgccgaaacaagccaaacaacacgtaacagaaatgttccggcagcgcgaaatagcaaaaaaagccaacgcacaagcggctgccgaatcccgactcgccgcacgggccctacgcaacgagggactcacgtatcgacaaatcggagctttattgggggtctcctaccaacgagcatttcaattggtcaacggcaaaacaaagcacaaaacgacagcgtccgaatcgcctcagccaacaactgaatcacgctccccacgcacgcaccatgccacaccgctatcgactccggtctcggcttagcgaacgggtccacaaagcccagactgtttccgcctcccaagctcaagagcaccgagcaggatcttctcatcccagcagattgaggagatcgtccttggtgagggtggcgatggaggcgggagcttcggtgagggcgctggcgccggtgccggcttcgtcggcaagcaaggaagcatcggtgaactggcgggcgagctcgctcttggtatgctgaagctccaagatgcgttcttcgatggtgtccttggccaccacctgatacacgttgacgtcttcggtctggccgatacgatgtgctcggtcggtggcctgatcctgcgcggcagcgttccaccatggatcggcgtggatgaccacgctggcaccggtcaggttcagtccggtgttgccggccttcaatgaaatcaggaaggcgggcgtatcgtccgcattgaactggtcgacgagttcaagacgcttctttttaggcgtggatccggtgatggtgtagtagcgtagtccttgcgcgtcgaaacgttcggcgatcagatcaaggaagctggtgaactgggagaagatcagcgccttcttgccttcattcacgcaggtttccaccagttcggtgatggcggcaagcttggccgactgatccttggcatcggcatacagcagccttggatcacagcagatctggcgcaacttggtcagctcggcgaggatacgaatcttcgacgtgttgaaatcggcttcttcgctgtgttcgagctgcattctgagccgctgctcgtgggccgcatacagtttgcgctgttcgccggcaagctgcacggtcagcatggtctccaacttgtccggcaaatcggtcagcacttgggacttcaacctgcgcttgatgaacacgcccaccaacgactgcaattggcgagacacccgggcggcctcaggattgacctgtgcgacggcccgaccttcggccgtgctgccatctgcagcccgggcgttggagatgggcaactcgtaacgctcatggaatcgcttgtatgagcccaatagtcccggcatcaggaagtcgaagatgctccacagttcggagagtcggttctcgatcggcgtgccggtcaaggcgaaacgatggtcggcggccacggccttgaccgctttggctatcttcgtggtgtgattcttgatgtactgggcttcatccagcgccatgacattgaaacgttgctcattggcggtgtaatcatcgacatcccggcgcagcaggtcgtatgaggtgatgagcacggtgggttcatccgcccggaacgcgcggccgatggcggtgcggcgctcggctttggtaccggccaccaccacggcgttgaagctcggggcgaacttggcgaattcggcaccccagttgtacaccaaggacgccgggcacacgatcaatgatggatgcggcccgccatcttcggaatcgaaagtaatatgaccggttacggctgattcactattaacagcattaccggcatccatgccttgagcggtcggcatgccactagattcgttgtggtatcgcgacagcaacagggcgataagctgcacggatttgcccaaacccatctcgtcggccaaaatgccgccaaaacccttgtcgcacaacgtgttcagccattggaagccttcgacctgataagggcgcagaatatgcttgagactatccggcacttcatacgacttagggtcgatgatcttgagatcgtcgatgtattcggtgaacgaagcgtccttgactacatcggagccgtcatccggcagctcaccatccagtaggaatgctcgaccgcccggcaactcgatcagcccggagttgagctgctgctcgctcagatcaaggtcgctggccaatcggtccaacgtgctgagattcgcgccgctgagtttgaccagcgtgccgtccttcaactgatggaatcgttgacgccgacgatacgaagacagcaaggcacccacttcgtccggcggtacttcatcagcgaggggtgatatctccaccaaattgcctttgatggacaatccgactttgacgcttggcggcttgggcgcgatcagccggtcaaaagccggtgtggtgaagacctcccctacttccttcagtgcgggcaatccctcgtcaaaaagacgaacaatctgcgtggtgtcatcgcgatcgatagtggccgcatcagacacgaattgtttggcggtctttcgcgcggccggcgttcggaacccattcaccgtctgatgagtggcggccgcaacgcgcttgcgctggtcaggcatggtaaagaattcacgcactacatcaatcgcaagatgctcagcgtcgaaatcacgcccaatcacgccccgagacaaggggatggaacgctcatccctagcatgcaccgtcgggccatcgggtagcaacgggacaatggcatcgccgtagtgtgccttgacctcgcattgcacaccatgctcatcacgatccagataaaactggaggctgcattccgtaggacttaattcagccagctcgcgaggaatctcactggcctccaacagtccggcaccaaccagctgaggcaatagcgtgcgtgcgaacagggcgatgtcatcaccggcaatgacctgcccctcgccatcgggttcaaacaggtctcccaatagtcctcgcaacggaatcaatcgtttcgggcaacggacgaatcggcatcccgctgcgcttttacgctgagagcccgccatcatggcggataccgcaccggccggattagtggaggcgagcaacagccatacatccttgccaccatcaatcacggtttccaccgccggcactccggcaagcaggtatccggcatccggaccatacgtattgaaatcacgccgcgcaatgcgcataagaaaatctggctcgccaccatcaaccggcaccgatgcagactgcccggagaaccatgtgttcaacacgagctgtacgcctctgccctcacgtacggacagcaaccgggccacttccggtgctgaaagtgtcaggtgacggtcgatggcgatatgcccgtaataccggtcctgctgctcggccgcacgacgcacggccatcgcgtcgtcaaggaagcccagcagtgggcgcgaatcatcgtcgaacatatccggcgtatgggtaaaggcaagcttctgcccataatccgtatagtcgccgttcgccatggtaagcacaaattgcggaatcgatttcagtacatagctggacccattggaagtcgatccgatcttgaactccacgctccacacgccatcgatgaaactcaatatcggaacaagctgcacctgccccaagcccacagtctcactatcgccctgatacccgccgcctcgggtgccggcacgagagccgtatccgctattcgtacgtcgtccacctgcgccatttcgtccttttgcagtatcgaatcggcgcatgagcgcattgcggcgacgcgctttggcttgagcatcttgcctatcgacgtgctccatatagtcgatcagcgtccgagacggcctcacagccccggcacggtacccttcaaaacgctgcggatcatcgcagaatatgaaggcgagcgcaatcatgtgcttgcacatgccatagccacggccgtaagccgggcatgagcacttgccaccgacggcttctcccgtgtcgaggtcgaattgcacgctggtacgatacttactcgatgggctggtgatgccacgtagaatgccgtcaagctcggcatacccggttcgatgattttcgctgtataccggattgataaccatggtggccgctttgcgcgcaatgctacgggcacgagcgagcacggcattcgacgatgacgattccacatcgttgcgtaacgcaaggatagggacggcatgggcttcggcacgcttcgcagccccggtgaaatggccttcgtcctcatcttcgaaccatacggaacgtccttgcctgaaacgatagggcataaccgcatcggcggcggacaaactgtccgttccgccaaacgttacggctctactgccggcagcgcctgcgccaccaagcattccatctgcctcgccagagataccgcctataccgctgctcttgccggcaaagagacccctgtcctcattagtgccatctgtgtcatctgcgccataccgatcatcgtcgtaatcggcaccttcgtcgcctccccttttccaaggattgcgacggcgcaacgcatggccccaggaaacgccggaatcatcatcctcataaggcaggaggtcatcgtcatccgcattatcgggaacatggccaaatacaccataccctttgctcatgggcgagcctcctttccagcgaatgcatttcagcccaacacttccatcctagacgaagcgcgcggtagccttaatgtatggatgcagacaagccggcgcaacgcaaatcctatgcagggaacaccaccctcgaaatcttcgaggtgctgtggcgtcacagctactttggacatggcctgaccgtgcggcaaatactcgatgaacttgcccgtaaacaccagctggaagatccaagcgagctgccgaccgagaaaaccatacgaaatcagctcaaaaagcttaccgccacggaatttctcggcaggcatatcgggcatctcaccgaaagcgaccttgccggcatcgaatgcaagaatccacaacccggctggtatcttgacgcattcctatccaccgccgaaatgcgactgctgctcgacagcctcactttgtctcgcatcagcctcgacaccatggacgatctcatcggtaaaatccgcgaactcgcaggtgccgctgggcaagcagtaggttaccttgatcacgtggccacctacacgcatatcaacggcgagttcctatccaccatcgaccaactgaatcaggccattgaagaaggccacggcgtaaccttccaataccgtgattacggcccggatggcaccctgataccacataaaagccgtacgggtgcaggtcggatcacctacatcgccgacccttatcagatggtgtacaagaacggacggtattacctcatctgccacctgcatggcgaggataatctccgcattttcgtggtcaaccgaatcgccaacgtcagcgccaaaggcaggaacggcacagtgccactggaaaaaccagcgccggctgattttgatgcagtgaacttcatgcgtcaccgcccgtatcccgtagccgatgccccgattcgcatccgcatggccgtacgagacgaatccatgctcaacaatgtgttcgaatggttcgacgaccctcagatcaaacattcgccggacggcacacagttcgaagtcatcgtcgatgctcccgaacgcgccgtgttctggtgggcattgcagtattcctgggatggccgcgtagtgattcttgagcccgattcgctcaagcgcaaactctatgatgccgggcgtcgcatggccacagcctatgctcccgaatgatgcagcatcacatcgcacacctccttgccgagttgttcaccagcgaatttcaccggagaacctatcatcccatcgccaatcacgttcggtaattttttaccgaacaactcgatttcaagccattccacgaactatggcccccgcctagccgtacttgacgctaaggtggaaccatcacatgccgcgatgcacatgcaacgcaaacgcaacgatatgtaaggagcaactatgagcgaagagcgtaccgcatggggatggggtctggccagcgtagacgccgccggcaccaccctagacgtctggtaccccgaactgaatctcggtgaggcaccggccgaggccgatcgtccaaaccacaatttcggcactctggcccacgatgaagccgacgcccgtggcatccgccgcgtgccggtattcgtcgtcagccagttggacgagccgatcagcaacgccgcggacgcttacctgaaactccatctgatgagcatgcgcatggccaagccgaacacgctgaaccttgacggcatcttcgcccaactcgccaatgtggtgtggaccaactacggtcctttcgccgttgaggacttcacactacgcaaggccgatgtcgaacgcgcctccaccgaagccgctctcgctttcgctgctcaggccggactgcctgccgcagctcctgccaccaccgtcaacgtgttcggtgtggataaattcccgcgcatgatcgattacgtagtgcccaccggcgtgcgtatcggcgacgccgaccgtgtgcgcctcggtgcttacctatcttccggcaccaccgtgatgcacgccggattcgtgaacttcaatgccggcacgctcggcgtctccatggtcgaaggccgcgtttcgcaaggtgtggtcgtgggcgacggttccgatatcggcggcggtgcctccatcatgggcaccctctccggcggcggcaagctgcgcaactccatcggcgagcactcgctgctcggcgccaacgccggtatcggcatctccctcggcgataactgcaccgtcgaagccggtctgtacatcaccgccggcaccaagatcagcatctgggacaaggccaaggccgccgctggcgaaccgctggaagtggtcaagggtgctgagctctccggcaaagacaacatcctgttcatccgcaactcggtgaatggacgtatcgaagcccgctaccgcaaggtgggaattgagctcaacgccaagctgcacaagaactgaaattgaaataatggagcgttatcttcgttgctcctcggtcgacgtacttccgtacgccttccctcggtgcgcttcgataccgcacacattatttcaatttcagaactagccctgctcgttcttatgcagccgtcgcagcatagccggtttgcgctgtacatatagaaagcgcctcactggatctccagcgaggcgctttctcaaaccaacaatcaccgctcgtccatcggcacgaaatcgcgctcgaccggaccggtgtagacctggcgcgggcggccgatcttggtgttcgggtcggccagcatctcacggtactgcgcaatccaaccaggaatgcggcccagtgcgaacagcgtggtgaacatggccggatcgaagccgatcgcccgataaatcaagcccgtgtagaaatcgacgttcggatacaggttgcgcgatacgaaatactcgtcgttcaacgcaatatcctcaagctcggtggccacatcgaacaacgcacgctcgtcggacggcagtttctgcgtatcctcgcgctccatgatcttctcaagatacttcttggcaatcgccgcacgcggatcatatgacttatacacacggtgaccaaggccggagatcttctggccattctccttggcatccgtcacgaactcggccacagacttgccggaatcacgaatcgccttcagctggcgcagtacggcctcattcgcgccaccgtgtaacggtccggacagggcattgacgccagcggccaccgccgaatacaggttagcgtgggcggaaccggcgatacgcaccaccgaggtcgagcagttctgctcgtgatcggcatgaataatcagcaaacgacccaaagcatgcacatacaacgggtcagattcgaacggctcgtacggcacagcgaagcacatgcgcaggaagtcgtccacatagccacgcgcgtaatcggggtacagcatcggctcatcgcgacgacggcggaagatgtacgacacaatcgtgcgggccttggccatgatgatcttggcggcctcatcgagctggtcggtgtcggagatatcggtggtgtccggatagaacgtggccagcgcattgatggcggaggcaagcacgctcatcggatgagcggagcgcgggaacgaacccatgaaggtacggaagtcttcgccaaccatcgtcttgtggttgatgtccgcgcagaactgctcatactcagccctgctcggcagctcgccgtggcgcagcagccacgccacttccagaaaatcggagttctcgcacaactgctcgatggggtagccacggtagcgcaggatcgaatgcttgccgtcgatgtaggtgattttcgattcgcactgtgcggtggtgaggaatccggggtcgagcgttacccagccgtcattgcgcagcttggaaacgacgatgccatccggccctgcactagccttcaccacgggcaggttgaacttgttcgaatcgacatcaagttgtgccgttgccattcgcgcgccttcctcttcatgaaccacttaccccaaacattaacgttcacgcgttcgcgaacgctagtgttcggtactttatgtcttctgtgttaccgccggcagacaccggtcgatacacgaaagccgaagtgcgctcatgctatcaaagcaaacgcacttcggcttgttacgtctcgaattcacgggaattcgacactttctataggatatttggctatttcatagcaaacgactgtttggccgcgtcacgtatatgctcgacggtcagcccgtacctttccaagcaggcttcagcactgcccgaatgaccgaacacatcttcgactccgaccttgaccaccggcacgcgcagatccgaggcttgttcgcctactacctcagacacggcagccccaagacctcctatcacgttgtgttcctcggcagtaacgattgctccggtctctcgtgcagcggcaatcacggcatctcggtcaatcggcttaatggtgtgcatgtcaagcacgcgtgcgctgatgtcttcattctccagcgtcttagcggcctcaagcgcctttcccaccattaatccgcaggcgatgatggttacgtccgaaccatcgcgcagtgtcgccgccttaccaagttcgaatcggtaaccgggtatatctcgtgtaacggtaggtaccggagagcgacccaaacgcaggtagcatggtccctcatatgtcgccatcgcgaaagtggcatgtcgagcctcttcagcatcggccggcacaatcacggtcatgccgggaatcgtacgcatcagggagatgtcttcgatgcactggtgcgtcgcgccatcttcaccaaccgaaagtccggcatgggtgccgaccactttgacgtttaaatgggggtagcacaccgagttacgaacctgatcataggctcgaccggcagagaacatcgcaaaagaattgacgaacacagtcttgccagtggatgccaagccggcacccacacccaccatattggattcggcgatgccaccattgaagaaacgctcagggaactgctgtgcaaaatagcaagtcatcgtgcaggtagtcaaatcggcgtcaactaccaccacatcaggattgttctttcccaattcacacagtgcgtgcccataggacacacgggtagatactgggttcgtgtttggctggctcatcagtttgctcccttcgatacggcggtcttgtatgcaacagattgcttcagaccttccagatggctgatgcgcgcgtcaatctgagcaaaggcagaggcgaattcctcgtcgttcggtgtgccgccgtgccacttgggattattttccataaagtccacaccgcggcccttgaccgtgttagcaatgattgcggtgggcacggtgcgtacgccagcagctgcatcaatggccgcagcaatctcaccaacgtcatgaccatcaatttcgatggcattccagccaaaggcgcggaacttgtccaccgtcttggaggggccaccgatacggtcggtgaagccatcaagctggatgcgattgttatccacaaaagccgtcaagttacttacgccgtagtgtgcggccatttgtacggcttcccaaatctggccttcttgaatttcaccgtcgccgcagatagcgtatacgcggtagtcgaggccatcgatacgggctgcgagcgccatgccgagtgccgcggataatccttggccaagggaaccagcggacatatctacaccgggcactttcgtcatttcaacatgacccgacaagtaggaatcgatgttgcggaaggtggagagatcctcaactgggaagaaaccacgcatggccagtatcgagtacatggccggagtgcaatgtcccttagacagaacgcaacggtcacgatttgcatcatgcggattagcgggatcaacgcgcattttgtcgaaatacaggaccgtaaggatatccatgacggacagcgagccgcccagatggccggaacgtactgcctgaaccatgccgagggcactgcggcggcccttggccgcaacgagttccagctcgattcgtgtgttgtagttcattgttgctctttcatgagaagaaaataaggtgcggaatcggccgtctagttggaaggaaaccagacggccggttacctgtggcatgtctggcatgccgctaattgatcggaggctagaagccggtacgcacattgcccttgttcttgcgcatatcgaagtacacggccacgatgatgatgacgcccttaatcacgtattgccagaaggagttaacgtgcataaggttcaggccattggaaatcatgccaatgatgagcacaccgatgaacacaccagaggtgcgacctacaccgccatacattgaggtaccaccaatgacggcagcggcgatagcatcggtttcataaccaacaccggcagtgggctgaccggaggacatgcgggaggccagcacgacaccggcgaaggaagcaagcagaccggagacggcccacacaaagatcttgacgcgggtgacattgataccggagtacttggctgcggtcgggttgccgccaagtgcgtagatatgacggccgagacgggtcttgttcagtagcaggtacagcaggaagaacagtacaagcatgtagatgaccggcaacggaattgggccaaggtagccattgcccagcgtggtaaaggcctcagaacgcacggtaacgggcttgccaccggcagccagatacgcggcaccacggcaaatactctgcatggccagggtaacgacgaatggatgaatgccggtgtaggcgatgatcacgccgttggccagaccgacaatcacaccaattagagtgccggcaaccagcgccactggaagtggtagaccgaactgagtcatggataatacggccaccacaccggacaatgccaccaaagcgccgcaggtcaaatcaatgccggccagcatgatggatagcatcacgccgatggcgaggattgcgttggtggataccgaacgcatgagattaacaatgtttgcccaagacaggaaattctcggcgaagatgctcaggaacaccagcagcacaacgaagccgatgagaatgcccatattcgccttgatgaccttagcgattgatccgatgacgggagcgtcctccagcttatcgaggacttttgtttgcgttttcatgtttctttccttgtaagtaccgtatttgggtcactgtttgcgccaggctcatcagccgagcgcgtgcttgaggattgcatcctgttcgaattcgtcgcgctgcaagatggcgctgatctcaccacctcgcatgacggccatgcgatcggacatattcatcacctcattgagctcagaggaaatcatgatcacggcaacgccgctggcggccaaggagttgataatcttgtagatttctgccttggcacccacgtcgatgccacgggtgggctcatcgagaatgagaatcttgggatcggtagccagccatttacccagcacaaccttttgctggttgccgccagaaagattaccgaccttggattccagtgaaggcaccttgatgttcagggtcttgaccgcattttcagcgatttctcgctctttacgcccattgacgcgtagcttggagataaattcggataaggatgcgatcgaggagttgaacttgatatcgctgaacagaaacagaccttcagtttttcggtcctcgggcaccaaggcaaggcctttatccatcatctgcaacgggttcgtcttaccttcaatcttctcgtcgaagactgtcacagtgcctttgccgccgacacggaagcccataatggattcgaacaattccgaacggccagagccgatcagaccatagaatcccagcacttcgccgccgcgtacttcaaagctgaccggtttgtaccaaggagcgcatgagtagtcggatacagacaatgcgacggcaccgggcttgttgtaagtacggtaatagtagttctctacatcgcggccgaccatcatacgcaccagctggtcctcatcggtttcagcggtgacaaccgtgtctatgtatgtgccatctcgcataatcatgacgttatcggtcaaatcgaaaatctcactcatcttgtgggaaatgtaaatgatgcccatgccgcgcgctttaagtttgcgtaccacgcggaacaagtcatctacttctttctccgaaagcgacgaagttggctcgtcaagcacgatgaccttggagttcagggatagcgccttcgctatctcaatcatttgctgttgacccatgcttagcgagttgacaagcgtgttcgggttgatgtcaagaccgaccatttccagatactggcgtgactgttcggccatctcgcgctgtgagaccaaaccagccccgttcttgagctcacggccgatgaacacgttctccgccacggtcaggaatggctctagtgccaattcctgatggacgaaggccacgcccttagcctgcgcgtcgagtacgccactcagctgtacatcctcaccatcgatgcgaatgctaccgctgtcaggcttgaaaatgccgccaagcacgttcatcaacgtggactttccggcgccgttctcacccagcaggcctagtacctcacccgaatgcagagtgagatgcacatccgtcagcgccttgacgccggggaaggttttaacgatgtccgtcatatcgatgaagaccttgcccattgcggtcggggcggatgtggcaccggcatcgggggcggtatcgacgcaaggggcgtctactaccatctgatctaccattgcgtaatcctttgcgaaagaaaaaaaaaatgaaaaacgggacggaagtgatgaagctgctccaaggaagaggaaagtggacgtgtttctgtagcttccgtcccgtgtgatggctaaccgcgaccggagaagacatcgcgatcagccgctgacgatgacactatttacgcgtcactgccagccgtctgtgccgtactcgtccacgttatccttggtaatcaagaacgtgtcgaccacgatgttcttttcgatctccttgccatcaatcacgtcaagcgcggctttcgcagccttgtgcccgatttcgtccggagactgtgcgccggtgcccgtcatggtaccgtccttgatggcttgcttaccatcaggagaaccgtcgacaccatagacgagtacatcgctcatctcgggatgagcggctaaggcttgaactgcgcccaatgccatcggatcgttgatgcccagaatcgccttgacgttggggttggactggagaatatcctcagcgagagtcagcgaagtggcgagttcgcccttgccatccagctcttgcacgatgttaaagtagtcaccggccttttctttgaagccttcaaggcgctggatgcatgcctggccagcaggacaattgatgacggcgatttcagaacccttgtcaatctttttcatcatgtcttcagccaccagttcgccggctttggggttatcagaggccacaacggtcttgactaaatctagatcatcgacaggggtatcaatgttgatgaccgggatgttcgcatcggcagcggcctgcaatgcgggctgaacaccggtggtatcatacgggccaagaatgattgcatcgacaccggaggcaatgagatcacccaccatgtcgttcatcttggactggtcggcctgaggatcgacgctttgtacggacacgctcttgccctcaacctcggcgttcacgccatcaagaatggcttgccagaagggattgttcatcgtggaaggcacataaccaatcttgatcttcgcgttcgagtcgcctgaggtggcgacgccagatccatcagaagagtttccgcatccagccaagcccgctacggcgagggcggcaatggagaaaacagctgcggctttatggagaaccttcatcttcactcaccttttcaatttgtgtctcttatctattaccagacgaaatccgaaagtattgccatcttcagaagttcgccaagaacaccgaattaaccagagttacaggcttcctttacgctcatcactgagtggttggaggacatcaccgttgattgatttgttgttcttgaatttagaatacatattcaagggattcttggcaaaccagcgacacgccgaccaaaaccatgaaattgcaacgtcttaacaaaaattcgatgaatttattatcgtaaatttatatcagaaaatcatatccatgaattcagatacgaaaacaatacaaaaccagccagcggtatgaaaccgcaacaagaagccagaacgagtggattcacagtctgaatccaacgacaatgacctcgacctatatcaggctcgctgcggaacccctgccatatacccgaccaccgcttcataggtggtctctcgcgtattcagcgtagctacaacctttccatgcctcatcacacagatgcgatcggaaatcgcaaacacatcagtcaggttatggcacaccgtaatcaacgatttacctgcctcacgcatgctgagcatctggctgagcacctcgccggtttgaatcaccgacaaagagctcgtcggttcgtccaagatcagcacatctgggtcttctaatagtgcttgggcgaatgtcaacgttttgcgttcgccctctgatagaccgcgaaccattcttgtgggagacagtggggagcccagttgtttgagtactccacgagtgtcttccaccatgcgctttttgtctataaacaggcctcgcatacgttcacggcccataaacacattgtcagccacatccatcgccggcgccatagcaggattctgaaagatggtacatacgccagcggcgttggcatccttgacaccagaaaacgaaatttcctcaccgttgcacaatacacaaccatcatcgggatactccaagccgctcagcacacggaccagcgtagatttaccggcaccgttgtctcctacgaccgcaacaatctcccgctcgtagacgtcaatatccacgtcatcaagcgcggtaacagatccgtaggttttgcaaaggcctctgcccccgaacacaaccttgcgcataccacggtaggaatcgatcattgcgatacctgctgcttgtaccaccatcagtttccctcactgttcatctcgtcttctacgactcatcacaatgcatatacggaaagaatcaatcactacccataataatccgattggcggcggaatacatagcccccaatgagaccgcatcgtcgccacactgaccaagaatgatgcgacgatccgaaagcaccgggaacatcaccttgttcaatgcttgactgagcgccaccagaaaaccgtcgcccgcttgtgtcaactcgccacccacaatgaccacgccgggatcgaaagcagtgataaccggctcaatagccagagcaatctgtgtcgccacatcctcaatcagccgcatacacaccaaatcgccgcgcttagcatcagagaccacgtcacgaaggctcatttcaccgcgcgaaggacgcagcagagagataatatgcgcagcagaagccactgtgttcagacagccgcgacgcccacaggtacatacggcaccattaggatcgacctgaatatggccaaattcgccagccaacccatcatggccacggtaaagcctgccattgatgtacagagcaccccccacttcatatccagcgttgacgtaaactacatcctgtctgcgcagccctggatcgtgcacctgagctaggcatgccatcttagcgtcattctcgatgaccgggtgtacccctgtcccacgctcgaagcgatcagcaatctccttgccactccatccgtgcattatttccggtacgcgcacctcactgttcagatcaatgggtgccggcaatgcaatggtaacctgcttgagatccgtgatttcagagcccaccagttcaaccatctctcgcagtagttccagagcgcaaatcaccgtactgtctggctgatgtcggacgggtaacggcatcatcttttcgcacaatacctcaccggagctatcaccaagcacaatgcgcaagtccaaggtgccgatggatacacctgccgcaataccaccctcctgagcaagcgtcacatacagcgcgtgtcgattattacgactaacggatttagtaacgaccttatttttttcggtcagctcgcgcacaatgctggatatggtggcggcggaaaggttcgtagcgtcggcaagttcaatctgggtcataccaccgaaacgctgcaacaccttcaatacttggttgacattggcttgacgcaacgatgataaagaccccgatcgggccgaaccactcatgtcctccacctttcacacccggattaaccccatgaatacgtacgcattagaacaatccggcatcggccccacttcggaacgatacccactgattgtatcccatcattccacacggacccccttgcctcatcatgatagtcgcattacggttacagaaaagaccaggccacatgggaaaagtggcctggccaaacagagataaaccgatcagaggttggtgcgatcggtgaagatgatcgggccgttctcggtgatggcgatggtgtgctcggagtgggcaccgcgcgagccgtcggaggcacgcagggtccagccgtccttcggatcctggaagatctcgtcggtggtcttgaggaaccatggttcgatggcgatgaccaggccttcgcgcagcttgtagccgtggtgggcgcggccgtcgttcggtacgtgcgggtcgccgtgcatgatgtggcccacgccgtgaccgccgaactcgaggttgatcgggtagccgtattcgcgcgcgatgtcgccaatggtgttggagatgtcgccgagacggttgccgggcttggccacgtcgatggcggcggcgagcgcttcctcagtgcacttgatgatgcgcaggtcttcggggtccgggtctttgccgaccacgaagctgacggcggaatcggccacccagccgtccacggagatggcgagatcgagggagacgaggtcgccgtccttcaggctgtaatcgtacggcacaccgtgcagcacggcgtcgttgacggaggtgcagatgtagtgggcgaacgggccggtgccgaagtcaggagcgtagtcaacatagcaggattcggcgcccttgcggtccacgatcttcttgtggacgaactcgtcgatttcgagcagattggtgcccaccttggtggtctcctgcagttccttcagaatgccgccgacgaaacggccggccggcttcatttcctcgatttcacgaggggtcttcaattcgatcatgaggttctttctaccttgttgagacttgttctcaactctagcccagcccggggtcaaccgccagagcatcacccgtggtctgcctagggtccgctagtagcctatcaacggccaaggccgagaaaaagcgcccggcagatacataatctgcacgggcgctttggattgattgtccggagattgattgtctggagcgcgagattacttgcgacgcttgccaaaagtgaacgcgcgaatcactgaagtaatccccatcaccaccatggcacatccgccgaagataatcatgaatacggcggagctcagcgggctcatcagcaccacgaagccggcgataatcgagatgatggcataggcgatggcccagccggagcgcgggatgcgccatgattcgactagagccatcacgccttccataatccaaccgaaaccgaccatcagggtgatgagtaatgccaaggtctgaccggtcataccgtagtttcgtacgactacgacgcctccgaaggtcagcagaatgccgacgaacacgtccagcacacgccagccgcccggcagacccggctccacgagagcgctgacgatgcgcaccacgccggaaatcacgaaatacacgccgagcaacaatgcggccaaagccagcgtcttgttcggcaccaacaacagcgcagcgcccaaggcgatggcagccacgcccaccacgccgtaaatgatgcgaatcttggtcttggccttttccggcagccattcctcgatcagatggaatggactgaaattgccgacataccagttggtctgctgccagccgggttgactttgatcgccccatgaaccattcggctgcccgtccgcttggctattcgattggccgtccgcctggtaccgccgaccgtccggaccccatgctggctggccgttcgggccatagttcggattgtaggcgtacgggccgtagtacgggttctggttcggtccgccttgtggctggccgttctgcgcctgctgattctgagtgtcttgcgctcccggcgcaccttgcggaggatattggccgccatgattgctgtcatacgcgccatactgcggttggcccggttggcccgccggattcggctggctcggctggctctggttgggctggcccgtctggccattccactgaccctcgtttggattgctcatcgtaactccttaactcaaggtccatattcaggttccacataccatgttaggcaagttacctaatttgaaccatcactacagttaggcaatccgtctagttcactgacagcgcaatacccataacgcaatatctgcatcaccaacgcttctcccccgccgcgattaggcttagggccatgaccaacgaaaccgaaacgctgacgtcgggcatcgacccggcatcgttctcctccgtcatcaagccgaccaatgacctgttccgctacgtgaatggtccatggatcgacacctaccgcctacccgacgatcgttcgcgctacggctccttcgacaagctcgccgaagacgccgaaaaccaagtgcgcgacatcctcgacgccgacgactgcccggccaccaaatcgcaggctctgtatcattcgttcctgaacaccgacgccatcgaggccgccggccttgacccgatccgcgatgagcttgacctcatcgattccgccatcgacaaggccgctctcacgcgcgtgctcggcaccatcaacccagccggcggccccgacctgttcggcttggccgtttacggcgaccccggcgacccggaccgcaatatcgcccaccttgagcaggccggcctttgcctgccggacgaagcctactatcgtgaggaccactacgtccccgtgcgcgaagcatacgtggcgatggtcgccacccagctggtgaacgccgggtacgcgcccgccgccgaatccaacggtggcgatgaactgccggccaacaccggcgatgacgagagcaatgctcccaccacggttcccagcgaagccgcacttgatatggcccgacacttccttgccgtggaaaccaagatcgccgccaatcattgggacaatgtggccacgcgcgattcggtgaagacctacaaccccaccgattacgccgatttggccgccacgctgaagaacttcgatctcgcttcctggatcgacgcctggcagaccgcctatgacgccaccgaggccgccaaggctcagtcgatcgatttcaagtctgtgttcgcgcgcatcattgtgcacgagccgagcttcctcactggtcttgatgcgttctgggccgaggccgatctggccgaccttaagctgtgggcccgtgttcacatgattctgggcttcgcctcctccctgtctcgcgacttcgacaccaccaactttgacttctacggcaaggtgctctccggtgccaagaagcagcgcgatcgttggaagcgcgcggtgagcctggtcaacggcgtctgcggtgaagatgtgggccgcgagtatgtgcgcctgcacttccccgaaagctcgaa

SEQ ID NO: 2323 - DNA, 88429 bp, Unknown
  R119_18m  MAG No. k141_39464
atcattgactataaagaagtagtacaaacacgctcttgagttctcaaaccaccaccacaccagcaagacaggaaaccaaccagaagaaggaacccgccgcgctgagcggcaacaggtgaataacttacacgcaaccacgccgcaacgcaaatcaaagcgcacaagaacccaaggaatcggcataacagcgcggttccttcggcgtgtcgcacagagcccaatttgctctgatagggctagcgtaacccctcgaatgtttccggaaaacatcgaatccattattcggctggcgtgtcgcacgagttttcggactgtcagctccatgttcatcgttcggcaaccacaccaccggcgcacaatcaatgcatggcaacaacgctccatcatcggatttcgttcatgaatcacgggtatacctgtagttatgaccaagaagattgctgtattaaccggggcgggcatttccacgtccgctggcatccctgatttccgcggtccagacggtgtgtggaccaagcatcctgaccaaatgagcgtttacgacatcgatctgtttctgcgtaacaaagaagaccgtgagtactcctggcgctggcagaaggaatcaccagtatggaacgcacagcccggcaccgcgcataaggcgctggtcaagctggaacaagccggcatgctgacgctgctggccacgcagaacttcgatgcgctgcatgagaaggccggcaacagcgacagcgtcatcgtgaacctgcacggcaccatcggcacctcgcattgcatgaagtgccatcaggaatatgccacggcggacatcatggcccgtttggatgaagaacccgatccacattgccatcgcaaactgaagtatcgcggcgatatgccatgcaatggcattatcaaaaccgatgtggtgtatttcggtgaggcactgccggacggagcgatggagaagtcgtacagcttggccaccaaagccgacgaactatgggtaatcggatcgacccttgaggtgtacccggcagcgagcattgtgccggtggccgcgcaggcgggcgtgcccatcaccatcatgaatatgggtcacacgcaatatgaccatcttgcgagccgcttgattcatgaggatatcgccgtcgcgctgccgaagttggtggacgagacgattgcggagaacaagtagtcctcagcataacgaaagcgccggtgggtggttaagcaactgatgattgttggttaaccacccaccggcgctttcgcgccacctcccgctagcgggaggtattggagcacacttctgcgcggcctcccgccagcggtattggaatcagtagatgcgcttgggctggaatccagcttccctgagtgccacgaggatgcggtcgatgtgctcggggccgttggtctcgaccgtgacgccgagagacaccgcgttggtgtagtggccggatgccttgaactggtcgtggtcaagctgaatgacgttggcgcgctgctcggcaagcagggtggccaccttgacgagctggcccggagtatccggcagctcgacctcgaagttcatgatgcgaccgcgggcgatcatacctttctgaatcaccgcacccatggtcacggtgtcgatattgccgccggacataatcggcaccaccacgtgcgggccggtggcggcggcgaacttgcgcgaacgcaggttcaggtgttccagcgcggccagcgaaacggcgccggccgcctcgaccaccagcttgtgcttctcgagcatgagcagaatcatttcgttgatgtcgcgctcggtgacggtgaccagatcatccaggaactcgttgatcagcgcaaacggcagatcgccgggatgcttgaccgcgacgccctcggcggaggtgaccacatggtcagccggagacacacgacccgcggccagcgagtccttccaggccggggagccctccggaatcgcaccgattacgcgcacttcaggcttgaacgtcttgatggcgagcgccacgccggcacccaagccaccaccaccgagcggcacgaccacgtcagtgacgttcggcacgtcttcgaggatctccagaccgatggtgccttggccgcagatgacttcgtaatcgtcgaacggcggcacgtaaatcatgccttccttgtcggcgagctcagcagcgtgggcggcggattcgtcgaacacatcgccgtacagcaccacatcggcgccgtaggccttggtggcatcgaccttcagcggcggggtgatctgcggcatgcagatggtggccttcgcaccacgctcacgggccgcataggccacgccctgggcatggttgcctgcggatgcggtgacgatgccacgggcgatctgctcttcggtgagcgatgcgatcttgttgtacgcgccgcgaatcttgaaggaaccggtgacctgcaggttttccggcttcaggagaatctcatgaccagtcatctcgctcagcaccggcgaagggataatttccgtatgacgggcagtccctttgagtcgtccggcggccaacttcagttcggctgcatgatcacgctgcagcgccttcaaaacatccttttgttccatagcttttaattgtatggcgcggggacaccgaaaacagtggcttatctcgctaacgagcgctcatttacggtaattcccgttcgtaatcagctttcgaggggctgatttggcttcgcggggaggtctatctcctcttcgaggggctgcccgatcgtgcaatgcgtgagtatgacacatcatttgcagcggtattatgcggttttcggagcccggctattcaggcaccaaccccctgaaacggagatagacctccccgcgaagccaaatcagccccttgaaatggagataccgcctagcaacacttataggctgacgacgacgccctcccatggtgcaagctcacggccggcaagagcggccacagcgtgcgcggcgtcatacgtgctgatcaccacgttcgactcggcaaggccatcggccactgccaacagttcggcggattcgcgaggcaaatcaacggttcggccggacatgttgaccacgaccagcagcttctcatcgccgagggtgcgggtgaaggcgtagacatgcgcgtcatccgcatcgagcagatgccagtcgccggccgccacgacaggcatgtcgtggcgcagcgcgatgagctgcttgtagaaggcatacaccgaatccggatcgtcgaattcgccggccgcgttgatcgccgcatggttgggattgacggagatccatggctccttagcggcatccggcgcagtgaaaccggcatagacagagccgtcccattgcatcggggtacgcgaattatcacgaccgcgcgcggcgatacccgccaacatcgattcgggcgactgcactttggcttcctcaaccctttgacggtaagcgttcagggactcgaggtcacggtactggtctaggcgcgtgaagtgggcgtcggtcatgcctagctcttcgccctgatatatgtacggggtgccgcgatgcatgtgcagcatcaggccaagtgccttggccgaacgcacacgagattcctccgaggagtcatcaccccaacgagaaacgacgcgaggctggtcgtggttaccagtaaacaggcttgcccagcctgcattcttcacggccgcttgataaccggccataatgctcttgagcttcggcaggtcaagtggcagtggcttccatttgacgccttcgcagtcaaaatcaacgtgctcgaataggaagagcatgtccagctcgccgttggcggggtcggtgatgtattcgttgcgctgtgcggtaacgccgggagcctcgcccacggtgaggaagccctcacggccttcgaacacttcacggcgcatttcggccaggaattcgtcttggcgagggccgtccgcgcagaacggattcgggttggaatagccttcctcacccacgggcagatcgtccagctcggaaccgtactcgccgggcagcttgccagacaggtccgtgcgcttggaaatcagcgtaatcacatccatgcggaagccgtcaacgccgcggtcaagccaccagttcatcatgtcgtataccgcgcggcgcacagccggattttcccagttgaggtccggctgcttcttcgagaactgatgcaggtagtattcgccacgctcagggcaatactcccatgcagaaccgccaaagtaggagccccactggttgggctcggcaccgggctcgccggcagtggtgccgggacgggcgggacgccaccaataccagtcggcgtgctcatcatccttgtttttggacgcttcaaaccaggcgtgttcatcggaagtgtgattgacaacaagatccatcacgatcttgagcccgcgcttgtgggcctcggccagcagctcatccatgtcgtcgagtgtgccgaacagaggatcaatgtcctgatagtcggaaatatcgtagccattgtcgtcttgcggagacttgtataccggggatagccacagcacatccacgccgaggtcggccagatagtcgagccgtgacgtaatgcccttgagatcgccgaggccgtcgccgttggtgtcttggaaggaacgcgggtaaatctggtaaacgaccgcattggaccaccacggatttggggtggcaccgttggtgcggatggaatctggaattactgtacgttgtgaagtggtcatcgttggctcctccattatttatgttctacattgcctgttgctcatagtctaaaaagcgctgaattacatttccatcggggaactgcgttggtgtgccggaaacaaaaactgcaaagagccggaaggcactgctacggctcaattctcataagctgcacatgctatttagcaacatatgggccctttcgctgtttgtggtgggtgactgtgccgtggggtgatgttggtcgggtaggttggaggcatggatgcctctcacctgttcaccgccgcgcttcggctgcggtcgccttggagggtcgggtctgcggacttccgtgacgccgacggcgacgggcgggagccgcacatcacgatcggcttcgagcccggcagagggttcatgctcctgttcgaggcgtgggtgtggctatatcgcctgtgctcgtggatgatgcactcgaggctcgaacctatgaaggagctcgcccgcttgttccgccaccataatctacctgacctgcggcagctcacatattaacggttcttctgattgcgacgcgcaagagcaacttcgggcgcgcttggattgcctgcttgaacccactggtgcggggatagatgatttagttgacacgcctgcgggaatctggtggggatttcgctggcacaccggatttcaagtaaaccccgcctcgggaaccgctccggacttcggcgttggcccggttcgtatgtcaatcgattgccgtctgaaccgggacagaatccgctgtcccggttcgcgatttttgtccttttttacaaacagggacaagccaatctccgcagttcatatgctccgtaatacaaaatcggcggaatagagccgatcccggaatcaacatgttgtcccggttttcacataaaacgattgacattcataccgggacaatgaaaattgtcccggttcgtgaaaatcgcccgaaaccgcgaaccgggacagcggattctgtcccggttcgcgcgtcaaacggttgatatgtggaccgggacaagccagtggcacggcgacacagcagatgcgctcaattgcaccgtaagccgtacggtttcgtcactttttcattcgcacaacgagcaaaaccacatgacctttgtgcgccaccgccacatcaaccgaccgtcgcctttattgtggcggtttccagtatggcaacaggacagaagagcctcctccggtgagagccggaggaggcttgggtggaagcggacctttacttcacagagtcctgcaattcaggactggcctacggccagacccaacatgacctcgcgagtacgcgacctatccggccgcccgggccgggaaacagcccacggggctgtttccttaatcggctcgtctcgctcgacgcggtgaagtaaagcagcgcctgcgctgttttacttgaccgctcccctcatcacaccaccgacgacccacttttgggcgaagatgtagacgatgaggatcggggccatggccatcaggtagctggagaaggccatcgggtagttggtggcgaactgcgagctgaagacgtactgggcgagcgggatggtctggttcgactggtcggtcaggatgatcaacggcaggaggaagtcgttccaggcccacagtgcggtcaggatggcgatggtggcgttaatcgggctcatcagcgggaagatgatggtccagaaaatgcgccacgtggatgcgccatcgattcgggccgcctcttccagcgaaaccggaatcgaacggatgaagccagtggcgatgaacaggttcgtgcccaggccgagcaccgtgtacaggatgatcaggccgacctggttgtccaggtgcagggagcccatctgcttcgcaatcggcagcatgacgaccgggaacggcacgaacatggcggcgatgaagaagtagtacaggaagcggaagaagcgcttatccatgttgcgggccacggcgtaggccacgaaggtgttggtcagcaaggtgagcaccacggcggccaccgtgatgatcgcggagttgagcgcggccttcgggtagttgaccttggcggaggcgtcggcgaagttgtgccactgccacgaggtgggcagggcgaaggtgccggcttcggccggagtcttcagcgcggtgacgatggtgaagtagagcgggatcagaatggtcaggctcagcacggccacggcggcggtcagccaccagttgatcttgtggtccctgcggaacttggcgggcttgccggacttggacggggtaactgttgcagtagtcatttcttatcctcccctaaatcagatctgttcctggctgcgggagatgcgcagctgtacgaaggcgatgatcgccagcacgatgaagaagagcacggcgtttgcggtctggtaggcgtactcgccaccggtcaggccacccttccagatgaggtaggtgacggtttcggtggaggagttcggaccgccctcggtcaaggcgacgacctgatcgaaggtgccgagcgcgttcttcatggacagcacgaggttgatggtgaagaacggtccgatcagcgggaatgtgatcttccagaacttctgccaggcgttgacgccgtcgatggcggcggcctcgtagatttcgtcgtcgatggtctgcaggccggcgaggtagatgagtaccgagtaggcgatgccctgccagacggcgaggaagacgattgggatccagctgagttgctcattggtcaacagcgaggtggacagccacttgatgcccagcgccttgccgagctcgggcagcgggttcatgaagatgtacttgaacacgtagccgatgaccagcacggagagggtgtaggggatgaagaagacggctcggaagccattcttgaaggcgatcttcgagttcagcagcaccgacaggaacagggcgatcacattaatcagcaccgtgatgagaatggcgatgaggaacgtgaacaggtaggcgtggcccacgcggttgtcttggaagagggcgatgtagttcttcaggccgatgaacttgtaatcgccgtagccctgcgagttggtgaaggaatactttacgccgtcaagaaatggcaggtacaggaagaaggcgaaaatgatagccgccggaaccaccatccagtagtaggcggggtccaccttgcgggtggagaaggcggagaccttcttcttggccggtttcttggcagcggtcttggttgcggttgcgtgtgacatgatgttctcctctcctaccgatcactcgaaggtcctggcttggaccttgtcccattcgttctgcatctggttcaggaagcggtcggtgttgccggaggtcaccatggtctgcaggtagccgccgatgttgatggacgaaggaatgtagtggtcgcagaagtcggccagtcggttttcctcgaagaacgggcgcacggtttccagcgcatcgttgccgaagtaggtgtccttcagcggcgtgatggcggactgggcgtcggcgtaggcgtcaagctgatccttctgcatgaggaactcgacgagcttcatcgcttccttggggtgcttggtgttcgcaccgatagtgagcatcacgtcgtcgccggcggtgaggatctgctcgctggcgtcatcggtggccggcatctgggcgaaaccaagttcgatatcggggttgatcagcaggatctgcgggatggcgtaggtgccgagcgggatgatcgcggccttgccttgggcgaagttctgcgtgccctgctggtaggtgacgccggtgtccgcagtggagtaggtgaagagctcggattccttctcgactgcggtcttccacagttcctggaacgtggtcttgccttgcttgagctcggtgtacttcgattcgggaaccagcgtgccggccagggaggcgagcggtgcctgggtggtccaggcgtcggccacggaaccctgcagcgggttgatgccggcgtccttgaaggtgttgagcatatcggtgaactcgctccaggtggtcggcggattctccgggtcaaggccaaccttgcggaacagagccttgttgtagatgtagccggaggcgttacccgcgaagggcaggccatacaggcgcttcttggaggaatcggtggtctgcaccagattcttggcgatctgcaccatgccggggttgagggtgtccacaatgggttcatcggtgaagtcgtagaacacaccggaggcggcgaagttgccgaagctgatgtcgccgttgaaggtgatcacgtccggcacacgattcttgacgaaacgggtgcgcagatcggtctgggcgttggcggagttgttgatgttgaccttgatggtcgggttctgcttctcaaagtcggcgaccatggacttgaactggtcggcggcctcggacttgaactggaagaaatccagcgtgacggtgcctgcggtgctggagccgcagcctgccaggccgaacccgacggcgatcgcgcacatcacggcggcggtgcgcacggccagacgcttcagtctaggcgttgcatgtggggaatcggacagcataattgttgactcctttatctttcttttcctccggcttcggtgccggcggttcttccactttccaaggtaacggttcggccatttcattcccagcgccagcgagcccacttgcgcaagcaacaaaaagcgcggtattttgtgattaacgcaataaatacagcgaaggggcttgcatgtctgatgtcaacgcgattccacagtggttttccggatccgagcatacgcatcgcgtggcggcggcaattgcccaatacgggccgatagcccgcactacgttggcacagatgctgggactgagccaaggggccttgtcccgcatcaccagcgatctgatctacgccggggtgatcgaggagcttccggccgaggccggcccgtcaggcaagctgcccgagcgattcacgccaagggaaagttcggatcgtcgcggacgcccgcagacttcgctggtgttgtgttcgaacgcacgcaccttcattggtgtcaaggttcatgggatgtcgattgtggccgctgcggtgaacgcgcatggcgaggtggtgtccggccggcacgaggtgccgatcggggcggatcagtcggccgagtatgtggtgtcggccatcacgcggctggtgcgcgaatgttccgccgatatcgcctcttccggactgccctcccccactgcggtgggcgttgcggtaggtgggcatgtggtcgacgattcgattgtgacgttcgcgccgttcctgcattgggacggggccacggacttggggacgatggtcacagaggcgaccggcctgccgtgcggggtgttcaatgatatcgattctctgctggtggatgcctcctggttcgggccgggtgtcggcgtggatatgttcgccgtggtgaccatcggcgtgggtgttggttattcgctggccgtgaacggcaagccagtgcagtacccggataagagctatggtctggtgggccacgtgcttatcgatccggaggggccgcgctgcaccagcggacatatcggctgttcacaatgcttgactgacgattcgatcgccgaacagtactctgcgattgtgggtcgcgcggtcagttttgaggactttgcgcgcgatgccaagggacgtgtgccgcaggccacgcagttggtgaaccggacgtgtttccggttgggttcgctggtggctacggtggcgaacatcgcgatgcccggacatgtgatgattgccggggagtccgcgtttttggccaagctcggcaccgattcgctgcgcgatggcattcgtttctaccgtcacagccagacccagccggtcaagttcacgatcatggaccacgactggcagctctgggccaaagccgccgccagtcgcgtaatcgtgaagcatattgggtaggccgttcttggctcccctcagagagggaagccaagaacgttgcttcgccacagttactccgccacgaccagcaattacggacttgcctatcggcaaggctcaatcccaccttcgctcagctgtcgcttcgctcaggccgtggctactgacagcctactaggctgtcagcttaacgccacagccttgagcaatactgcctgctgggggtggagggacgggggacggatgccgtaacgctgcagggcttcgccggtcaggactacgccttcctcgttccaccagccgagagtgctctggccgttggccagaccggtcaaatccaagctcgggtcgagcgggctgacgcggtaggtgcgctcggggtcaagtccgggcaggtgcacgggcgcggccggataggtctggctggtggtcagctgggtgaagcggtagatggcggcgtcgcggttcggcatcaccatgccatccaagcgcacggccggatcgttggagtcggcgtgcacgcaggtgtcgatggcgaaccagtcgcggtgcttcttgaattcggccacccacacggccagcttggcgagcgcctcgtccggctccttcaacaggttccattcgatgcccatgtggccgaagaacgccatggccatgcgcagttcctggctggtggcacgctgggtggagtgcgcgggactggcacccacgtgctcgcccatcatcgccggcggcaccagcagcgaggtgtagcgctggatgtccgcgcgctcgaccgggtccacgcagtcggagacccagatacggtcagcgtgctctaggatgccgaggtccacgcggccaccgccggaggagcagctttcgatctcaaggcccggatgtgcggtcttgaggcccttgaagatgttgtagacggcgagggtctgcgcgtgcacggccgggcggccggagcggcgggaaccgggctcggtgacgaacttgttgtggtcccacttgatgtagtcgataccaagctcgccgacaagctggtccatgcagccgtagatgtagtcgaacgcatccggattggtcagatcgagcacctgctgagtgcggccctgcagcggcagtcggccagcggtgggcgagagaatccaatcggggtggttacgggccacatcggaatcgtagttgaccatttccggctcgaaccacaagccgaattccatacccttggcgtgcacgtagtcggcgagcgccttcagggacttcggaccatcgggccagacgtcctgcgcaatctgccagtcaccgaggccggaggtgtcgtcgcggcgggagccgaaccagccgtcgtccaccacgaatcgttccacgccggagtcggcggccttgtcggcgagcgccttcagcgtatcgaagttgtggtcgaagtacacggcttcccatgtgttgaggatcaccggacggccgtgcgagaacaggcgcgggtgcagggagcgcacgtaggagtggaagcgggcggcgatctcgttgagaccatcgccataggagccgaacagccacggggtgtcgtaggagttctggccttcgccagggccagcgagcgtcacttcgccgccgaacaggagttcgccgccgccgatcacgccggttgtgtagggcagacgttcggcggacagtacggagttgccgctccagcccacgtgcaccgaataggcgtcgccatgctcgaagccgaaaccgggcacgccggcggtcaggagcagggatgcgtcgaagtcagggcggccggcgagctgcggcttttcgaaacggccgacggtcagcggctggcgctgcggactgcgttcacgtagatggtgaccggtggtggtgaggatttcgccggcggattcgggcagcgggaagccgagctcgatcttgccgatctcgagcggggctccggcgtctgcaccgaacaggttggttacggtggccttctgacggaccaggccgccggggagcagttcgaggtgccactcgacttccacgccctgctcctcatcgcgcgcggtgactatgacgccgggcacgcggaccggaccggtggcacgggcatggccggccacatcggtgtagctttcgccggacacggcatcgagggtggcttccagcacgccgccggcctcgatattggtcacagtgaacttggggaagagctcgacgccggcgcggcgcagcaccacgcgctgctcgccgatccagctttcggcctgggtgggcaggatagacggccaagcggtgtcgtcgagcgcgccggacacgcgctgcggcttcagggcgtcataggcggccagcagggtgtcgggcttggccagcgggcggccccagtggacgatgtgcggcaggtcgctgccggcaaacaccagaccgatcgccacattggcggcgggctgggtcaggtagacggcggtgagtgcggtgccgtcagcggcggcgccggtgaaagtggaggtgttctcggccatattgtctccttcgacgtgtgtggatttgcattgcactactggtttcgatggtagaagaaatggaatatgttgccttggtgccgcgtgttggttgcgtgaggtaagtaatgcgtccgtgtctatcgccgctgggcgaagaaatcagtcaggatggactgacactcgccttccaacacgccgccgtgcacttcaggactatggccgatatgcggatcgcgcggaatatcccaaatcgaaccgcatgcaccgagcttgggatcccaggcaccgaacgcgatggtgccgatatgggtctggatgcaggcacccgcgcacatcgggcacggctcaagtgtgacggccagcgtgcaatcggcgagattccaagcgcccaaggcttgggccgcctgacgcatggcgatgatttcggcgtgggcaagcgggtcgccatcagcctcacgcgtgttgtatccgcgcccgacaatctggccggccgcatccagcaccaccgcaccaaccggtacgtcaccagcggctgcggcctgaccggccagttccagtgcacagcgcatcgcctcgtcatattccataccaacgagtgtatgcctttttctcatatcgtctcatgatgtgcataatcggccgcaatcttaacgttttcttcatggttcccatatacttttggtggagaaaaaatacgagaaggcggcaacatggcggtatttgagctcatcctatgcatcattgcggcggtggtggtgagctcgtttgccagtcgcttcgtaccgaaggtttccacaccgctggtccagattgtgctgggcgtgctggttacgtatctgccgtttttcccggatgcaaagctcgacccggaactgttcatggtgctgtttatcgcgccgctgctgtatctggaagcgcacgaaatcgataagtcggcgttgctgaaaacgctggatctgagcctatcgctggctatcggactggctatcgtcacgatggcggcggtcggattcactttgcatgccgtctggccgtccatcaccttagcctcagccttagcactcggcgcggcactcggcccgaccgatgcggtggccgtcagctccctaggtaaagaagcctcgctgacgcagcgtcagcgcagcgtgctgaaaggcgaatcactcttcaatgacgcttccggcatcgtcggcttccagttcgctctggccgccgccttcactggcgaattcgccgtggggcaggccgccggcgaattcgtgatctccttctttggcggcaccttatttggcctggtgatagcagcagcggccaactggctattcgagaccgtgcgatccctcggttgggaaaccaccaccacacgtattctgatggaactgttcctgcccttcctgctgtatttgggcgcggaggaattcaatgtgtccggcattctgtcggtggtggccgctggcctgttcatccgattcgaccgtaccggcgtggggccgaatgtggcacgtacgaatatcgtttccacttcagtatggggtgtgctgagtttctcgctcaacggtgcggtgttcattcttctgggcatgcagctgccgcgcgccatgagggccagctggtctgacccgtatatcagcaataccgtgctgatcggcattattctgctggtcactctggtggtaatcgcgcttcgattcttctggattgcggccatgctgcgcgttgcgcgagatacaatcaccggccagcgccgcaaaatgacacccgaacgctggcgctcggccgcagtgatgacctttggcggccccaagggaaccatcacgctgtcattgatgtttaccatcccgtattacattgccggcggtgcgccgttcccgatgcgtgacgagctgattttcattgcgtcaggcgtgattatcgtgaccttgctgctggccaacttcctgttaccgctattggccccgaaccgtggcaaggatcccagcgcggaaatgattccggtgaccatcgatgtgttacgcgccacggtggaggaattgaccggacgcatcacgccagagaatcgccgtgcgattctgatggtaatcgaccaatacaccaagcgcatcggacgattgcagcagcgcatcggcgataccgatcctcagggattcgagcaattgcagatcgaagcgctgcattgggaaaaggaattcgtgcgcgaccgacttgccgacaccaaggcgcatccggcggcggatacggccacgcaagagctgaacgtcgaagcctgcgagcgcatgcttgaccagattatgaatacgctgcgtcacacttccactgatccgacttcggggcatgcggtatcgcagattcgcggtcgcttacgcatgttccagcggcagatgagcaattacgccaaacgcacggtgtccaagattcgccataccacaccattggtgagcgaggatcagattttcgcgcgcacccgcgaactgcaggtcgaggcgattcatcatgttatcggccggcttattgacgagatgggccaggatacgtacaacaccgagcattgttcggcgctgttgctggattatcgtcgcgctgaggcttcattgcaggcacgtccgaatatgagcggcactacggaaaccatcacgcaggtcgaggacgtaaagcgcgagagctacggtatcgaactcggtgtgattcaggacatgtacgaagccggcgacatcaaccgagctcaagcccgctccctgaggcgcaacatctacgttatgcaggtcgatgccgattccggcatctagtttccttggctcccttctctgaggggagccaagttggggattgctatttccgcatgattctcttcagtatgtgcagtagtgcttgcagtgctcacttcgctcatgggagaacagtctatgaccgcgccggccacaagcgccctcgatgtccgattgctgtgacggccgcgccaattccagtgatggcggctgactacagcacgccagaggtaatgtcgttgtcaagcagccactggcgcaaatcggcgaactcctcaagactcacattgtgatccagaccgtggtagctcttggttttcagccacgtatgctcttccaaccaagcggcggtggcgaacagttcgtatttcgggattacgccatcgttcttgccgtacgtatagaacacggggatatcgtaatcggccaggcgagagtcggcgggggccgtgccgggcacctgaccgggtgtgttgaagccggacagggagacgacggcccggtaccgctcggggttgatgcgcaacaaatgcacggcgaccagtccaccttgcgaaaacccaagcggcaccacgtcacggtcggcgggaatgttgtcggccacccatcggtcgactgctgtggcggcggcatacgcgtcgtagtcacgatcatcgccgataggcagggcatcgtggaaccacgcgtagttgccggggtcgggactgccttcacgggccggcgcaagtgtcagcggcccgcgcaatgccacgaagtcgttatatggagcgatgaggcgcatgatggccgccatgtcttcttcgctggatccccatccatgcaggcacaggaacagcggatgcgtggcatgctggtcgaagccgccgcgcgaggtgacgctgtgttccacggtgagtggctcgccaaaacgtccgggcacagtggtggattcgcggccgatcagaggctggctggcattcgcttctttgctcataccaatccaatatagaggtcttgcgcgctgtgcggaaaacgatggaccatgatttcagtcacattgggtaatccgcgccgaatcgccttgggactttccaggggataccggcaatctgtcaggcattaccgctgtttgcggctgcggtgtctgcggctgcggtgattgtctcaagttcgccgccccactgctgctgcagtgcggtcatcttgctgccctcgccgaacaccatccagcgtttgccgttcagcaatcgccaatcacctttcgtttgctcattatcagcgtattggctcagcagttcggaaatcttgctttcgataggtgcccggctgatggctgcggacgattccgattcaaaggacacgaaggccactctcggatcagtgcacatctgtacggtggtgatgcctggcaaaccgcccgcatcaagcccctgccatccttctttgcacgcgccggcagcttgttctatgccttgctccatctgtgcggtatcttcgacgggtgccttgtcgttcgactgctgaatcagtccttccgggaacaatacgcccatggccacgccgataaccaagcaaactatggcgcacaccagtgcgatgatgccgcccgcgcccactcccccgtgagtggcgtaccgaggcatggtgactcgcgcagcgatgaccagaatcagggtgatgctgataagcaccgccgccgtcaacgcaatgtatcgtcctggcactgccgtcataaaggaaatggcgtaaggcgcgatttcatgaaccgccgaggtggccgataccacgacggctagcagtccgctgacaacggcaagtctgcggcacaatatcgacgttgggctgctggcttttgtagcggcgaatcgccggccggcattccgcctggatgggcgtcgattctgtgcacgacgtgagctgcgcgaatcgtcatactgaccatcgccgaagaaatcgtagtcctcatcgttgcgggccatcggtgccccccttcctgccgattacacagccagtgtaccgctatggcttgggaatggcggtcattcgggggaatgattcagggcaaaaaagaaccccggcggttgcccgccggggagagaaaggagagagaagaagaaagggggttcaattgtcgggaactgctgcggctcctgatcagctttccgctgacatcatttatataaccactgctttctgggtctacctctaagtttctctgagaaaaacctgagaatacttgcgattgatggaccgcggaagcgtgaggagcctctcacgtttccgcccaaggcgctagacttgaaggcagtatttatttgcccaaggagtttttcacatgctgctgtccgatcgcgatattctcgccgcacagtccgcaggtcatatctcacttgatccgtggacccccgaaatggtgcagcccgcttccatcgacgtgcgattggatcggtacttccgtttgttcaataaccacgcctacacctatgtcgatccggcggaaaaccagggcgcgctcaccgaacagttcgaggtggatcccgacgaaccgtggattttgcaccccggcgagttcgcactgggttccacgtgggaatacgtcaagttggacccgtccattgccgcccgcttggaaggcaagagctcactgggtcgattgggtattctgacccattcgactgcgggcttcattgaccccggtttcgaggggcatattacgcttgagttgtctaatgtgtcgacgctgccggtcaaactatggcctggcatgaaaatcggccagatgtgcttcttccagctgagctcgcccgctgagcacccttatggctccaagggcaccggctcgcattatcagggccaacggggcccgacgccgagccgttcctacgagaatttctaccgcgcgcacatcgacgactgagcgttgcgacgtaccattcggccggcggatgccggccatttgcttaatcccaaggagatgtcatgaccaacagcgatggtgggttccagttcgacttccagcagcacgaaaagccggtcaagccaacggttcctccgattcccgggcaagagacggcagcatatggcgcgcagccagcgacgcaagccacaccggctctgcagttcccgcaatctgtgcaggcagcacagccgacgcagtttgcacagcccacacagcccatcgatccggccatgacgcaaccgttctcgccgcaattcccggctgcggttgccgcacaagcaccacagccggcggcagccacgcagccagtagtatccgaaacaccaatcgccgctgcgcccggccagcagcaatacgtttgggatcagacgacgcaaagcttccatccggtggaaccgacagtgccggtgacgccagccgcaccagcggcaccggcgacatcgcctgtttcggcagcttcaaacgccgcgacacaagcgttccagcccagtcaggccgagcagcctgcggtagatgccgaggcaacacaagcattccggcctgatcaggtcatggcaacacagcttttcgaagctcaggccatgccgaatgccgaaaccgcggccacacaggcattccagcctaattcagctgcggccacacaggcatatggcgcatcatccaccgtatccggtgagaccgttgccatgccggcaacgcaagtagcgtctgccgatgatgctgcagccacacaggtgttccaaccggccgccctggctgcttcggcacaggctcagcctgctgtgatgcctccctccattccgttgaatcaggtctccgatgaggacgattccgctggcgccgagcctcgtcacggcggtagcggcaaaaagaacacccgcaaaatcgtcggcattgccgtagcagtagtcgccgtgatagcgctggttgtcgccggcctgctctggtggcattccaacagcagcaaggcgagccaagccgtggcactggccgagtgcaaggtagcggccaagcagtacacgaatgcgcagaagaagctcaccaccgccatatccaatggccaaaccagcgcgcaaacatccaccagcgatgtggccgatgccaatacgctcaccacgctgaatcaggcgttgcaagacgccgacaatccgaccgacaccgccaagtgcgattccagcctcaacgccactgagctgaagtctcacactaaagagctgcagaatgatgccagcgacatggctgacaagacggatgccatcaacaatgcgatcaaggccgttaatacttcaaaggcgacggccgataccgacacactgaaatcgaacctgagctcggctatttcgcaggcgcagggcacactggataattccgcgggcagtgtggccgatgagaacacccgcaccgcgctgcaaaacgccatcaccgaagccaatacggtgatgaacgggaccagtccgtccgaatccgacgtcaacaatgcgatttctagactgcagaaggccgagtccgacgtcaccgcctcgatacaggccaagcagcaggcagatgccgccaagcaagctcaggaagaggctcggcagaaggccgaccaagaggcacagcagaaggccaagcagcaggcgcagcagaagtctcaagacgggtccacctctactgacggcaccgacggcagcaacaactgaggtctgcagcgttctcccgtttcccatggggcggtaacttccccatgaggcggttagcgcattttcctttttcgcggaataacgccgttttcagcgaccgccccatgaggaactcaccgccccatgggatagttaccgccccatgaggagccgtttggatatagcagtgggccgggccctgaataccagagcccggcccactgctatatgcccacaatcagggctattgcgatggcttaacgcttggctatcgcgcgtagcacaatcttgcgtagctcggaggcaatcagcacgattgcggccaggcagatgcattccacccaagccatcgggctcaatgccacggtgccgaacggaccgttaaggaacggcacgtaaatcaccacgagctgcagcgccacggacaaaccaatcgcaccccatagccacttgttggagaacagacccacgaatgcggactgcagatgcgaacgggaggccagcgcgttgaacagctgggcaaacaccagaatcgtgaagcccatcgtacgggcctcggtcatctgcgcttcatggccgatggcatccaccgagcggtcggtgaacaagccgccggataggtgcatgtccataccaatcagcgtgacgatggccataatgacgccgacgaagatgatgtcgccccacatggaggcgtcaatcacgcggtccgtcaccttacgcggtttacgacccatcacatcgtcggtctgcgggtccacgcccatagccaacgccggcgcggcatcggtcagcaggttgatccacagcaactgtgtggcgagcagcggcacggtgacgcccacggtttccggctggcggatgccgaggaagccagcaaacaccacaccgaggaacacggtgaacacctcacccacattggaactcagcaggtagcgcaggaacttgcggatgttgtcgaagatcacgcgaccctcgcgtacggcggccacaatggtggagaagttgtcgtccgccagaatcatcttggcgctctgcttggtcacttcggtgccggtgatgcccatggccacgccgatgtccgcggacttgactgccggggcgtcgttcacaccgtcgccggtcatggccacgatgttgccttgacgctgcaaggattcgacgatcttgagcttgtgctcgggggccacgcgcgcgtacacggacacttcggacgtggccttgtcgagtgcggcctcatcgggcagctggtcgagctggtcgccggtcagggccttgccgtccttggcgatgatgccaaggtcggaggcgatgcgggcggcggtcagcgggtggtcgccggtgatcatcaccgtgcggatgccggcacgatgggcctcggtcacggagtcgcgcacctcagtacgcggcggatcgataatgccgaccatgccattccagatgagatcggtttcgatggcttcggcctgatcggcgatgtcggacacctggcctgcggcgttgacgcttacaccgggcacatcagccaaagaactggtttccagcggacggcaggcctcgccaagcgtacggtaggcctcggaggagagacgttcgacggtggcgagaatcgactggcgatcgccttcggtgagcttacggacctgaccacccacgcggatgcgcgtgcagtagctcaacagcacgtcgggcgcgcccttggcgaacacggtgagcttgtctgaatcggtgctgtccttggcgatgatggacatgcgcttgcgttcggaggtgaacggaatctcgcccacgcgcgtgtatcgcgtgatcttgcgatcggccttgaccttgcgtgcggccacgatcagcgagacttcggtggggtcgcccacgatctcccaacggccgttctcctcgcgtagttcgccgtcgttcgcgagcgtgccggccacaagcgtggcgacgacttcatcggccacaatctgggcctgctcggattcaggactgacgccaccggtcataaccatgcggccttccggcgcgtaaccggtgccggtgatctgcactgcgccggacggggtgaccacgcgctccacggtcatctcgttgcgggtcagcgtaccggtcttatccgagcagatcacggaagcggagcccaaggtctccaccgaatgcagtttcttgacgatggcgttgtgcgcggccatacgctgcacaccaagcgccagcaccacggtcaggatggcggccaagccttccggcacggcggccacggcaagcgagacggccaacagcaaggaatcaatcacgtcatggacgtcgtcgaagccttccagtacggcgagcgccaccagcaccacgacagcgatgacgcacaccgcgatgccgaggatcttggagacgtaatccatctccttttgcagcggggttttctcatcttcggtggcggagagcatgtcggcgatcttgccgacctgcgtgttcataccggtgccggtcacgattgcgcggccggtgccttgcgtcacggaagtgccgttgaagatcatgttggcacggtcgcccagcgccttggcttcggtgagtgtgtccggcttcttaccgaccggcacggattcgccggtcagggaagcctcggcgatgcgcaggctggccgcgttgaccagtcggccatcggcggagactgagtcgccttccgcaaggacgatgatgtcgccggggaccacgtcggcggtgttgatgcgcatgactttgccgccgcgcagcaccgaggtctgcggggccgtcatttgggcgagcgcctcgaccgcggcctccgccttggcctcctgcatgtagccgagcacggcattgacgatcagaatcaaaatgatcacgatggcgtcgaacggcagcacttcaccgccttccgcgccgggctgcgcattggccttttcgatgaaccatgcgatcaccgagatgatggtggccgcgatcagcaggtagaccagcgggtcctggaactgggccaggaatttcttccatttcggtacgggcggggcggtggcgagctcattcgggccgaatttggccagtcgacgcttggcttcttcctcgctcaggccctgggatgggtcgacattcagggctttggccacgtcgtcggcactggtcagacttggatcagcttcccccaatagcgcttcctgcgcgcgcacttcttccgattccacgacctcgttcgttgcggtcgcggacactgcggattgatctttgagatcatccataatgttctccttggtattgccgcggagtagtcagccttgcggccgctgccgggttttctctcccggctggacgcacaggactgcgcggttatggacaccggcgcaactgctgccgatgcatacgattgctattattccataactgcgtggcgcacttggcgcacagcgtaatagcgttttgcctagaacaggcgacgcaaccaggcttcagccaaatcaggccaacactgcacgcattcgacgatgtgcgcatagaagccgttgccagcggtttccgcattggccagggacaggccgtggctgccttcggggaacaggtgtgcttcgatgctcacgccggcggcccggcaggcctggatgagcattagcgtattctccacgggctcggcttcgcggtcggaggtcatggcgtagccgccaccaggcaaaatcaggatggccgggcgtatgcggtccggttccatctcctcgctgttgtcggccacatagccaaagaatcgcgcctcgttatataacttaagaatcgtgagaatcaaagcaattcataacctaggaatagtgagttttacggcattatataacttaggaatcgtgatataatagctcataaatccttgaaaatactaggaatatgagcttaacatgtataagagaaaagtatacgaccatctacggcgatggaaagcagcgagcaagggtactactgcgttaatgattgaaggagcccgccgcgtcggcaaaagcaccgtcgccgaggaattcgcgaagaacgaataccgctcatacatccttatcgactggcagaaggctccgcaggcggtacgagactcgttccgcaacaatctggatcatttggacacgctgttcatggacctttccgtctattacggcgtacgcctgcatgagcgtgacaccctctttattttcgacgaagtacagctcttcccctttgcccgcagcgcggttaaacaactcgttgcggatggtcgatatgacttcatggagactggctccctgatctccattaagaagaatgtcgaaaacatcttgattccctccgaggaagaatcggtgagcatgtttcccatggattttgaggaatttctatgggccagaggagaagaactactcgccgatgcgatacggcaatcttttgcggacaggcgagcaatgtctccgctgctggacaacaaggcggaacgcctgttccgtgaatacatgctggtgggaggtatgccgcaggccgtagagcgttatctgggaacatccgatatgggcaatgtcgatcgagtgaaacgccaaattttgcacctgtacgctcaggacataaagaaatacggcggagattcgaaagaacaggtcaaacgtatcttcgatgaaattccagggcaactttccaagcatgaaaagaagttcacactgtcgtctttaggcgaaaacgcacgcgaacgtgaatatggcaatgctttcttctggttggatgaatcgttcctgatcaaccgctgcatgaatgccacggatccgcatgtgggcctgcgcctacaccaagaggactccacgatgaaatgctatatgggagacaccggcttgttagtaacgcaagtgtttgccgaccgcgcatacacgtcgaatgagttgtaccgcgatatcctgttcggcaagctggaagtgaatgaaggcatgctggtggagaatgtcgttgcgcagcagctccgggcctcaggccatcgcctgttcttctattcccgatattcccgtcaggcgaaggaccgcatggaaattgattttctccttatcggggagtattcaaatgccgccatgaaggccagggtctgccccgtggaggtcaaatcgacaaagagatacaaaacctcatcgctcgataagttcaagaataaattcgacagccgggtcggcatgcaatatgtgctgcatcctagaccaatgcgcgttgaaggagaccgcctatatctgccgttgtatatggcgcattgcttgtgatgattctagaacgtatcgcagagaatgattctcaataagaaaagcgtgaggattacgatgcctcaatcgcacatgcagagcgtcatatcagtgagatcccgccgttgcggaccatgtttgattgtgcggaaaagttcggatgcctcacacttttcttgacgggaattatttactgtgaggcattgcgcaggttggcggccatggcgcggtcgcgcaagcctttggtgagcttgagaccgagggttacggcgatcaggactatcgtgcaggcgatccacagcgttcgaccgccgaagttgctgatggtccagccaccaatcagcggcgccagcgcaatcgataccgaccacactacgttgtagacgccctggtacgtgccgcgtgccgacgcgggtgccatggcggcaaccgtagtggtggcgatagggaatgtgcccagctcacccagcgtccacagcactacggcaagcgcgaatccgccccaggaatgggccgcggcctgcaccgcatagccgatgacggttacggcgaggcccatcaccagcacgcgtgaattgcccatgcgcgagaacagtttcatcgcgggaatctgcagcaggcacaacataccgccattgatggtgagcagcaccgaatactcgcccagccctagaccaaggtccgtcatggcaatgggcaggccggaggtgctttggaagtacacaaggaagtagccgaacatcagcagggagaagccgaggaatggcgtatcagtgagcacgcgccgccaattacgagacatggagcccttggcactggcagccggtgcggcatccgagtgattcggcccctcgacgccggcgaattccgcatgcgtaacactgcgttcgtcttcatggcgcaccgcacttggcaccgatacagtaatccccaaatgccgcacctcgcggaagaacgcaatcagcaatatcgtgacggctatcatcaccgccgcttcaacgtagaacatcagcgaatacgagatcttgaccagctggttggccacaatcggcccaatcgcgtacccaaaattaatcgcccacgattgcagtacgtacgcacgttgctgacgttcggcgggcaccacatccgcgatatacgcggcgatgaccgggctgggcagtgaggcgaacgcaccatagacaaacagggccgcgcctaaagccacggggtcagtgagcacggaaacgaccagcagggcagccgctgcgccgatttcgccgatgataatcatggattggcggccgaatctgtcggacaaggtaccgccgaacaggcagccgatgattgcgccgaagccgtacatggccacgactgtgcccaccacaccctcatcgaggcgcagcgcggaaaccaaatatatcgacaagaatgaggtcacgaagcgacccatccacagaatcagaatcgccaaccataatccccaatacagcagggacagtccgaatatcatgcgctgcttcttcactctcaataccttaccggctaccgacggcggaatagccgcgttttggcgcggggtgctgggacaatagcacctatggctatcaaaaaaggaccgaccaaggggtcgggtggcaagcatcgcaacaaactgaagggttacggccccactcccaaagccgaggaccgcgtctatcacaaggcgtataaggccaagaaagcggccgaacgtcggcagatggccgacccgcgtctggcagcccgccgtcgagtggacaagttcgcttcggcggatacttcggatctggtgtacggccgtaattccgtgctggaagcactgcgcgtaggcgtaccttcttccacgctgtacatcatgtctcgtattgaacatgacgatcgtactcgcgaaatcgtgaaaatcgctggtatgaacggcctgcacatgctggaggccgatcgtctggagatggatcgtatcgcccgctccggcaaccatcagggcgtgattctgaaggtcgatccgttccagtactcctcgctgaacgagctggccgatcgtgctgagaagaaggccaaggcaatggaggccgcgaattcggcggccgcccgtattgctgcgcgaccgctgttcattgcattggacggcgtgaccgatccgcagaacctgggtgccgtgattcgttcggcggccgcattcggcgccaacggtgtgattctgccggaacgccgttccgcttcagtgaacgccgccgcttggaaggtgtctgccggtgcggccgcgcatatgccggtggcgcgcgtggtgaacctgactaaggcacttgagggcttgaaggagcgtggatactacgttgtcggccttgacggtggcggcgataagctcgtcggcgagactggctttgaatccgatccgctcgttgtagtgctcggttcggaaggcagcggtttgggccgactggtgcgcgaaacctgcgacgcgattgccggcatcccgatcagctcgtctgttgagtcgctgaacgcttcagtggcggcgggtatcagcctgtacgcagtgtccaacgcacggcgcaaggctgcggcggagtgattgtcgcttgaggccgtaataggttgtacacacaaagaagcccctctatttgaggggcttctttgtgtgatgggctcacctacagacagtccaccggattgtccgcttaatgactccacactgccgcatccggatcgtcatcggggttgtagccgtcgtcgtccgggtcgctgtaggtggattcgtcgtcaatgacgccggaatcggcctcttcgttaagttcggcgagtgccttggaatcaaggttgtagctcggcagaacgttgtcgatgtagctggtcacggcctcgcccatcggcacgtcgtggccggccttctccgccaggaaccagcgatggtcaagcacctcatggaagaactgagcaggctcgatctgggagcgatattcgcgcggaatcatacgcacggtcggctcgaacacctcgcgcatccaatcggtggccacgatttccagatcctcgccctcacgccacgtggaggcacggtaggcgtcaaggtcgttgagcagacgacgggcctggttctcctgcacgtcaaggccggtgaggcgcagcagcttgcggttggcgtagccggcgtccaccacgcgcgggcggaccagcacacgcttgccgtcctcggcggtcttcatttccagctcgtccacgtcgaagcccagctcgttgagcttgttgacgcgctgctcgatcttccacatttcgtccgggttgaacttgtcggtgtcggtcagagcgctccacagcgagtggtagcggtcgactaggcggttgcccacctcgatctcatccacgtcgccgggcagtagcttgccggacgccaaatccataagttcgccgatgatgttggtgcgggccaagtcgatatcgtattcgcgctggccgtcggtgagctggacttgcaggtcaccggtctcggcgtccaccaggaaggcggagaaagcgtcggcgtcgcgcaggaacaggacgttcgacagggacacatcgccccagtagaagccggccaggtgcaggcgcaccagcagcacggcgagggcgtcgatcagtcgttcggcggtgtccgggcgcaggttgcgggcgaacagcgcacggtacggcagtgagaacttcaagtgccgggtgaccagaatcgcctccagcggctccccttcacgggtgtgacggccggtgaccacggcgatcggggtgacggtcggcagttcgagcttctgcagtcgacgcaggatctcgtactctcgctcggccacctggcgcgtgatctccttcatggcgtacacctcgtcgcccacgtgcacgaatcgcacgacgtggcgggagatgcctcgcggcaggttggccagcaggtcctcaggccaggtggccaagggcttgtgccagggcagcgtgaacatctttgggttcgagctggcggcggtgattttcagtgcttgcggttccgctgaatcggcgtgttcgtcttcggctttgacagacgtggccttcagcgcacgcggatccatctggggcaattcgttcaactccatgtgttcgattttacgtgtcgttcgcgatgtgtgctccttggccacgacttcggcgcgttatgtttacgggaaaacaccgtttggtctctccctcagaccgtctagaaggcaaaaagaaaagccccgcagctatgcagggcctttccaacgaggccataagagaggaagagaataacctcgtttaatggttgacgaagcgattagacctcgccaagtatctattagttcagacgcagctcagtcgacggagcgaacaggtgcatcttggccgggtcgatcttgatcttgacggtcgcgccaaccttcggcagcgcacgcggattcacacgaatcgtggtgagcttgttctggtcggacatgacctgggaagcctcagcggcggagccatcggtgacgatgttgccgtagatgtagccatcggagcccagatcctcgacgttcacaaccttcagggagaaggcgttcgggtcgtcagccggggccaggccagcgtcctcaggacggaagccgaccacgatctggccgttgtcttcggcggtgagcttgttgacggcctcagccggcaggtccacggtgtcctcaccgatcttcgccttgccgttgaccaccgggtgggtgttcaggttcatcgacggggagccgatgaagccggcgacgaagacgttggccgggcgatcgtacagctcggtcggggcgccgacctgctgcaggataccgagcttgatgacggcgatgcgatcgcccatcgtcagggcctcggtctgatcgtgggtcacgtacagggtggtgacacccagctggcgctgcagggcagcgatctgggtacgggtctggacacggagcttggcgtcgaggttggacagcggctcatccatgaggaagaccttcggctcacggacgattgcacgacccatggccacacgctgacgctgaccaccggacagagccttcggcttacgatcgaggtactcggtcaggtcgaggatctcagcggccttctcgacgcgcttgcggatctcttccttcggagtgccggcgatcttcagagcgaagcccatattgtcggccacggtcatgtgcgggtacagggcgtagttctggaacaccattgcgatgtcgcggtccttcggctgcatcgtggtgacatccttgccaccaatgaggatgcggcccttgttgacctcttccaggccggcgagcatacgaagggtcgtagacttaccgcagccagaggggccgacgaggacgaggaactcgccatccttgatatcaagattcagatcatccacggagggcttatcgttgcccgggtagatacgagtgacgtggtcgaaaacgacttctgccataattactaatcctttcagaggcaggtacgtgcctcacgatccgttgtaaagggatttgttctttactgcgcttccgccctcgccaccgacgtacaactttgctttcggaaactgcaagcttcagcgtttacttttttccggttcagtgaaggttctcttcgttgagccgagaactactatacacggaccgtggaccaaggcaagtggcgtgtctgaaaatgtagttaactttatgggcgtttctgggggtgttgtgtggttcggcccatgacacacctgtttctcgaacgtgcgaaccggcacgcccggcgtagagcaggcctgctcttcccgaactgacggattccatcagtcgccgactaatgcaacacagactcgaaggtgacgccgttgcgggcggctttgcgctcggccttgcgctcctcggcgttttcgatgcgctggatgcgcagctggcgccagtcctcgcgcatgtcgcggaaacggtcggccagcgttacgtcatcgttctcggcatcgtcatcagtaccgctgccatcggccttaccgaacgtgccatcggccaccttggtgatgcccagcttgagcagtccgagcaactcacgcaacgtttccggtacgggctcatcgccctcatcggcggactgggtcaggccctcgatgcgacgacgaagcgcgtcggcgtcctcgggatcgatcttgagtccggcgatcagcgactggcgcatggtctcgtaatcgaggttggcaaagaaattcagctgttgcagcgtcatgaagcccttgagctcggggaatcggtggacgatgtattcctcgcggtcgtcggcggcgcgggtccagtcgcgggtgagctgcggatcccagttggcggtaatcgatccctcgcgcatgcggtagtggtacagcgccttgggcagacggaccacgcgcgtggcctcgccgatcacgttgcagatacgggagagatcctcgattttgcgccccaccgggaaggagaatccggtgccctgataggtggaggcgggtgccaggaaggcccagaaatagccgtcaatctcagccttgacttgctttttgatggcctcgaccggggtcaggatctgcacctcggtgaagtcgttgtggcgatagttggacagcagcggcttgttgttctcggagatggtgtcgaactggaacatcacgaggtcggcgtcatactcgcgcatggcgttcaggcagtcctccaccaacgtgggggccacggtgtcgtcggaatcggcgaagtatatgtacgcaccggtggccccggcgatgccggtgttgcgggcgtcggacaggccgccgttgggcttgtgaatcacgcgtatgcgcgggtcgcgggcggcccaggcgtcgcacatggccgggcaattgtcgggcgagccgtcgtcgaccagcagaatctcgaggttgcgataggtctgcgcaaccacagacttcacgcattcatcaaggaatttctcgaccttatataccgggatgatgatgctgaccaacggctcctgttccatgcctccagcgtagcgccgtcgtgcgaacgcggcggcgctacgggttcgcggaccgcgaaacccttagaaatcccagtcgtcgtcatcggtttcttcggctttgcccatcacgtaggaggagccggagccggagaagaagtcgtggttttcgtcggcgttcgggctcagggcggccaggatcgcggggttcacatcgcaaatctcagccgggaacaaagccgggtagccgaggttcatcagcgccttgttaccgttgtaccgcaggaacttctcgacgtcatcggtcaggcccacgcggtcgtacagcgactgggtgtactccacttcgttgtcgtacagctcgttgagcaggtcgtacgtgtagtcctgcagatccagacgctcggcatcgctcagctgggcgatgcccttctggtacttgtagccgatgtagtagccgtggacggcctcatcgcggatgatcagacgaatcacgtcggcggtgttcgtcagcttggcgtgcgcggagaagtacatcggcagatagaagccggagtagaagaggaaggattcgagcagggtggaggccaccttgcgcttgtacgggttgtcgccctcgtagtagtcgagcacgatttccgccttcttctgcagaaactcgttgttctcgctccagtcgaatgcggcatcgatctgttcggtggagcacagggtggagaagatggacgagtagcttttggcgtgcacggattccatgaaggcgatgttggtgtacacggcctcctcgtgcggggtgagcgcgtccggaatcaggctcacggcaccgaccgtgccctggatagtgtcaagcagggtcaggccggtgaagacgcgcatggtgagcgtgtgctcgtcctcggtcatcttctgccagctggggatgtcgttggagacgggaactttttcgggcagccagaagttgccggtcaagcggtcccagacctcaaggtctttctcatcttcgaggcggttccagttgattgcggagacgcggtcgatgagtttcagcggtttgcgcggaatggagataggtgccatgagtgttccttattactcgttgtcgttgtcgttgtcgttatcgtcgttggacttgttttcgaactcctccggcgcggtcagccggagcagtgctctatagatggttcgtgacattgttggttccttagatggtggagcccccctcagtccgcttcgcggccagctcccctctctgaggggagctgtcggcgttagccgagtgaggggagtaacaacggctctctggttgttcaatgcgtgcggagaccgccgtctgaggccgaaggcgtacgaaggtacgtcgagtgccgaagaaaggcggtatacgctccctcgaacgatcagagcatgcaggagacgcagccttggacttcagtgccttccagggcttgctggcggatgcggatgtagtagagggttttgatgcccttgcgccaggcgtagatctgggccttattgaggtcgcgggtggtggcggtgtccgggaagaacagcgtcagcgacagtccctgatccacgtgctgggtggcctcggcgtacgtgtcgacgatggccttccagccgatctcgtaggcgtccttgtagtacccgaggttgtcgttggtcatgtaggcggccgggtagtacacgcgcccgatcttgccttccttgcgaatctcgatcttggaggcgatcgggtgaatcgagctcgtggaatggttgatgtacgagatcgagccggtgggcggcacggcctgcaggttctggttgtagatgccgtccttcagaatcgcgtcgcgcagggcctcccagtcggccgcagtcgggatcgcgatgccgtactgttcgaacagcgcacggacccgttcggtgcgcggagtgagcgaacgacgaccatcggtgtacttgtcgaagtagttgccctggccggccggcttggcgtagtcgctcgtagcgaagctggcgaacgtgcggccatgctccacggcgagcgcgtgcgaggcacggtaggcgtggtaggccacggtcatgaagtacatgtcggtgaagtcgaggccctcttcagaaccgtactggatgccttcgcgggccaggaagccgtgcaggttcatctggccgagaccgatggcgtggccctcctcattggcgcggcgaatcgaaggcaccgcgttgatgctggtgtgctcggccaccgaggtgagtgcgcggatcgccgtctccaccgtgtggcccaagccgccatccatcgccttggcgatgttgagcgaagccagattgcaggagatgtcgcggccgacatgcgcatacgtgaggtcctcgttgtatgcgctcggctcctgaacctgcaggatttccgagcacaggttggacatggtcacgcgaccttcgatcgggttcgcgcggttgaccgtgtcctcgaacacgatgtacgggtagccggattcgaactgcagttcggcgatggtggtgaagaacttacgggcgtcgatgtaggtcttcttgatgcggtcgtcggccaccatctcgtcataatgctcggtaacggagatgtcggcgaacggcttgccgtacacgcgctccacgtcgtacgggctgaacagggccatctgggccttctgtttggccagttcgaacgtgatgtccggaatcaccacgccaagagccagcgacttgatgcggatcttctcgtccgcgttctctcgcttggtatccaggaagcgcaggatatcagggtggtgggcgttgaggtacaccgcgcccgcgccctgacgtgcgccgagctggttggcataggagaaggagtcctccagcagcttcatgaccggaatcacgccgctggactggttctcgatgtgcttgatcggggcgccgagctcgcgcaggttgctcagcagcagggccacgccaccgccgcgcttggagagctggagggccgcgttgatgccgcgcgaaatcgactccatgttgtcttcgatgcgcaccaggaagcagctgaccggttcgccacgctgggccttgccgaggttcaggaaggtcggggtggcgggctggaagcggccggcaagcatttcgtcggcgtattcgatggcctgctgctcattgccggcggcgagctccagggccacagcggcgcaacgctgcgggaagtcctcaagatagaggcgaccatcgaacgtcttgagcgcgtaggacgtgtagaacttgaacgcaccaaggaaagtgccgaactcaaagccggcggattccacgtgctcgtagatgcggtcgaggaattcagcggagtactggttgaagaccgcagggttgtagtactggttgctgatcaggtattcgagacgctcggcggtggaggcgaaccgcttgctgttggtggccacgtgccctgtcacgtattcgcgttcggcggccttgtctttgtcgaactggatcttgccgtcggcgtcatagaggttgagcatcgcgttgagcgcgtggtaatcgtgcgccgggtcgtactgttccgctgcggtgtcggcagtattgtcgagcggcaggccggtggcggtgaggtcagtcattggaaatccttggaatatggcagaagtgtgtttactcagacagttgctcccctcagtcaacttcgttgacagctcccctcggagaggggagccaatacctcgagggggtcaagatttactgttcggtgaagaagcggacgaggccgtttcgcacggcggcagtgtcttccggggtgcccatgagttcgtaacggtagaggtagggcaccttgcatttggcggcgatgatgtctccggcggcacagtaggcctcaccgaaattggtgttgcctgaggcgatgacgccgcgaatccactcgcggttggctggatcgttgaggaagcgtttgacctgaatcggcactgctttcttgaccacgccgccgccataggtgggcaccatgatgacgtacggttcgcggacgtttagcgccgggtcggcggcccgcaacgggatgcggtagacgttgatgccttcgtcctgcaaacggcatccggccacgaaccgtgcggtgttttcggaggccgacgagaagtagaccaatgcgccgatcgtcttgccttcggccgcgaattcgggctggctcagactcacgcggacaccgtggcggcggcgcggttgtcggcggccacctgctgggcgacttcgcgaatcaggtcggggcggtagccggtccaggagttgtccggcgtgatgaccaccggagcctgctggaaaccggcggcctgcagctgctcaagggtggaggggttctgcgtcaggtccacggtttcaaacggcacacccagcttggtgagctggcgcttggtggcatcgcactgcgggcaatgcggcttggtgaacacggtgacggtcatggcgactccccttgatgtggttctgatgaacagtgaagcgaaggccatattacagcggtgtgatttgaaatcaaggcactatatgtagtggcgcgtgtcacataacaaacctagatatagggtttttcgttgatattccgccattcccatgcaccccccgaaaatcggcgtgcagcgacccgcccaatcacatgtggcattgttcacatttgcgtttgaaccgctcttcgactgatcctcaaccgccctgcaaccgccatcttgagtttcgaggggctgttttgaccctttccggagatctatctccgtttcgaggggctggtactcaagtaagcgcatccccaaaatggcggaatgacggtggggcgaagccgtttatacccgtgttctagcgggccaccagcccctcgaaacgggagtaaacctctacggaaggccaaatcagcccctcgaagcggagaacggatacctcggcaccccgtgtggagccagaagacccggccggatgtccaaacgagcatccggccaggccttaaaagtagttgttcagttatcagaatcgatgcggcgcgatactactccgcgtctttacggctccaacagatcttcgatgcggcagccaagcgtgcgggccaaagcgagcacggtggagacggcagctttgccaaggtctttgcggcgctgctcgtacatttggatggagcgcagggtaacgccggagcggcgggccagcccggattggctgagtccggcgcgcacgcggactgtgtgcagccgggagtcgccctcggtgcgattatgggcggcccgctcgtcgtacacgtcgacgaatcggctttcgtcggcttcgtgcagagtcgggtacagtcgcacgatatcgtcgagcgacagcacatcgagaatgtccgagaaccgcactctcctggtccattggcagtatgcgagtacccatccggcccagtattcgggtgttgagccggcgcgcagtgcggctggcggcatatcgagaatgcgcgcccaaccggtttgccgcatgatttcggccaccagctcctcgccggacatgccacacacgtatttgggcgtgcctcgcccgaaaagcgcggccgcctcggaggtggcgaagaagtccatgaataggccgaccggcaacccgcaatcgttcagcgcataatcgaaggcgccggccaagttggccatggcgtccggcaagtatgtctcatcataggcggggatcatcgttggtcactttctcgcggatgatgtcgcgcatgaacaggccgtcgagatcggcttctgcacttttgcggcggtaggcttcgcgagctgtgcggtcgcgctcgttacgcaatccgtggtaggtcgaagcgcgggcgatttcgcagccttggaaccgcagtgccgcgaatgcctgaggactggcgagtacgatctgcttgccgagctcgcccaaccgcatcgcctcagcgagttggtcgacggaaatcgcgttattgacaaaagcgcgggcgaacgagaaatacgaatcgtcggcacgacatccgacgatgacgtcagcctgactggcatccggcagaaacacttgtttcagatattcgatgccttgcgcggcgacggcggtggtcggctggaaacgacggttttcgaccagcatggccagccagttcaggatggtgtagggcggctgggacaggtccaggaagaggagcccgtccgtggtcaacgtgtaccgattcgcgaaaccgtcatccagtcccgcgcacgcccattccttggccagctcgacgctgcgcgtgcaatagaatccgcggccataatcgttgttcggcttgaccagcccgtattcaggatgcttgatgacatgcgaagagccatgccacagttcgatcgatgcggtctccattggccggctccttctctctccttacatattcttgattatatcactgtggtgatagccataggggaaatacgagatgaaaaataccgctgtatacgttcgtacacaacgtgaaatgtatacgaacgtatacaacactgatgtccggagtcatgctccgcagtggcgcagcggacgcgccactacaatcggaatatgggactgaagacgtggaagaagtggacggactggccgctgatggtgctgtccgtggtgtttctggtggtgtattcgtgggaaattctctcccgcacgcatatcgcgctgtgtgaaaccgtcatcaacgtgatctgggtggtgttcgtcgtcgattatgtggtctcgctgtggttggccgacgatcgctggcggtggttcaagcacaacctgttcacgctgctgaccatcgcgctgccgatgctccggcccttgcgactgttgcgtttgctgaccgtgctgcacgtgctgaaccgcacctccggcatggcggtgcgcgggcgcatcaccgtatacgcggtcggcgcggtgggaatgctcatgtacgtgggcgcgctggccgtgtattccgtggagcgcggggcgtccggatccacgatcaccgacttcggcacggcgttgtggtgggcgttcgtgaccgtgaccaccgtgggatatggcgacttctcgccggtcaccttccaaggcaagatcattgcggtggtgctgatgttcaccggcatcgcgttgatcggtattgtgacggccacgctggcctcgtggatcgtggatcaggtcaatctggagacggatcggcgcgaggacgctcgggagaaggaagtggccaaggaagccgcgcaagaggctattgcaacatcagccaatcccgaaatcgacctattgcgcgaggaagtgcgtgagctgaccgctacggtagccggtctgcgcaccgaacttgagcgacgttgattggcgaagcgggacaaacaacgattctgccaagaaggtccgcgtcagttgttgtcaccgcggattgcggcagaatcattgccgccacggctgttttcttcagtcggctcaacccaacttttgataatttttattttaggttgattcagcgaggaggcggtccacatgaaggcaaaggaaaacccattcaagccaacggcaggaggggaaccgcccctgctcatcggccgaggcaaagttatccgcgatttcgagaaaggtctcgataacggagtcggtgccccagggcgcattatgctcgtcaccggcgctcgtggaaccggaaaaaccgtgatgctcactgtgttcggagaccgggccaaagcgcgcagatgggatgtcatcgaagaaacggcctctgccggactatgcgaacgccttgttgatgccttacgaaccgggcgaggggcccttgaccacctcgctatccgaccatcgttgacttttgctggagcgggcatcggcctcggagaagccgaactatccccgaagcgtatgcccgaaacgttgagaagtgccattgccggacggttggatgcgcttgagaagcgccatgctgggttgcttatcaccattgatgagactcaagcggctgagcgatccgacatgattgccatcgccactgccatacagcatcaaatcagggaacgacgcaatatcgccatcgtgttcgccggtctcccacagatgatttctgatttgttcaatgacgaagtcatcacgttcctacgtcgcgcgaaaacgaacatactcacagatattcctcttgatgaagtgcgcgatgctttcgccacaacattccgcgcctccggcatgtccatcaccgacgctcaattaagcactgcagccaatgtgacagccggatacccctatatgattcaactggttggctaccatatctgggatgccgcagacatgcgggactcggataccatcatcgacgctgatgttacggcaggtatcgaggaagcacgtattgaccttgataacgccgtgtgcatcccggagttgcaaggcttatccaaaaacgaccgtgagtatctcgaagccatggcagcgtcagatggtccctctcccaccgtgaatgttgcacagcgcatgggcaaaacgcctaactatgccgccacctaccgcaaacgcctccttgacgccttcgttatccgcgaaacagaacgaggcgaagtcgattttgccgtgcccttcctgcgcgaatacttgcgtcggaatcagtaatcggcacaatgcacagtatcgatatattccgttccatataatgacttttcgcattcagatacacaatggacggcctgttgagtagcactcagcaggccgtccattctatttagctattcagttatcggagacacacctcaggccttggcctgagcgccagcgacctgctgggaggccatcacgccgaacaggtagccgtcttcggagaagtattcgaaggtacgaccggcgaagtcgcggcattcgaatctgatatcgttatcgattcgatcagcggctcacgatactgcccttgcatcgctgtgccactgttgaatgtgcccggctggctcacctttgggtcatcgccgacacatccttgatgccgatggttatagagtcgcaaattcacgactggcgcacctgcccacgcacctatcctgtcatttcgagcgcataatttgctaccacatccggtcagggcaatcgaccttaatggcgtaaacggcacttctcaatacgtaaacggcacttattcttggctctcctctcagagaggggagccaagaaatatcaagctcggcctcccaggagagagccagaataatgcaccggcaaggcattaggatggagggcatgagcgatttgaacgcgttgaatcttgagcccggcgaagtggttggtgggtatacgctgatctcccggctcggctcaggagctatggggtcggtgtggcgggtgcgcgacgacggcggcaccacctatgccatgaagattctgcgcgactccctgaccgacgagtcagtggcaggctccggctctgcgtccacggccctgcacgaccccaacctcaagcccgatgtcacgccgcgcgagcgcctgcggcgcgaggccatggccttgaagaaggtcaatcatccgggtgtgtgcggcatcgtggatatggaactcgacgatacgttggcgttcatcgtcactgaactcatcgagggcaagaatcttaaggatgatgtggccgccaatggccggtatgtgggcgacgatctggaacgcttggcccgcaagctcatcgaagccaccaaagccgtacatgcggccggcatcgtccatcgcgacatcaaacccaccaatgtgatggtgtcggccgccggaccggtattggtcgatttcggtatcgcgatgggcgagggcgaaagtcatgtgacccgcaccggcctagtgatgggtacacccggattcatcgcacccgagattattgacggtgccgaatccgacgacgccaccgattggtggtcggtggcgtccgtgctcgcttttgccgcaaccggcgcgcctgtgttcggcaccaagccgatgatggcggtacttgagcgcgaggcctcgggcaacgcgaatctttccggactaccggccggcacattggctgccttccgttctgcactggacccggatcgcagggatcgttgcacgccggatcaattgctgaatgccatcgccttggatgcgttgaatcccaacgcttggcagggcgagcaggcgggaccgttcgccgcgggagccgtggctggacaaccggctgcgatcgttgccgaagccgcggaggcgatgcccccttttggcgcggccggcggcgttgaccgcaataatccccgaaccatctggcgcgcggccgaggaagccgctgaggctcccaccatggccgtgttctccggcaataagggcgataacggcgatggcgaaaccgccgtattctcgccggctggcgccgctaccgccacgctgcccttagccgatatgccgccacgtccgccggccggtgcggagcaggccacgcaactgttgcccgacgctgctgccgatttcaccgacgacgccggcacacaggtactcaccggcgcgaccacaccgatgccggaccaaaccacaccaatggccggcgccaccacaccaatgaccaacaccgattcgactccggccccgaccacgccgctggccgagcgcaccaccgtactccccacgccgcagccgtcatcattccccccgtccggcaccgcccagagcagctgggatcccgcaagcaaccagcccacagcggtggaccccgccattcgcccggcattgcagcgcatcatcgaccaaaccgcccaagcggcccccaccgaaaccatggtccaaaatcctcccatgcccaatccggtggacgtgaagcgaggggaatatctgcggcgcggcaccctgccattgatcctgctggcggcgccgctggcggcactggcggcaaatgctccgctcgtggccatcatcgcggccactgcgttgttgtggctactgctcaccctggcctataacaccgaaccccagcttgagcgcgagggcaaacgcggcggcgagcgcaaaaactccgattcgtggattcgcgtggcgacttttccctggcatctggtcaaagccctgctgctggccattccccgcatactgctgctagtcatcatctatatggcgggaaccgccgtggccaccgcggctctggcactgcccgttcacaccatctcctggtatttcaccgcggattggggtattccggtgccgttgctcaatgatgtgccgttctccgcttccgggctggcgctgggcggtttcatggccatcggctggctggtcactgtgttcgccccacagtcgatgatgattcggctggggggcggcgtactgcgcgggctcaaacacagtcgcccggcgggcgcgccatccaccgaagtgggtggggctccacctgctccagtggtgccggcgcccaagggcggcgggcgcggcaccgtgctgttcaccatatgggccatcatcaccgtggccttgtgcgcgatgccgattctgggcatgccgatcaactggatgccgttcgcctagagcggggcggaatctcacacatcagccatccgcacacatggccgttgtgtatccgatacgttcgttccgtcacacttttacagggaattcacctcagatcagctctgggcgcagtcctcctcaggcccggtcattatgatggggcccaaacattgaagcgattgcaaggggatagctatgtcagatccgaagcgtcaggccaagcgtgccacacgcgctgagcgccgagcggccgaggaggccgcccagcaggcacgggccgagcaggcggctaaggaacgtaagcagcagaccatcatcggctgcattgtggtggccattattgtggtgctggtggccatcgctggattcgccgtatacaaggctatgcggccgtccaacaccagcagcagtagccagcaaagcaacatgaccgtggacgaggcctatagcaagctcaagaaagtcagtacccagccggccaacgccgatgacaaggccggcttcgtgatctcgagcaaggggtacggtcagaaggccgaaggggcgcccaccgtttccatctacatggagccgctgtgccccggctgcgcctcggtgaaccgccagcttgacccgacgctcgtcaagctgatgaacgccggccagctcaacatcgatttgcacttcctcaatttccaggacaacaagagctccgacaactactccaaccgcgcgttcaacggtgccatctacattgccgagcatgatgacaatcccgatcacctcatgagctacctctccaacatctacgctgaggatttccagccgggcgaattgtccaattacgagccggtaagcaacgccaagctggagaagcaggccgtcaatgccggcgtgagcgaggatgtggccaccgcggcattcagtggtaagaacgaatacgtcaagtggctcaccgcctccaacaactacacgatcctacgccccgaactgttcaacagctccggcgcgttctcctcccccacgctcaccatcaatggcgaatactgggatctgaagcagctcacgctggcggacaccagcatggtggacggattcctcaagtccatcggcttggactccgatcaggtgggcgtggaaggccagatgccatcgatcggcgccaacaagaagccgatttcgctggccgattaattaccggcgcggctcggcctgaattgaccactcgagaactaccggtatactagagatttgttcaaaacgatttacgcgttaagaacaatcgcctctttagctcagatggccagagcggccgccttgtaagcggcaggtcgtcggttcgatcccgacaagaggctcgacgcgtagaaaagtggcgtattatatgatacgtagacttttctacgcatataattcttaccttgggtaagtactccaggagccttcccccaactatgggcttcctggaatgagggcggagcgtcccccaaccagctccgcgccttcaggggggcgggaacatccccttctctcccgccccctttttcttttctttttttgagctcagaacaatctgacgagcaggaatggtgacggtggccggtgaaaccgcagtacgggccggaacaaccgttacgatgggtggcgtaatcgttcatccagcaggaagagtatggcaatggcacggcgttggaccccgcagcggtttgttacactgcgtcgcatccgcgtaatcgtctgtatcgcggcgaccagtatcgcgctggctggatcattcgcgttcacctcgcgtaaatccgtagccctgaacatcaacgggcaaaccacccaagtcaccacatatgcgatgacggccacccgtcttctggaggaacaaggggtggatatcaagacccacgatatcgtcactacctcgtccggcgaccaactcgccaatcatgccgtggtcaccgtacagtccgcctaccagaccactatcaacatcgacggcacgtccgttcccttctggaccgtggccaccagtgccgaccagttgctgggatttttcgaggaaaaccagaacaacgccacaaaaatcaccgtcgacatcgacaatgtgtacaaccagctcaccggcggactggtcatcaatcaggatggcccggtcaccgtcattgcggacggcaagacttccgtggcccccaacggcaaactgcccgcggcctccattcttgactccaaaggcatcgtgctgaacaaagaggaccgtgtgagcgtcgaaaaggacggcgataccactatcctgcgcgtacggcgcgtgacgcatggcgaggaaacacgcacagccatagtgccatactccacacaaaccatcatcgactccaatctgcctgaaggccagtcggagatccgccagcaaggcgtcaatggcgagaaaacccaggtgtataacgtcacgtatgtcgatggcgtggccgaatcggagacgctgaaatccgaaaccgtcaccacgatggccatcgaccagatcatcgccgtaggcgccgccaagtctgataccgataaaggttccgacaaaaaatccgactccgccgataacggcaaggccgattccggtttcaacaatcagcacgagtcgtccggtaacaatgccaacaacacaggcgacaagaacaacagcagctctggcaacaacacgaacaccgataccaacaacaatgccggcaacaccgggggcaacaactccggtaacaccggtaacaccggcaattccggtaacactggtaattccggtaacaccggcggcggtacgaacaacaattccggctcttccggctccgattcaggaacaaccaccacgccctccggccgactctggcacgccaccgtagcccaggctcaggcctatgccgccggtgccgccgcgcagcgcgggtggacaggcaacgactgggattgcctggtcaaactatggaaccgcgagtccagatggctgtggtatgccgaaaacgcgagctccggtgcctacggcattcctcagtcgcgaccagcagacaaaatggctgcgttcggcgccaattaccgtgacgatgccgccgtacagatcgattggggtctgtggtacatcgcacaaacctacggcagcccgtccaaggcatggcaacattccgaacaaatcggttggtactgatcggttacgaagcccacaaggaacacacgcttatgaacgacaccattcccgccaccggtcacctgttaggtgccgccgatatccgtcgtatcgcggccgatgccggcatcagccccaccaagaaattcgggcagaacttcgtcatcgaccccggcacggtccgtcgtatcgtacgagaggcgggagtgaccgctgccgatcatgtcatggaagtcggccccggcctgggatcgttgacattggcgattctggaaaccggcgccaccatgaccgcagtcgaaatcgatccgccgttggccgaacgactgccgggcacagtcgccgaattcatgcccgaagccacgtcacgactcaccgtcgtcaatcgggatgccttaaccgtcaccccggagaacgtgcctgatttcagcgatgacgcatcgtttacgctggtcgccaatctgccgtacaacgtggccacgccgattctgctcacgctgttggagcgtttcgacaacctcggctcgttcttggtgatggtgcaaaaagaggtggccgacagactcgccgccaagcccggttccaagatctacggcacgccgagcgtgaagctcgcctggtatggcaccgccgaacgggtgggcaccatcggccgcaatgtgttctggccggctcccaatgtggattccgcgctcgtcagattcacccggtatcaggccgatgacccggccgccccgggagcctcgaacagcacggccgacggcggcgcacaacgggaactcgtatttcgtctgattgatgcggcgttcggtcagcgtcgcaagaccctgcacgcggcattgaagaccattgcgccttccgaggcattctccatcgccggcatcgatccgacccgtcgaggagagacgctcaccatcgccgaattcaccgctctggccaaggccatcgaatcgtgtggagatggagatgaggcacaatgagtccggtaatctcacatccacgcccagccgctgcccgacatcagttcgatgagctctcccccatcaccattacggtggattgcccggcgaaaaccaatctcaccttggaagtgggacctgctcacgacgaatggggcggacgccacgaactggacaccacctactgtgcaatcggcgtatacgacaccgtcaccgcaaccgccaagcaacccggagcgggattctctctggagctcgaaggcgcttatttgggcgacttggcctcctcacgcagcgacatgcgccgcaaccatgcggtactggccctcttcgccatggcccaggcggccgagcgcgagccggatgtggcgttgaccatcaccaagcgcattcccgtgggtgccggactaggcggcggttcagccgacgccgcggcgaccatgctggcggtcaatcgtctctgggagctgaactggcctatagagcgtctgcgcaccattgccgccacgttgggcgcggatatgccgttctgcctgaccggtggccttgcatacggcaccggtttcggcgaacgcatcacggatatcgcccccggcagccgcgatgagctggcgctgatagaacagggattcagcggcgaagtattggtcggcgcgtaccagtcgcaactcagcactcctgaggtctaccacacctttgacctcgtgggagccgcagaaggcgaccgcaatcatctgcaggctgcggcaatcagcctgcatccccgcagcgggcaggccatcgacgccgccacgcaggcgggtgccagccatgcattcgtctccggatccggcccctcagtggtcgctttcgccgccgacgaggcagcggcacaacgcattatcgatgtgtggcgcgatacggctgtggtcgatcgcattattcgagccaaatctcccgcacaccccaatatcggcgtcagacagtgacgctaaggtagcaacaagccacccgacccatgaaagaagtccaccgatgacgtatcaggttgatgaacgtgaagcccgcaaggcgtacgtgcgccaccgccagaccatcgtcttttccatcagcggcgcggtattggcagtagtgctggtcatagccctactgttcaatttccacgttttcggcctcggcgaagtggagactccggcccgccagccgaattacggcaacgcggcaccgtgcgcggtcaaggacagcagcggcaaagcgcaatacgtgtccaacgcttcggtcggcatccgcgtgatgaacggcacctctcacggccaattcgccaaggccgtgggtgaggctttggccaatcgtggattcagcgtgcagaaaatcgataactattccagcaccggcgttgaacgcaccaccatctacttcggcaagaacgccattaatcaggcgtatacgctgatcggcaatttcaccgacgccaccatgatcatgacggctcgcgaggatcaactcatcgatgtggtcatcggcgccacgttcaacgatctgcaggacaccaaatcctccccacaatccggtaagaccatcaccaatatcgagggttgcaaggccgccgatagcatgaccaagctgcccgccgacaccaaacacgacgcatacacggcggagtaaggcgcatacagcttcatcttcgcgaaaaaccgtacgctgacacgtattcagcgtacggttttttggtatcggactagtatcggactactgaatctcggcgtaccagcgcttgagttcttcgacggccacatcgtggtccaccggaccgttatccaagcggtattccagcatgtgcttgtaggcgcggccgatcatcgggccgggctccaggcccagcaactccataatttcgttgccgtccagatccgggcggatcgcgtcgaagtcctctttcttcttgagttcgcggacgcgctcctccatctcatccatggcctgggagaagatcatcgccttgcgcttgttttgtgtggtggcgtccgcgcgcgtgagcctgttcagccgctcgtacaggtgcccggcatccttgacataccggcgtacggccgagtcggtccacggctcgtccacatagccgtggaagcgcaggtgcatattcaccagttccgagacgtcctcgaccagatggtggtcaaaacgcagcgccttcaaacgcttgcgggtcattttggcacccaccgcgtcatggtggtggaagctcactttgccgcccggctcgaaccggcgggtcttcggcttgccgatatcgtgcatcacggcggccaagcgcagcgtcaggtcgggggcgggcaccgggccgtccgggccggtttccagggcgatcgcgcgttcgagcacaatcatcgtgtgctcgaagacgtccttgtggcggtggtgttcgtcgatctgcaattgcagggccggaatctccgggaagacgatgtccgcaagaccggattcgaccaacgcctcaaggccggcgcgcggacggtcggagagcagcagcttggtcagttcgtcgcgcacgcgctcggcggatacgatgtcgatgcggtcgcgcatcgaggtaatcgcctcggccgcgtccggcgcgatacggaagcccagctgggccacgaatcgcacggcgcgcatcatacgcaacggatcgtcgtcaaaggactgtcgcgggtccaccggcgtgcgcaacacgcccttggacagatcactggcaccaccgaacgggtccacgaattgcaggtcgggcacgcgcagggccatcgcgttgacggtgaagtcgcggcgggacaggtcgccctcaagcgtgtcgccataattgacctcgggcttacgcgagtccgtgtcgtacgtgtcggagcgataggtggtgacctccaccttgacctcggtgccgtccgggcggcggcgcatggcacccagcgtgccgaacttgcgccccatgtcccagaagccgtcatgcccccaccggcgcagtatcggctcgaactgctcaggccgtgcggatgagcagaagtccaaatcgtggctctttctatggagcagcaaatccctgaccgggccgccgaccaatgccagctcgtaaccctgttcggcgaacagtcgaccaagttcgatggcttcgggccatacttcgaaattcaatgggcaccttcccgcgtgcgacgtttttctgccctaccagcataccgttaccccacctgcacacggggttgagtaaggtggagaatatgattacgcccgccgaacttgcccgcatactggggcaaacaccagattcggcggatagccatacccaagaccacctgctgtatacgtccgaaactccgcatcattccgccgattcgggcgattctcccgatgccggcggcaccgtgagccactccaccaatcaggccgttcatcaagacgaagtagacgcagtaccgactgcgcaacattccggtgtacccggcacacccgcaacgcccgccacacccgcaccatccgaatccgaaatatcggacgccgccagcgacatgcccacaccgaagccgatgatgcccacaccggccaccgtcttcggcatgcatgccaccgtcaccatcgccactaccagcggcactatcgaggggcaggccgatggtatcgccggcgaggccggtgccgagacgattgccaaggtcgagccgattatcgccacggcacaaacgtccgtaaccatcgtcacgaacgattccgcggcgaccgcccacgcggccgtagatactgccgttgcgatcgccaaggccgccgccgcgcataccgcagcgataccgactccgcgcgacgtgctgatgccgcctgcggcacgtaccgcaccggccgcaacgccggtcaccatgccggtctcagcgccgtctgcagcaccagtgaggcccgcaacgtcagcgcatcccacgccggccacggtcttcggccggcatccgtccgcggatgttgcctcgccggaaccggcagtgccagtagaaccggtgacgccacccagcccgactccggccatgatgccgcaacgccgtacgtcggacggtccgaccacattcgcttcactggatgcccaggaactgccggtcgtacgcgaatattcggcaggcggtctgattttcgatgaccagaatcgcgtggccattatcgcccgtcattcccgctccggccatctcgaatggtgcttgccgaaggggcatatcgaaaaaggtgagaccccgcagcagaccgctgtgcgcgaagtgcatgaagagaccggcatcctgggcgaggtgatcgattccatcgccaccatcgactactggttcaccggcaccacgcagcgcgtgcataagctggtccatcacttcgcgctcaaacagaccggcggcgaactgacggtggaaggagacccggatcatgaggcggaagacgccatctgggtacgttttgaagatttggatgacgtgttgagctatcccaacgaacgcaaaatcgcgtggctctacgccaggaagaagaacaggcaggcaaacgagtgaacctacccggagtcttacgacattgcacacgtctggcacacgcactggcggctggcgtcgccgttgtggcgatgctggccgctccattgaccgtttacgcgaacgatacgacggacacgactgattcatccgatacgacggacgcaacgggcaatcagaccgagaatcagcccaagcagagcattgccatcacgcaaagcacccccatcgtcacctccaaatcgggctatcatgtcaccgcggtcatcagcaatacggacagcacggccacgtcaagcggcacactgcacctgaccaccaatacgctgttcacctttgtctcgcgcaccgatattcagaattgggccgagaacaacgcccccatccccacccccaacgagttgggttccgttgacgtgccatcgattcccgccggcggcactgccaccgtcaccatcgaggtgaacgccaatcagcagacccttgcctccatagggagctgggggccgaagccgctgatgctgtcgtatatcgtcggcaatcagatactcgccgatttgccgagttttctgacccgatcttcggatgggctcaacaccgcgacgacaccggccatgaacctgaccgtggccatgccctacaccgccagcggctggcaggtcgataacaaggccatcagcaatcgcattgccgaaaccaccacttcctcgacatcaacatcgtccaagtccaacagcacggacaaggccgacaagtccgataacgccgacgccggcaacgcggccaaagccactgatacgcaagccatatccttatccgagcaggatgccgataccgcgcgatcccttgggcagacattcgccaagcaccgctcgctgcaagtgatcgcggatcctctgtattggcgtcagtccgcagtgcaaccgtccattgccggcatcatgcagcccgccgactttgacatcaccgcctataccgcgctgggtgataccgcggcctacgaaaaggccggcatcaccactgaacagtggaacgccaagcaggcggccgcatggtatgccgccggaaacgactccgaaacaccctccgcgtacgcatggcagggcaacaactgttggacgttggatgcgctgaccgcagcacgcgagcagggctatgacacggtgattgccgatgcctctttcgatgccgaccagactgaagccgtacacacaggcacctacgtggtggatacgcctgccggcgatgtcaccgtgctgaaggagcaatcgaccttgggcacgctggccaagggccaagccaccagcacggacgcgcaggccgagtccagcgatgccggtcggttggcccgactggtcgctcagagcgcgttctaccagatggaacagccctatacatcccgatacctgcttatgacgttctcccgcaccacggaggccagctggatcgatcaggtgatgagcgccttcgagcaggcgtcctggttgaatctgacggatctgaagaccatggccaaggccgatccgtacaatgtcagcgattcggtcaatcccgacaaggccgatgatgccaacaccgccaatacccggtcggcattgagacagttggccgacagccggcatgacatcatgcgcatggccacctccatattgaagaacgagattgattccgacgaggtctcgtcgttggccccacaggccctggcccggcaggatgccaatgacaccgtctcgcacagcaacgatccgacgcaatggattggctctttgctggtgctgcatgacgatatggcgctgcgatccatgtctggctccccccagccgacagccacgcgaaaagccatggtcagagccgcgaaaacactggccagcgatcttctgaacggcgtacgcatcaacccatcggaatcaatatccgtgttcagcgaatccgcgaaaatgccaatcaccgtcagcaatgaccttccttatgccgtcagcgtgcaggtcaactcgctgactgactccatgcagatcgtcacctcgcgaaccactgacatcgatattcccgcgcatagcgacgctcaggtgaccttcaccatccgcgtttccacttccggctcatcgacggcccatgtgtcgctgagcgaccgggaaggcaacagcttcggcaacacgcaggataccgcgatcaccagtgtgatgcgcgtcagtgatgccagcggtttcattatcatcggcttcgccgtgctactgtgcattatcggcctgtggcggcagttccatcggaagaaggaccccgacgaatgagttcaaccgtaggtcgtaattccctgatcatggccacgggaaccgctgcttcccgtgtgaccggtcagctccgcacgattcttctcgctgcggccatcggcaccactggattggcggccaacgcctatcaggccggttccatgattccccaatccgtgttcacgctggtgtccggcggcatcttcaacgccgtgctggtgccccagatcgtgcgcacgttgaaagaaaaagacgcccaagaacgactgaatcgtctggttacgttggccatcggcatcctattggccatgaccgtggtgatggcggcggccagccctctgcttgcccgcctgtacgtgggtagcgacgatcaccagatgatagccctgaccacctcgttcaccctgtggtgtatgcctcaggtgttcttctacggcctgtatacggtattgggtcagatcctggccgccaaagaccatttcctcacgtatgcgtggagctcaaccggtgccaacattattagttgcgccggttttactggttttattctgctgttcagcaaggccaatgaacagcccctcgaattctggaccgccgacaagatcgcgcttaccgcaggcacctggactttgggcgtggccttccaagcgctgatactgttcctgccgctggcccgtatcgggttcaagtacaaacccagcttcgggcttggcggctttggactcaggtctatgggtcccgtggcgttaggctctttgggcgtggtggtcaccagcgagatctgcggcattatccttacccgtatcgccacatccgcaccgcagcgcgcccacgaactgacgggtgccagcctgttcagcgtggcaggcaacgcgacctatcagaatgcgtacaccctgttcatcctgccctattcgctcatcgccgtatcggtatccacggctatgttccccaaaatctcccgttctgtcgcagctgcgaatctggatgaggcacggcacgatctggtgagcgcgctgaacaacgtagggctgctgatcatattcttcgccgccgccatggtcgtgttccccgaaccgatcatccgcgcattgcttccgtccgtctcgatggacgagaccatgctgatttcctacgcgcttatcgccctatctgtgggcactcctttgggatcggcgttcctgttgatccagcgcacgttctacgcctttgaggacggcctgcaccccttcctgtccgcggtgatgcagtatgggttcacctcggtattcatgatgattggcatgatggtacttcctcctgagcattgggtactcggcatcgcctgctcggtgacactcggcggattactggcgttgccgctgacgttgatgatgttgcgccgcaagttcgaaggcaatcttggtggtcgggagatcacgaggacatatgccaaggccattgtggcggcactggcttccggagttgtggtctggctgatcaaacaaccggtagtcgcactgttcgacgcggatattcgatcggtaggcgggcacatgagctggtggtctgcactggccatctgcgtggtgctcaccatcgtgctggccgtagtatatgtggctgtgttgtgggtgatacgcaccccggaactcatcagcgcctatcactcgatactggcccgtctacacaagactccggccagtgaggacgttgctgtgacagcccagccggaaaaagtcgacgatacgcaaatcaatcctgagacggagcccgtcaaggatagccccacacgtagaatatctaagaccagtctcgaacaccaatcacacggagccgaacgcactatgaaaccgcaactcggagacacgattctcaaccgatacaccttggtatcatcgttgcgtgaggagcctggcattcaggcatggaaagccaacgaccgtgtgttggcaaaggattgccagctgttcatcattaccaatcgcagcgctttcgccgcaatcgatgagctcgctggtcgcatcgccgccactcgccctgatcgtgtgattcccgtactgaaataccgtatggaatccgacgtacttctcattgtcatgccggtggacagcggccaatgcctgactgactacatggtggataccgacaagccgctcagctacagcgccatccggtcgattatcggagaatgcgccaacgtgctgcgcgaggtcattgcggatactcccagcagcatcgtcatcacaaccgacaccgttcgagtgactacctccggtgtgcagattgccgatgcaccatgtgccacgatgctggccgacacgtccgctactgatctgcgtacggacggtcctgaacggtatgcgattcgccagcttgcggcattgctctatgccctgctgacacgcacgccaagccaagcgacacccacattcaatctgcgcgccttgccgcaagacacccctggcgaattccgcgtgatttgcaagcgtggattggccttaagcaagcccgacgagcacacgttgccgatggctgcccttgtagaactcgacgccttgttgggtaattggaagccgctctctgaactgagcgatgctgatatcgctttgccgagcgtggaaagcgattgctcgattaccaaggcgatactgaagcccgccaacgagaccgatatcgtgcctattcccagcacgttgattaacagcagcagtcttccggaattgtctattgccccttccctgccggttcagccggccgccgtccccgctccgcacgcgatgtcaccggctcctctgcctgatgggtccagtactgctgacggcaaccagtctcaatctgacgcccgccgtctgtttgacttcaacctttctgacgcctgggagcacgagaatctttccggtgaagacaccggtgactggtacagcgaaatgaatccggcccccatcggcggtccgggtgataatactcggttgacggtgcctattgttaccggcggtatttccgatgccaccgtgggagagacgaccagtcgtattcccgtgttcgatgtcagcggccgtgctgtggcccccggtgaggaatcgctgcgtgccttggaagaggagcaggcccgcattgccgaagtaagcgccattcctccgagcttcacaccgaaggatgtgccggatgacgaggatgacagcaagctgcccgatgaacatctgttcggcaaactgtcgaccaaggtcgttgccatcattgtggctctgatattggtagtggcagcggctgtttgggcagtgcatgcgttccgatcctccggagacaatcctgccgatgcttccagcaactccagtgaaggtgactggcccgatatcaatgctgacgctgtgccattcggtggcagcaagaacgcgacgaacggtggcgccactgacgattcctcaaagtcgagtgatgccactcagagcgaatccagggactcggcatcagacaagtccaagaagtccgagactgctgattcgtcgtccaagaagaccaaggccaagaagtccggcgataaggattccagcgctgctccgcaaccgcgccatgagaacaacacggcgtttacgatttccagcgccaacttcctgtcgaatcctggcggccaatccgggtacgcatactacatgcaccttgaccagccgcaggatgcgtaccgcatggttatcaccatccgcacatccggtggtaagggctatattcgcgcaaataccactggagaccccactcagggcgagcaggtggccgaattcacctttgctgaaggtggcactactgaggtgaagttcaccaaagccgtcaatacgcaggatctgctgctgtgggtgccatcgggtagcctgccgcagaaccagctgtacatcgagaaggtggaggtcttctaatcggcatctataccgataactgacccaagaagggcggtaccgttcgcatacattcgacggtgccgccctttcttcgcgtctggctgaatgacatggaatatcgtatgggggtgtgacaatgtttcacgtgaaacataacgtcatcattatcggttctggtcccgctggctacacggccgccatctatcttggccgtgcaggtcttaatcctgttatggtcactggtgcgttgtcgccaggtggacagttggtcaacaccactgaggtggagaacttccccggattcccggaaggtattcttggcccggatcttatggatcgcatgaaggaacaggccaagcgcttcggtacaacctatatcacagacgatgtctcttccattgaggcgtgtgagagtgattcggtcaagccgacctatcgtgtaacgctctccgatgactcccagttggaggcatcagcactcatcatcgccacagggtcgtcattccgtaagcttggggtgcccggcgaacaggagctgtccggacatggcgtctcgtactgcgccacctgcgatggcttcttcttcaggaacaagcctatcgtggtcgtaggcggtggcgattcggcttttgaagaggcattattcctgacccggttcggttcttcggtcaccttgattcaccgacgcgatagcttccgtgcctcgcagatcatggtggaccgagccaaagccaatccgaccatcaccctgctgaccaacacagtggtgacctccattaccggcacctcctcccccacacagaacaccggtgcacctattgccattcctggcttgacaatcaaacgaccggctgtggcaccggccagtgtcagcagcattgccgtacgtaacgtggtgaccggagaagaaagcacgctggacaccaacgccgtattcgtggctatcggccatacgccagccactgattttgcagctggtgttgtggaccgtgacaatgatgggtatgtcgtggtgcagggtgccagcacggtgaccagtgcgccaggcatctttgctgcaggcgattgcgtggatcgtacttatcgtcaggcaatcagcgcagcgggcatgggctgccgtgcagcgctggatgcgcaggcctatcttacggactgattgcggcgacctgatgatggcttgctgttctgactgctgcctgtgacataggagcagcgctaggtcagtgttacagcatgccgcccttggatagtacgcaccggtcaaaggcatagaaaggcccctcaggcgacggagaatcacgatgtgtgatttgtcatcctccagcctgaggggttttctattgcgacaggggctacaacgcaggcatacgcccctgccaggaatcacgcagaggctataacgtcttgcgcgtacaacgcactgcacagcaataatgccggcgacagtgacaagccgatacaatgccaagtgacaacgctaagcatcggtgttgtcactgacgatgccggcgacaacacgaatgttcttatcgtgttacacccatttggaatcggcatcgccttggctcggcaccagcagctgcaggatgcgatccatatcctctggtgacgagaagacgatttcgatgcgaccatgcttggtgctgcccttaatcgacaccttggtgtcgaaatgattttccaaactctgctggatggcggaaccaacccaaggattggtcttggacgtcttgggcttcttcggctgctcccccgacgcaatcttcatggcgacgatttcttcggtgctgcgtacagaaagaccttccgcaataatacgagaagccagcttgtccatttcctccggatcgctcaggcccaatagcgcacgcgcatgaccggacgatagcacaccggcagccactctcttttgcacagaggccggcaggttcagcagtcgcaaggtattggcgatttgcgggcgagacttggacaccgacttggacagttgtacttgtgtcaacccgaactcttcgatcatctgctggtaggcagccgcctcttccagcggattcaaggccacacggtgcaggttttctagcaatgcatcgcggagcatatcatcatccgcagtggttttgacgatggcgggaatcgtctccaacccagccaactgggatgcacgccaacgacgttcacccataatgagctcatacgggctgtccaaatgaccggcaaacggatttgtgctggattccgtctcgtcgtgcttggcggctttggccgcagcaatctggcttgccggacgcttgcgcacgactatcggttgcagcacaccaacttccttaatggaagcagacagctcattcaactcatcctcgtcgaagatggtacgaggctgatgtgcattgggcccgatatcagacagtttgagttcagccagataaccaccggctaccggcttgagctcgtccttcttatctgtgtcagcggtctttgccgccgatgcagtctgagatgtttcacgtgaaacatctttgacggtgacggatgtacgatgtgccgtctgagacgcagacggcttgccgccctgctgaggtgcggcgaccttaccggtttgaggtttctccgtaccgaaaaacaggtcgctaggatgagtaatggtgtccaatgcgggcatggatgcgcgtttaccggcggctttcttggctgctttgctggacgataccatctgaggcgcggcaggctttgattcctgctgggcagtagccttcttggcgggggttatgtcagcagtggccgccggagtagacgaatcctcctcaatcattgcgggctgctccgccactggctcctcccctggcaatgtggggaacaaagcgccaaggcccttaccgagtcgtgattttgatgccattacttgttcctcctcgcatcaatggtgtcaaggacttgttgcgaacgctgtgcgatttccaaagctgcttcaccatacgatatggcacctatgccacgaggatcataggcaatcaccgattgggagaaactcggcgcttcggagatcttgactgaacgcgggatggtggtattcagcacaatgctgggatagtgtcccttgacctcgttatatacttcacggctcaatagcgttcggcgatcgaacattgtgacgagcatggtggacaccagcagtactggattgaaatgctcctgcaccaaaccaatcgtgttgatcagctggccaagaccctccaatgcgtaatactcagcctggataggaatcagcatctcggtcactgcacacatggcgttgatgaccaagaggcccaagctgggcgggcaatcaatgaacacgtaatcatagtgtttatctgattgacgcaggtagaggtccaaggcctccttcaacaatgtgtttcggttgggcagatcagccacttccaactcggcaccgctgagatcgattgatgcaggcacaacatcaagtgtgggaaaatcaggacagaccgtgatgacatcacccagatcggaacgcccctcgataacgtcatagaccgagggctctcccgatgcatgagatacacccaacgccgtagaggcattgccctgcgggtccatatcgatgaccaacacctgcgcgcccttgttcgccagcgccgcagcggtgtttaccgtggatgtggttttacccactccccccttctggttggccacggcaatacgacgggtacgttgaggtttggggaaatcggttttcttgagtacatcgtagcgtgagctttcatcagccatctggctgccaagcactgaaccgtgaccatcgaatattcgctgaagcgtttcggaagccgattctataggttccgactgatgatccttggtggacatcgctcctccttgcacagacgtaagttccagtgttctcattcgtatggacatgatgctcgttatccacaattgcgatatgcaatgtggataagtgtggataagtgtgaatgacgttgagtgttagattatgtattcgcagacgaaaaacattgaaaaatcagtgttttcatcattctgcacatcgtcccgtaaaaatgtggataacttttacgcacatatggaaatgtggataactcaatcagtactccactcatcgcttatccacaatcaccacgtgggtaggctcaagatccggtccgacagccgcctcaacgacgcgtggacgacgaccaccgaattttgcaatctccttgccagccttgtcgatttcagcctgagcagaccgtcccttcagtgcgatcaactgtcctgacggtttcagcaacggcaacgtccagccagagagtttggtcataggagcaaccgcacgacacgtgacaacagcgaacggatgaatttcccgcttccgtacctgctggatgacggcatcggagcgtccacggataatctcaacgttctgcagttgcatcaggtcaacacattcatgcaaccattcgattcgccgctccatcggttcaatcagcgtgaagtcatgatcaggcaaacacgcggcagccaccaatccaggaaaaccaccaccactgccgacgtcggcaactgttttgaagcggataccattcgtcacattccgaacgtacggcacaatcgcagcggaattcagaatatgccgttcccaaatgatatcgacgtcacgggggccgatcaatccacgaggttcaccctcttcggcaatcttggcatggaaacgctccaacttcggcaacgcatcacccaagacctcagcaagtacaggtgacccctgcagctgatccgtcatagccatctccctcaccatgtttcacgtgaaacaatcaacatggaaaaggcgtcgctcattacgacgccattctccctacggtcactcttgtttgtttagagacgacatccgttgaacgtccttgtcatctcaaaaactcgtcgacctattactcctgatcaagctcgtcgtcttcggcaacatcctcgattttgttcttgagatacaccgtcacgtaacgatgaggctcctcaccgtgcgagcgagacttcagcccctcttcccgaaccacatcgtgaacgactttacgttcgaaggaattcatcggcttcaaatcatacggctcgccggaatccttcactgcgtcaatggcatccagggcgatatcacggaggtgctgacgcttgcgcttcaggaaaccgtcgacatccacaatcagatgagaacgctcgccggtcttctgctgtacagccagacgagtcaattgctgcagagcatcaacgacttcaccattatggccaataagatgtttgatgtcggtatcgtcatcagcaacgatttgcacggtggggcggtcattacgcacgcccatctcaatgtcgccctcatagtcggcgatatccagtaggccttcaaggtaatccgcggcgatgtcagcctcttcgttgagctgatcgatcgacttcacgtcatcctgtgccatacgctactccttcatgtcgtgtttgaattccaagtctaagccctgctcccccgaacagagaaagtaatgtcggtgcgtgttgaatgtttcacgtgaaacatcgaacgcgcaccgacatggtcgtcacttctttttgcgcttacgcacgggctgttgacgctgatagccctgagtggccttacgctcagcctcttccttggccttggccaatgcttcttcttccagagagggcaggccggcctttgcgcggcgagcattctcattacgatgatcgcgcttctccttgtccgccgcagccggagagccaggggtcgggaatgcgtacacctgccacaatgtgcggcagaggttgcacacgttgttggtcagccagtagaccagcacggcgaacggcatggtggcaccagagaagatgtacatcaccgggaagagccacagcatggccttctgcatggtctcggcctgtttgttcatcgatgcggcgggcatgttgcgcttcatgttgaagtactgcataaaccacaggcagaagcacatcaggaacacgaaggtaccgatgaccaccttgcctgcagtagatgcgcgggtgaagttatcggtcacactgacaatgccgaacacatcggtttgggtgaattgcttggcggttgctacgtcgaacgcgcccagcgcaccgcgtttaccgttggcaatgtagggaatggccgacagcgtatagaacatggacatgaacaccgggccctgaatgagcataggcaagcaggagccagccggattggcgtcattgtcttgatacagtttcatggtttcacggctcatggcctccttggaagcctgatccgtcttgcctttgtacttgttctggatgcgcttcatcttcggcgccaacgcctgcatcttgcgcatcgacttcatctgcttgcagaacagcgggaagatacacgcctgcaccaccagcaccaggatgataatggcaagcacccatgagacaccaatcgggctcatgcccagcatcgcgaagaagtcatgcacgatcttcatgatccaggtctgcaaccactcaacgggagtcaggattttatatagaaatccccaaaacccgctatcaagcagaaattcatttgagttcatcgttgggcctctctttgggttgtggccaatggtgtcagtcggggctcttcatgagccttcgaccacgaaaatctgtaaaaaatggaataccgttgtggaacatcgtcgattcccccacgactccacggccggcaacgcagtaatctcagcatggcgagcactccccctttgaacgcgccataccgttccaatgcctcaatggcataattcgagcacgttggataatacttacaacaaggcggtgtgtttgccgagatgtgctgttgataccagcgcaccccaccaatcatcaccgccttgaaagaagctgtcatgcctcagccaccttatgcgccactgtggcaaaagccttcgcgatctgctgatctagcgaagcgaacgatgcggtcgcggcactgggcttggcgcgcaaaacgatatcgcaatgcgcgggcagcagatcctcatgggctctggccaatacacgaaacctacgcttcaccgtattacgggtgaccgcatgtcccaccgatttggagacagctaatcccaaacggcgatgcaccgtccggtcgtcatcatcatgatggtcgtcgggcaccaaatagtgcacgacgatatccttgccacctgctttgcgccggcgtttcagcacggtgacgaaatcacgatggctttgaagccgctccacctcaactatgcctgtggcactgatcggaatgatcaggcggagagggacttgcggcccttggcacggcgacggttgatcaccgcacggccagaacgggtgcgcatgcgcaggcggaagccgtgcttcatgtggcgacgacggttgttcggctggaacgtcctcttcataatccattgctcctaggtctattcggcaacgcttcgcgctgccctcacgtgagtcaagctataccaaaatactctcacccctaccctcaagtcaaaacggacggagtattttcacatttcgacacgttgcgagacacgcctcaaatctcttataatcggcggaataccaaccattcacggccaaaagttatccacaaattacatgtctgttattcacaatccagttatttcaacacgcgacacggtggataacttgtctaaaccagagtaaatattatctgttgtacagatttcgccacaccgatagaaggggccaccatggttaacgcttccggcgaccccgtaatcgaggccgcccacatctggtcagacacgctgacggtgctcaaacacagcgcttcgctcagcccacgagaaaaaggctggttggaaggcgttgttcctgaaggcgtcttcggttcgaccatcgtgctgtgtgtggacaacaacgatacgcttcaagccattcagggcgatttgaacgattccctgcttcaggcattgcgtacggtaaccggcgaaaatatgtttcccgcgttcaaggtcgtgccgaaaaccgagcccgaaccgctttcggcggcaaagccggcgcagccatatccttcggaaatttctccgaccgtcgccgagttcggtaaagaatcctatggtgcaaagccggtagccgcaccgcgggaaccgatgcccgccaccgagtcgcagttcccggtcggtcagcagaagatgaatcgcgatcccgagactcatctcaataagaacttcacgtttgattccttcgtgcccggcgattccaaccgttttgcccgtacggtcgcactggccgtggccgaaggttccggtcaggatttcaacccgttgtgtatctatggcggatcgggcctgggcaaaacccacttgctgaacgccatcggcaactatgcactggtcaaggatcccgggctaaaggttcgatacgtcacgtctgaggaattcacgaacgaattcatcgacgcgctgcaaaacccgaaccaaagccagggtcagattgctgaattcaaccgtcgataccgacaggttgatgtgttgcttattgacgatatccagttcctcggcggcaaggaagccaccttggatcagttcttccatacgttcaatgcactgcatcaggcaaataagcgtattgtcattgcttccgatgtggcacccaagaatttgaagggtttcgaggctcgactcatctcgcgcttcgaatccggcctgaccgtagacgtcaagccgccggatctggagacccgaatcgcaattcttcgtatgatcgcctcgatgaacggttcgaaaatccccagcgatgtgttggacctcatcgccgaacgcttcaccgagaacattcgcgaacttgagggcgcgcttacccgtgttacggccgtggcctcgctgagtaatcagccggtgacccgcgccttggccgagcagacgttgcaggacttcttcaccaccgatgtggaaatcaagcccacggacatcatcagtcaggtggcgaagtacttccacctgacgtttgaggatcttgtcggtaaatcacgaaccaaaaacgtggctgttcctcgtcagatcgccatgtatctggctcgcgaaatgaccagtatgagcctgatggatattggccaggtctttggcgggcgcgatcacaccacagtaatgcatgcctgcactcgaatcagtgaccgaatgcagcaaaaacaggagatctataactacgttatggagctcacggttcgcctcaagcaaagcaacaccaactgacacaacgcttctgagagacgaaaaacggcacttttcggaaagtcagtccgaaaagtgccgtttttggttgctcaggcggattctggtggatacgtcgaggcaacggattcgagacatcagattcctcatggctcccctttgtgaggagagctgtcgtcgcagacgactgaggggagtttcgaaggggaacacgcaaaaaacccatgaaacgagagaatcgattctgaggaccgattttgcgggtttgggcgagcgagacgaaaaaagtgccgaaaacggtctccagaatcgattctcctcgacgaaaaacagccttcaacacgccgtgcgaaagtacgaaaaccaaaaaagttatccacacagttgtgcacagatgtgggtaaactcggcggataactcgtggattacccactgttttgttgtggaaaactcgtgcataaccgcggcctcgatgtggaaaactcaaattcgacgaactggctgtggaaaactcgcccacttatccacaagccatgcagaatttgtccacaattttcagggacttatgaaccgttgcatttgtagggctcacccctacttatccacactatccaccggccttattacgacgattacttactcagttacgtgaaaagcatcatcgccacagtaacagccagtcacccatcgtacgtaagttcgccacctaacggctagaatatttctcagccaatccgacgaagggaacaatcacacatgaaagtcgaaatcgatactgcagccctggccgacgccgtagcctggacctcccgagtcatcgacgcacgtccctccaacccgattctcgctggtgtcaagctggaagccattgacggaacgctgcaattctccgccttcaactacgagatttccgctcgccaccacatcgaagccggcgttgacgaagccggttccgtactggttcagggcaagctgctggccgatatcaccaaatcgctgcgttcggagaaaacgtacctggtcaccgacggctccacgctgaccatcacgtccggcaagtcgaagttcaccttgcagctcatgcccgacaccgagtacccggatctgcctgtggtaccggccatgctcggccaagtcgatgccccgactttcgttcaggcagtgaaccaggcatgcgttgccgtctcccgcgaagaaaaccgcccggtactgaccggcgttcgcatgcaattccaaggcgacaaggtcgtcatgacctccaccgatcgcttccgtttggcccgcgccaccttcacttggactccgcagaacccggacgtcgacaccaccacgctggttcgcggctccctgctcaaggatgtggcccgtgctcttgacgagcaccagaacatccgccttgatttcgatgccgatagcccgacgctgctcggcttcgaaaacgccggccgcgtctccacctcccagctcatcgacggtgaattcccggcggtcgaccgcctgttcgccgacgaatacccgattcaggccgtagtcaacaagcaggatctgctcgacgccatcagccgtgtggctttggtcgccgaacgcaatgctccgattcgcatgaccttcaccggtcaggaagtggcgctgtccgccggatcggtcgacgaggcccaggccaacgaaacactggacatcgacatggatggcgacgacatcaccgtggcattcaacccgtcctacctgaaggagggtctgtccgccgtgaccgaaccattcgtgcgcatcaagatgacgaccccggtcaagccggtcgagttcaacggccagcaggaagctgattccgacgagtccatggactaccgatacctgctcgtgccgatgcgcttcaacaactgagatccctgaatttccaacgattcgctaatgcacatctcccgtctcgcactcgaccactaccgctcatggagtcaagtagtggtcgatttcgtaccaggcgtgaatatcctgttcggcaagaatggcttgggcaaaaccaatctggtggaagccgtcgaagtgctgtccaccggatcgagtcatcgcacgtccagcacgttgccgctgatcgaacgcgggcagaccacggccaccatccgcgcgaacgtcgctgatgatgccggtcaagccactacgtatgaagcgtcgattcatgcgcgtggtgccaaccgagcccgcatcaactcggggtcgtcgctgtatctgcgcgatatcattggcaagattcccagcgtttccttcactcccgaagatcagcgattggtgtccggcgatccgggagcacgccgcgtcatgatgaatcaggctgcggctctgctcgagcccggatacatgcagacgttgcaacagttcacgcgcatcgccaaacagcgtgccacattgttgaagcaattgaatgccaatgccaacaatggacagccgatggatgcggttctgagcggtttggaaatctggaccggccagttcatcgaagccggtgtggcgttgacccgtatgcgcgctcatgtgatcggtctgcttgccgagccatttgccgcgatttacgccgacttggccggtgccggcgagcaggtgacgctcacatatgcgccttcattcgacgaagtgctgatgttcgacgatccacatccgcagatcagcgagcattttcaacgcatctaccccggtgaaatggctcgcggcgtgaaccttatcggtccgcagcgcgatgacatgaaccttgagttggccggtattcccgcccgcgagttcgcttcgaacggcgagatgtggacgatggcgttggccttgaaaatggcattgtttgaaatcgtgcgtgaccggttgggattgcagccgattgtgattctcgatgatgtgttcgcccagcttgacgacagccggcgcgcgcagattcttgatttcgccagaaaacaggatcaggtgctgattaccgtggccgctgaaggcgatgtgcccgactatgaatcggcccatcgtatcgacgtggccacactggccgaacccgcttccgtaatactgccaactctgggcaatttgtccgattcgcgggaaaacgagagtttgggtaagtatgacggaaaacccgcggtggacagcgcgtccgtagaacggaaagtgtcatgaacccgccgatcgcccgccaactcaacctggacgagaccaaactgccggccgaaatattcgagcggctctcccgtcgcggggcgaccttgaaggactacagacgccgccgtgaagaggccatcgaaaacttcggcaaaccggggcgcgatccggctgaactgggcagcgtgatgaccaccatcgccggcaatggcgtctgggcggcgaatatgaaacttgcgcaattgcgcaaccattgggaccaagtggtggggcaggccatcgccagccattcggcagtcgccgatttcacggacggcgtactgaccatccgtgccgaatccacggtctgggccacgcagctgacctaccttatcccccaacttaccgataccatccgtcgcaatctcaaaggattgaccatcgccgagattcgcgtgaccggaccggccgccggatacacgcgcaaatgggctcggcggcggtagccaagataccaaacaaattcgcagaagcctcgctatggcgctcgtcgggttagacgagtaaaatcacatgcagtatggtcaaatggccagaagagccctttacgggcctcgtaagccatatcgcctccgtgaatgaccttcatgacggaggttgaccctgtagtcacggaaggaagcctgttggcagacgaaaccagcaaagaggagcagctgaaggcggctgcggaacgcatcaacaatgcggaattgaccgaaggcgaacttgacgaatccatggcccccgagcattatgaggcctccgatctgagggtgctcgaaggactcgaggccgtgcgtatccgccccggtatgtacatcggttccaccggcccgcgcggtttgcaccacctggtctatgagatcgtcgataactcggtcgacgaggcgctggccggatacgccagccatatcgaggtcaccattctgccggacaacggcatccgcgtggtggacgatggtcgaggcatcccggtcgatgaggtgcccggcgagggcgtctccggtgtggagaccgtgatgaccaagctgcacgccggcggcaagttcggcggcggcggttatgcagtgtccggcggtctgcacggcgtgggtatctccgtggtcaacgcactctccacccgcgtggacatcgaagtgcgccgtcagggcttccactggacccagacgtacatcgaccagcaccccaccgcgcccttgaagcagggcgagccgatgaccgaaggcgagtccaccggtacgtccgtgactttctgggccgacccgaagatcttcgagaccaccatctacgacttcgagacgctgcgttcccgtttccagcagatggccttcctgaacaagggcctcaagatcagcctgactgacgagcgtgagaacgaccaggccggcgacgaggtggccggcgacgccgcggacgagcccggcgcaaagcaccagaccgtcacctaccagtacctcaacggcatcaaggactatgtcgactacctggtcaaggtgcgcaaggccacgccggtggaagaggacgtcatcagcttcgaggccgaagacctgaagctcggcatctccgccgaactcgccatgcagtggaccaccgcctactccgaggccgtgcacaccttcgcgaacacgatttccaccaccgagggcggcacccacgaggagggcttccgcgccgcgctgacctcgctggtcaaccgttacgcgcgtgacaagggcatcctcaaggacaaggacgagaacctctccggcgacgacgtgcgtgaaggcctgaccgccgtgatctccgtcaagctcaccaacccgcagttcgaaggccagaccaagaccaagctcggcaactccgaggccaagaccttcgtgcagcgcgtgatgaccgacaagctcggcgactggttcgacgcccacccgaacgaggccaagaacatcatccagaaggccatcgaggcctcccgcgcccgtctggccgccaagaaagcccgcgagaacacccgccgcaagtccatcttcgagtccgccggcatgcccgacaagctcaaggactgccagtcctccaacccggaagagtgcgagctgttcatcgtggagggcgattccgcaggcggttccgccatccagggccgcaacccgatcacgcaggccatcctgccgctgcgaggcaagatcctcaacaccgaacgtgccagcttggaccgcatgatgaagtccgacaccatcgaatcgctgatcaccgcggtcggcggcggctatggcgaggacttcgacatctccaaggtccgctaccacaaggtcatcatcatggccgatgccgatgtggacggtgcgcatatcgccaccctgaacctgacgctgttcttccgctacatgcgcccgatgatcaccgccggctacgtgtacgtggccatgccgccgctgtaccgcctgaagtggaccaagggcccgcacgacttcgtgtacaccgacgccgagcgcgaccgcgtgctcgccgaaggcaaggccaacggacgccagctgcccaagggcgaaggcatccagcgctacaagggtttgggcgagatgagctaccaggagctgtgggagaccaccatggaccccgagcaccgcattctgaagcaggtgcacatcgaggacgccgccgcggccgacgagaccttctcgatgctgatgggcgatgaggtcgaaccccgccgcctcttcatccagcgcaacgccaagaacgtgcgttggatcgatgcgtaacggaatcctccaacctccctcgtcagagggaggtacacaacggacttagacaactaaaggaacaacagtggcagatgaaaacaacaccggcgacgagcagttcacgccggacggctcgatggagccgttgagcccgcaggaggcggacaccaccgactacggcctgatggataccggcgaacgcatccagcgcaaggacctgcagcaggagatgcgcgagtcctatctggcgtatgccctctccgtgatcgtcgagcgtgccctgccggacgtgcgcgacggcatgaagcccgtgcatcgccgtgtgatctacgcgatgtacgacggcggctaccgccccgatcgcggctacaacaagtgctcccgcgtggtcggcgacgtgatgggtaagtaccacccgcacggcgatttcgccatctacgacaccttggtgcgtatggcccagtcctggtcgatgcgcaacatgctcgtcgacggccagggcaacttcggctcccccggcgatgacccggccgccgccatgcgttacaccgaatgccgcatggccccgctggccatggaaatggtgcgcgacatcgacaaggacaccgtcgacttcgtgcccaactacgacggcaagacccaggagccgaccgtgctgccggcccgcttcccgaacctgctcgtcaacggttccgccggcatcgccgtcggcatggccaccaacatcccaccgcataacatgcgcgaggtggcggacggcgtccactgggcgctcgaccacccggacgccagccgcgaggaactgctggaaaacctgatccgcatcatcaagggaccggacttccccaccggcgccaccatcctcggccacaagggcatcgaacaggcctaccgcaccggccgtggcctgatcaccatgcgtgccgtggtcaacactgaggagatcaacggccgtatgtgcctggtggtcaccgaactgccctaccaggtcaacccggaccgcctcgtcgtctccattcgtgaggccgtgcgcgacggcaagatccagggcattgccgacatgcgcgacgagacctccggccgcaccggccagcgcctcgtgctggtcttgaagcgcgacgccgtgccgaaggtggtcctgaacaacctgtacaagcactcccagctgcagcagaccttcggcgccaacatgctggcgctggtcgacggcgtgccgcgcacgctgagcctggacgccttcatccgccactgggtgaaccaccagctcgacgtaatcgcccgccgcaccgcgtacctgaagcgcgaggccgaagagcgcgaccacatcctgcagggctatctcaaggccctcgacatgctggacgaggtcatcgccctcatccgcgcctccgaagacaccgacaccgcccgtacgggccttatggggctgctggacatcgaccaggtgcaggcggacgccattctggccatgcagctgcgcacgctgacccgcatgaaccgcgacaagatcgtggccgagcatgaggaattgcagcgcaagatcgccgactacatcgacatcctcgccaagccggaacgccagcgcaagatcatcggcgatgagctcgacgagatcgtggccaagtacggcgacgaccgccgcaccaagatcctgccgttctccggcgagatgaacgtcgaggacctgatcgccgaagagaacgtggtggtcaccgtgacccactccggcttcatcaagcgcaccaaggccgacgaataccgcgcccagcaccgcggcggcaagggtatcaagggcaccaagctgcgcgaggacgacgtggtggatcacttcttcctgacctccacgcacaattggctgctgttcttcacgaacaagggccgcgtctaccgcatcaaggcctacgagctgcccgagggttcgcgcgactccaagggccagcacgtggccaacctgctgcagttcgcgcccgacgagaccatccagaccgtgctgtccatcccgaactacgaggtggccaagtacctggtgctcgccacccgttccggcaaggtcaagaagaccccgctggccgagtacgattccccgcgtcagggcggcctgatcgccgtgcgcctcatggccgacgagaatggcgagaacgccgacgagctcatcggtgccgcgctgtgcaacgccgaggatgacatcatcctggtctccaagctcggcatgagcctcaagttccaggccgacgacgagcagctgcgtccgatgggccgccagaccgccggcgtgcagggcatgaagttccgtaacgacgacagcctgctggccatggatgtggtccctggcgactccgacaaggacctgttcgtggtgaccaacgagggcttcgccaagcgcaccgccatcagcgaataccgtctgcagggccgtaacggcttgggcatcaaggccgtgcaactggtcgagggccgtggtgccctggtcggcgcgctcgtggtgtccgaagacgatcaggtcatggccatcatgaagtccggcaaggtgattcgttccaacgtggacgaggtcaagcgcaccgggcgcaacacccagggtgttaccttcgccaagcctgacaagggcgacacgattctctccatcgcccgtaacgaggagaaggacgagcccgaggacagtggcgatgccgcggcgaacggcaccgccgagaccgcacaatccggcgagaatgtgaacaacgcggacgaggcgtgagcagcgtcctgaaaagctggtagcctcgcatacagcagaggctaccgccaagcctgttaaggagaaacgatgagcgagaatctcgaagacaacgagccccggatcataccgccggcagtcggcaatacgcagaacgatcatgtcgagccgctgatcggtactgagcacgctccccgcgtggcacgctccgtgtccagcgatccggaagaatccacgttgccttcttcaggtgccgccactcccgtgcgtccggcacctcgccgtagcgcccccagggctcgccgcatgagcttgtcgctgacccgcgtggatgcttggtccgtggccaaggtgacgttcatgctgtccatcgccgtggcgattattcaggtcgttgcctccgcgatcgtatgggtgctgcttgatgtggtcggtgtattcagccagattacgcagattgtgtcttccaccggtcttgatgcaggcggtttcgatctcaagaacgtgttgtcccttaccaccgtggtctccggcgtcaccatcttctcgattgttgaagtggtgatcttcaccctgctggccaccattgcggcactgatctacaacgtggtcagctcgctggtcggcggcgtgcacgtcacgctcggcgacgactgatatagctatactggcagaactcccctcagtgaaccgcaccccggttgttggactgaagtaattcagattcgatgatcggaggtgcggtttcttatgtgtggggttcgtaggcgtcgttgctgggccgagacttgggactccggcgacgctgggggtggcaggcgtcggtgttgggacaggttttgtatctctgacgacgctgtggagggcttaccgtcgtcagcggtacagatcttggagttctgccgacgctgagggtgtgttctgtgtcgtttgcgtccaattcttggccctctgccgacgctgggcacagcaagcgtcgttgctgggccaagttttggactgccgccgacgcagagaatgcacacagcggtgttggtctgccagcgtgtggcagcttggcgccgttgaggaaggtctatgtggtgtggttccgccaaaggactggcaggttggcgctactgaggggactttatgggctcttccggttttggcgtgtaggggccgtgcggtttcattcactttttcaatcacacaccgaatcaaaccgcacggcccctacgcaccaaaatgcgaagagccggtttcgctaactagtgcctatatgcctgcaatcaggctgatttgtgctgtcaggctggctggcgtcagcggttgatctgccgatgttgctgctcgtcagtctggactgttgggctttcgttttgacagcggaaggaagatcctcctcgcggtagggcaacaattatcagtatcataattaaggtaatcgtgattacattaaccatgatactcttattattgggcggtaggcggatcggagggctgcaatgtttgtcgcacgagagcacgagttacaagtgctggaaaagctgtttaccagtgattcattcgaaatggtggtgctgtacggtaggcggcgtgtagggaaaacggcgttgatcgacgaatttgtcaaagataaacgcgtgctgtacttcacggccatacagcaaagcgccaagatgaatcttgaagatttctcaagagcggcattgtcgttctttggtatgccggattccaccccgtcgtttggcgggtggtctgatgcgttatcgtttgttgctgaacgtgctgcacagactgacgaacgtatggtgttcgtattcgatgagttcccttatgcggctgccgccgagccagcattaccctccatgttgcagatagcaattgaccatggattcctcgccacaaaagtgacgatgattctatccggtagtaacgagggattcatggaaaacgacgtattggggcgtaaaagcccgctatacgggcgtcgtacagcacagattcgactcctgccattcgactatgcggatgcggcaaaatttctaacgaacacatctccgcaagaactggtccaatactatgcgactttcggcggtacgccatattatctggcccgtatacaggaagccgatggctttgaatccaatgtgctgcgcttgatgttcgacaacttgggcgtactgcgtgaggaacctatgatgctgttgcgtcaggagcttcgtgaaccggcatcgtattattcgatattgcaatctattgcgggtggtaattcctcgccaaagcttatcgctgaacatgcgggtgtcggatctgattcgattggagcatatctgaaaacgctggtcgatttgcgcttaattgagcgaaaagtgccgtttggtgaagatccgagtaaatcgcgcaagggaatgtatgtggtgagcgatcccttctttgcatattggttccgctttgtggggcgcaacatgagcattttggatggtaatatcagcgaggaggttacgagcagactcgcttttggaccagcgtttgatacctatgttggtcaacaatttgagacgatttgcctgcaatggcttattcgaaacaacgctatgggcaacctcccctttgttgccactcagttcggcaaatggtggggcaatgatccgattgctcacgagcaaaccgatatcgatgtgattgctgcggattcgctcgataaaacgattctgttcggtgaatgcaaatggcgtaattcattcaacgaaacggaggctattgaaaagctccatcagcgtgctggcttagtccgcggctatcaggcaggtaatgcgtggcttatgctgttcaccaagaatccggtgagtgagtccacgcgaacccgctacatggatgatgaacgaatggtgttcgtttccgcggaagagttatacactgcgtgatgcattactgggtgattgtgacgcggtatctagagtcctgccgacagccacgtggcaattacgccgactcacgcaccaccaaatcggtgttcaggtgcatcacgcgcggtgaagagactccgttgatggctttgatgaccacgtcggccatggtccagccgcactgatccatgtgctgatcgacggtggtgagttccggggttatggaggtggaagctgagttgttatcgggcttacgtatttggggatagcacttgttgctcgttgtacatatagcaatgcccttgcctcctcacgggaagcaagggcattacgctactgcttagtactgctcagaggcaagcgtcacagcacgccctgggcaaccatggcgttggcgaccttgacgaagccggcggcgttggcgccgagcatcaggtcaccctcgtgaccgtattccttggcggcggccagggagttggcgacgatctcttccatgatggacttgagcttggcgtcgacctcttcgaaggtccaagacagacggtagctgttctggctcatctccaggccggagacggccacgccaccggcgttggcagccttggccgggccgtacagcacgccgttcttctggtagacctcgatggcctccggggtggacggcatgttcgcaccctcgacgaccacggtcacgccgttgtccacgagcttctgtgcggattcgccatcaacctcgttctgggtggcgcacggcagagcgatgtcgcccttgacggtccacacgcccttgctgccctcgtggtactcggagcccggaacgcgctcggcatattccttgatgcggccgcgctcgacttccttgatctgcttgacgacctcgacgttgatgccgttcgggtcgtagatgtagccgttggagtcggagacggtgacgaccttggcgcccagctgctcagccttctgagcggcgtaggtggccacgttgccggagccggagatcacgacggtcttgccctcgaaggagtcgttgcgcagcacgcgcagggcttcctgggtgtagtagcacacgccgtaaccggtggcctcggtgcgggccagggagccgccgaattccagacccttaccggtcaggacgccggagtactcgtcgcggatgcgcttgtactgaccgaacaggtagccgatctcacggccaccgacgttgatgtcgccggcgggaacgtcggtgaactggccgatgtggcggctcagctcggtcataaaggcctggcagaagcgcatgacctcggcgtcggacttgcccttcgggttgaagtcggagccacccttgccgccgcccatcggcagcgtggtcagggagttcttgagaatctgctcgaagccaaggaacttgacgacggactcggtcacggtcgggtggaagcgcaggccgcccttgtacgggccaatggcggagttgaattggatgcggtagccgcggttcacctgaaccttgccctcgtcgtcaacccaggccacgcggaacttgatggcgcgctccggctcgacgatgcgctccagcacaccggccttctcgtactccgggtgcttctcgacaaccggctgcagggtctcgaagacctcgcgaacggcctgcaggaactccggctgatcgccgtcacgggcaacgacctggtcgtagacacgcttgatgtactcgtcagtgagcatgattctcctcgatttggtagggaattaagacggttttattctatgcgcgcaggcccttgctgcatagagtctcgctcggataacgggaaagctttcggcgtggttatggagtggctcaagtttccgtttgttagatttttcgggcgattgttggatgtctgtctatgcgtgaatcgggtcgaaatggaagccgcatcacaccggaggcacgttcatatagtggacataaaggcggacttgggtgatgtcagatgtgtctgttggggatcgtgcggtctgtggggtttgtggggtgtggctggaccgtggggtcgtatggtttttgtgacctgtggggtttgtggggtgtgtggccgcaggtcttcggcgcgcaggttaccgggttcgcggtcagtgtgcgaagtaggtctgcagaatcatcgtggtctcggtgcttaccggcaccgtgcggtggatgagattgagcagttcttcaagtgcggtaggggaagccacgcgcaccaccagcacgaaactgggggcgccggccaccgaatagcaggagacgatgccgtcgatattgttcagcttgtccggaatcgaggattcggctgagtagtcgagcggggtcacgttgacgaacgcgctgatgggcaagccgcgctgctcttggtcgatgatggccttgtatcccttgatgatgccgcgcttctccagcttctgcacgcgcgactgggcggcggagactgacagtccggtcgcctgggccagttgcgcgagcgtggcgcggccgtcggcctccagcatggtgaggatgcgctggtcggtctcgtcaatcgcggtcatgatgtcttctccgttcgttgtgctctgtgttcactgtacctgttgccggaatgcgatggctttccgattttgcctggtaatttcagtagttcttcctgtgttttctgttgtgtggtggaatgtttacgtttaaagtcctaattggatgtaataattccttttgaaataagagaacgacgaaataattccattgaggagggatgatatgcagaagttttccaacatgtctctgtccgaagttgcatctgctgctgcgcctgctactatgcctgctgccggtcgggttgctgtgccgaccgccgagcccgcgagcctgtccgccgaagccctgaatatcccgcgctccggcatccgagatgtattcgaccgtgtagagcgcgtgcctgacgcgatttcactgaccgtgggggagcccagcgccacggccgcgccgcatatcgtggcagccgcttgcgaggccgcacaggctggccgcactcggtacaccaacgtgcttggcatccccgaataccgcaaggccgtggccgattactccgcctgtgtgaagggacttacttatgatcccgaaaccgagattcaagccgttgacggtgccacgattggcctgtttctggcgctgaaagccgtggtgggcaccggcgatgaagtgattattccctcgccgttcttcacttcctatgacgccgaagtgatgctgtgcggcggccgcccggtcaccgtggcgctgcgtccggagcacggcatgcgcgtgaacgcggcggacatcgaagcggcgatcaccccgcgcacccgcgccgtaatcatcaactcaccgggcaatccgaccggcgcggtaacctctgccgccgaactggcgcgtattgccgaagtatgcaagcagcacaatatttgggccatctccgacgaggtttaccatccgttcgtgtttggggaaacgttcggggaaacgcttgggggagaggcagccgtggcaccatcgatcgccgcggtgccgggcatgaaagagcgcaccattgtggtggaaagcctgtcgaaaacctatgcgatgaccggctggcgcatcggctacctgctggcacccgaagcggtcatcgaacagaccggcaaaatcgccgaactcatgcactcctcggtgaactccttggcgcaatacgcaggcgtggcagcactggctggtccgcaagataacgtggccgccatgcgcgaggaataccgcgccaagcgccagatcgtgctggacggtctggccggatgcccggtattgcgtctgatcgaaccgcaaggcgcgttctacgcctttgtggacgtacgcctgactggccttgactccggtgaattcgcagaccgtctgctggacgaagagcgcgtggctgtggtccccggcgaggccttcggcgaggaggggcgcggcttcgtgcgcctctcctacgccggagatgccgacgagctgtgcgagggcgtcgcccgtctgcgcgcattcgccgaacgggtatggaaccccatcaccggccaccacaccgccacctatcaccccatggaggtgctggcctgaggcttaaagcgaggctaggccgccattcggcctcgtcggcgcgagcgatggcctgcttcttggctcgcagcaagatgtagccgagtaccagaacgttggccagagctcgatgttggcatcgcgtcaaaacaaccgcattaaggctgccgcgtctcgtatcgttacgcgtaggggctggctgaggcgtaatgctgaagagtaacattgaagcgatggcaatcaaaccgatttgagggagagaggcacacgatggcgtactgcggccactgcggaaatagagttgatgggccggcacgattttgcccggcatgtggagcgtctgtagacagcgcaccagttgcgacggcaccagtaccggccgcatcgccagccgtaccgcctgcgtcgataccggcacctgctgtgccggcgtctgcggtaccaccatcgataccagccgcgccggttgccccatcggtttacgccgcgtccgctgccccacagccggcaccaaccgttcccctgccggctttgccgattcccgctcctgccgcatatcaggcgactgatgcaaccgccgtcctggcaccgcagcgcaaatccagcaagaagctgatcgccgctttctgcgcattgcttgcgacgattctggtggcggccttggcgttcatcatccccaacttcaccgccgtcaaagcgatgctgggcttccggcccaccaatccgctggtcgtcaccttcgacgcgatcaactcgctgtccactctgcgcagcaccaaatacgaactcagaacccacagcatcactgacgattctcttgacgtgcggatgtctggcatgtattcgctgggcaaaaccaccaacgaatcctccgcgtccttcactagcaaaacagacgaatatgcaacgaccttcgcttggtacaaaggcgcattcgccgagaaattcgtttggcatgacgacgacccctactacatctactgcccggccgaccaatatgaagatgacttaaggaacggcgttggtagtgatgtggcggacttgatattgaacgtcaaggatgcgttggtcaagaacggtgcttgggacatcaccggcgcggagcaaacgttctacgatcagctggacaagatgaacgacgatgggtactcgaacgacatcgaccgggccaagggcacgaaaaggtctgccgaggtgaaggccgaggccagcaaattcatccaacaatatttcggcgtggagctggaagataagaatgtgcgcagccagctgttcccgaatacatcgtctgccaagtctgccggcaatacgcagctgtcgtaccaaatcgatatcaaagcgttgtctcagcatttcgtgaattactggatcagtcatgaagcgcagtatccgcatctgaaatcctgggtgattcagcaaatcgaggatgccggcgtggacgatgctgaagatgagtaccgtcaggcgctcgataatgtgcgcaactgggatttcggcacggatgaagagccggagatgccgactatcaccgtggatctgaactacggcagaaagcgtctgatgaattcgattgccataagcgtgtccggcaaggacgaagacggcgactcctataatggctcgctatcgttgacgctcagtcagcagaacgcggtgtctgtgaacgaccccgatttgactgatatggtgagcaaagccaaggacaacaacggactggatttgtcctgaatatggtgcgtgggatgttgcggcggcgctaatttcctcggtgggctatcacgcactcttcccgcttgcagcggtctgctcgctgattggcgcggtgctgatcgtcttcatcaagtcagtgaagtaaacatacttattcatccctcttccttccataacaaacgagcggaggggttgggccattgttttgcggtgtgtccagtctctccgctcgtttatttgcttgattctgtggaatggaaggggcatgctctatgtcaaataagataatgcggaagggctgttctgcgtgcatatatcttgctgaacgtatttgagggtactttctggttaaagacacgccctatggtgggcagaatgctgccgttgtgtctggcgtcggtcgcaggacatgtcgtatcatgagggcacaagcttaattcagccgtcctcaatctgattagtcgtcgggtcggattggcgtgatcggcttgcagggaatcatccggctcttccggttttggtgtgtagaggggatgcttataggtgggcttgtatggtgtgtctgaagccgccggtgtggaggaggctgcgggtgacgtagttgtcgaggttgcggaagccgagggcgatgccgcgtagggtctcgggcctgccgttgatggcctcggtgggaccgttggcggtgccgtgggcgcggtcgtcggatcgatcgtccccggtgccggcaccgtggtcggcgcatttgtcggaacggcgattggcactggagccggatggctgataagtagcggcttagacgcactttacgacaatcaggtgcacagaggcggtggagatgacccgggcagtcatttcaaggataatctcgggttttggaagtgggggtatctgttggcgttgttcactcggtatgtgttggtggggcgtcttgaggacggggcgcaggtgttctgggacacgctggagaagacgccggtcaagcgcaagctggatttcggcggcgattccggctgggcgcgggctggcgcggcggccggcggcgctgccgccgcggctgcgcccggcctgatggtcatgatccacggcatcgcccggctgctcaccccggacacgaagacgcaccacacgcataccgatgacgtgacgctgctggcttttctcagaccggtcactatatcccgcgacgcatggaacacgtacgtggcggtcgccgtgatgtggctggccggactcctcctgtactggggtttctgccggctcgtgttcggccggccgaacacctacgtccccgcctcgctggaggacttggcattcgcctcctccgtgcccgccacgaagctgcgctacatgttcggcggccccatcgtcggcacgctgttcctcatcgcgatatcgggcttccccatagcgatgacatggatgttctggtcgagcgcgcaatgggtcgacaccggcagatccacacctgactggattggatggttggctttcttctgggcgttcctcgccacatgctccccgattctgttggccttgcgtttcgtcggaccgtgggactggcggggacgtttcagcccgcgcgcgggcgccgaacgctggagccggctgaaatgagcacactgctgatgggggccgggatgggcctcatggtcgcaatctcgctcgcattcatcctcgcgttcaacatgtcccggctccgctggctcatggaccacgacatccacccgctgctcgaggagcacggactgcgcgaacccgacgacgggttcacgtcctccggcgccaaggagcgcatggccgcgttccactcggacgtcgcggaggcgctggcagcgccggaacgggaacgcgaagcgagggaacggcgacgattcactgtgttcgacccgacggtcgacaagttgccgctgccggcgggcccctacccgttcgaccgtccgacggcgtcctgggcacgcgacatctacgaggaaggcgattgggcgtacgccgacgcatgggtcagggggcggaggaagccacgcgtggtgcgcgagcaacgctacgactcgtggcgcaacgaagtcctcgcccgccacggcctgaccgacgcgccatccgccacgctcgaacacatcgaacacgccgctgcacgcatccgcgccctccaccacaccagcccagccgaagcctacaaacaagcctgcaaggaagccaccggcaacacggtcaacgacgaaaccaccggagaaggaaaagaaaacggctcttccggttttggcgtgacccgcagcctcctccacaccggcggcttcagacacaccatacaagcccacctataagcatcccccctacacaccaaaaccggaagagccaattatctgccggtaccttccacccgagaggaaggtgtagtcctccgggtccgggcgatatcgccgcaaggcgaaggattttcgtgtaccgttccgtgaagacggagcgacaatgaccacgcggttggtctgaatcctcgaggggtggtccttaacaggaccacccctttttcgatggagagggccatggcgcactgggagaatccctcgaacaagaacgcaaaaaccctcagaatcggtattattccaagggttgtctgtggagctagccgggttcgaaccggcgaccctctgcttgcaaagcagatgcgctaccagctgcgctatagccccgtgagaaaaaaagagcggctcgcagccgcttcattttttctgtgggcccgggaggacttgaacctccgacctcatccttatcagggatgcgctctaaccagctgagctacgggcccgatccatacgcttcaaaagcgcacaagtaattacaataccattgaacggcggtatgtcaataacggcgtgtcgtgattgtcgcttgcgccatgattgccggctcgacggtcaatgtccagcaacgccacagccaatgcccagctatgtaaccttgcgttctcacaccgtaatgctgcggttacacctccctctctgcgcagaaatgtccaatacatatgaggcttctgctgttttcgtgggttgggttcttggttgtggtgggcgtatgtcgagtccgccgcggcggagcatgacgagggcgatgggattgttcgcgtggtggaagccgtaggccatgcggatggtgaccttgatcctg

SEQ ID NO: 2324 - DNA, 26416 bp, Unknown
  R119_18m  MAG No. k141_40290
caggagctcacctgaacgggtaactccggacgggatgaaaattgaatattcctgcgtagctcagttggcagagcatccgactgttaatcggacggtcactggttcaagcccagtcgcaggagctcacctgaacgggtaactccggacgggatgaaaattgaatattcctgcgtagctcagttggcagagcatccgactgttaatcggacggtcactggttcaagcccagtcgcaggagccatcgaaagcctcggttctccgaggcttttttattttcatcgcattggtgaccagacacgacaccccatcatcaaccgggaaatccatggcgaagacctcaccactactcacatcaggcagacaggtcactgtcaattcaccgatgagaggcacggtattcccagtatcagtctgggaataccgtgcaaatcttacatcgagaccttggtcaggggcatggcggagtcgatcgggaagtcgggggcgctgggggccacgccggcttcgaccaggttcacgccgagcatggcgaccatggcaccgttgtcggtgcagagcttgatttgcgggatacggacgtcgacgccgtagttctcgccgaattcgagcagtttggcgcgcagctgcgagttggcggagaagccgccgcccacgatcagcgtgttggaatcgtactgccggcagccgcgcatggacttacgggctagcacggtggccacggagtcggccagggatgcgcacacgtcgtccaccggaatctcatggccggcggcctgctcgctttccacccaacgggccacggcggtcttgacaccggagaaactgaaatcatacgggtgcgcggcaccggccttgccttgggtcagacccatcggcaccttgatggcgtgcgggtcgccgttttgtccgtggcggtcgatgtgcgggccgcccggatacgggaagccgagcagacgggcgactttgtcgaagcactcccccgccgcgtcatccagcgtggtgcccaccacatcgatcttgcgcggcatgtcctccacatgcagcagcgaggtgtggccgccggagacaatcagagccaacgtgtccttggggaacgggccgaactgcagctgagtgacggcgatgtgcccgatcacatggttgatgccgtaaatcggcttgttcgcagcccaggccagcgccttggcgccggacacgcccacggccaggcaaccggccagtccaggaccggcggacacggcgatggcgtccacgtccgccaacgtcatgttcgcgtcggcgagcgccttggacacgcatggcacgaaggcctcagcgtgcgcacgggaggcgatttcggggatcacgccgccgtatcgcgcgtgttcctccatggatgaggccacgacgttggagagcagttcgcggccgcgtacgatggcagccgcggtttcgtcgcaggtggattcaatgcccagtacaaccggttcgctcatcgtgcttctccgttcttctccgtttgcttgccagtgatgtcttcagtgtccgccgatgccgtctgcggggcggcaaagcccacgaccctaggtttcaggtccaagctcatggtgtatgcgtcgatgccttcaggctggtagtagcgtttgcgcaatcccatgcgttcgaatccgaaccggtgatacagggccagcgcagggtcgttatccacacgcacttcgagcagcatgcgcgaggcgccctgacgcttcgcctcgtcgaccagtgcctgaagcaacgcagcggcgatgccttgccgctggtatgccttgcccacgccgatggtcatgagctcggcgtcctcgccgtcataccagaagccggcgtagccgcggacaaccgcctgttccacctctcccagcacatccagcagatacgtgcgggccggtgcgtccagttcctctcgcaccatgttcgcattccatgcgccgaggccgaacagttcgccttccaactgtgcgatggagcaaaccgcaagatcacgacttacggcagtgatgtcaacaatcatcgaatcaacccgtctcacgccttatcggcgccggcatggccgagcacgtgcttcagcggattcggcacttcggcgtccggacggcgcaggtacaacggttcgaccggcgtatcgggattacggttggcaaccagttccgcatcagtggcaaagatagcgagaccttgctccccttggtccaatacggattcatcggtgatgtcgccaagctgctcgattgcacccagcgtatccgcatatttgcgggccccatgacccacaacatccacgaccacatccacattgctgtcttctggcataagtccgtcgcggtacgtatgaacggcatcattcacgcgctgcgcgatggatgcagggtaatcgatatccatgtcaatcagagccgtcgccacggtttcgccatcgggatcgccaacgagcgggtccgagtacaacgcaaaatagagttgcttgcggcgtgcgtcgtttacggcaagagtgagcacatggcatttatgagtatcgccgagagtgccggctttgccacggcgaatgagattccattgcacctgaggctcaagaacattatggccgataagcgtcgctcccgttgcgaaagccagtgccttggccgtaacgataccggcacgcagaccagtaaagggggctggaccggtacccacaatgactgttgcaatgtcagatgctgggaacccggcttcttcgaccgcacgcgcgatattgacctgcagtttctccacatgggtgcgcgaatcggtctctacaatgggctcgcgccccacaatgccgaccgtcgagccgaatgaggtgtcaatcaccaacgtgcaacccatgaatcctcctagtcgtaaagcctctagagagtgtacatcgaggagtctataggcgcatggcttactgcagatcgaacgcggcccatcgcttgccgactgggacgaatgcgacggtacgagtgccgttgctggtgagttcgccgtctgatccagcggatgcggcatcggaggaatcgagaggtcgatcgatatggatttcaagtcgttctggcgccaaggcggtggccatttgttcgccccactccataagcaccaccgtgttctcgccggggtcttcaagttcttcgtccaatcccagcgattccagctcgtccaacaaacgcccgatggcgtcctgccccggcgcataggctgagccgcccagacggtaggcatccacatgcaccagatgagacggagtgccgtcggcgaaatgcccgtcgagttcgcgggcaatggtgaatgtaggagacacgatgggttcggtaatgcccagccccgccccgaagccctgggcgaatgtggttttaccggcaccaagagggcctgagagcagcaatacatcgccgccgtgtaccattccggccacacgacggccgagctcctgcatggcctcgctggtgggagccgcaatagtgtgttcgctcataaatacccctttatcgacttttaccgacctttatgactgatgtcttcaatgcagcgttccagcgcatataccgggtcgccaccgtttgttttgctttgctcatccgcccaggcgagcatacggatgcaatgcgcgagtcctgccgaagtccagccgccaagttggcgcatcgcattcttcagcacccaaggattggttttcgcttcggcctgggaaatcgtgccggcccgtaccgccgaggctttggcaatggtacggagcttcatggccaacgcgccgatcagcgcgatgggatcggtcccttgttccacagctgcacgcatcatgacgatggcttctgcggttttgccttccacggccttgtctgccacggcaaaaccggtgacctgcggattggcggtcaaatactggttgacacggtcgaggcccatcggattatcgtcaaagtcgaaacacagttgctcgcacatggcggcgagttcgccggttttgccgccgagtacggataccagctgctgtgcggccatcggttcgactctacgaccacgtttctcgaattctccgagcacgaaattgagctgtgcatccggtttcttcaaatccggcacgtcctctttgcgagcgccggctttcaccagttggtcgatgattttgcgccctttgacgccgccctcgtgctggcagatcaccacgctggagccgttcggatccttggcggcctgcttggtgtacgccaccagagcttcggcgagcttgtcgtcggcattctgcaggttgacgagtttgaccacggcaacgtcggaaagcaacgatgggctgacggcttcatcgaaggcatactggtcggccgatgcggcgtcgagttcgatgaggtcggcgtcgggccgcgccttcaacgcctgcgcgcacagtgccttggtgcgtgcgtcgttcaaatacgagtcgcctccgggcaccacggttaccggtgcattcgctgctgttttcgtcatgcccccatctcgccacacaggttggacaatgacctgccggcatcacgattttgccgctgccgtcaagatagtggtattcggctgggattgcgatggttgctgcaccgaataccgcattggctattcggcttgccgccgcgtaaagaggcgtctcgtctcctcacaccagagactgaggcggacgcgccaagcggaaccgaagcgcacgccagacattccggcctcataacgacggacatgctggaggcaacggctgacgaacaccagtagcatgccgataccgatttccgccgccacaatcagcacggcgcccgtaacgccgtctttccatgggatgacggccatcgtgctgccgcccagccacaacgccacccgttccatcaccagcgtgccccatgacgatatccacgcgaatacgccggccagccatggcgtgcaccatgcgcacgtcagtgccatcaatcccgccatcgtggccaatcccacgaacggtgacaccagcaggttcgccggcacggacagcaacggcaattccggttccatcaacacctgaatcggcagggtgaacaattgcgcggccacggtcatcgccatcatctcggcgatgctgtgcggcatcgctcgctcaaagacaccggccagccgccccgcaaacagcacgatacccagtacggcggccgaagacaaggcgaatccgtagctggccgacatatccgggttcaccgccaatacaccgattatcgtccagcacagggcgctcaacgcttgcgtacgccgtcccatcgcatacgccaacgcacctatcaatcccatgatgaacgcgcgggtgaccgaatcactggggaacatcgccaatgccagcagcgcatatactccagagaccagcaacgccgtcagccgccgatcaagcagcatccacatgcataaccgacgcaccagtcctgccaccagtacgaagtggccgccggatacggccatgaggtgcatgatgccggaccggcggaactgattttccaacgtttgcgcatacgtgctgttgaccggcatcggaccggcatcgccgccgatataatcctggccaagcacacccatcgtcaatcccggcaccaacacacgcccctgatcggacaattgtccggtcacggtgaaaaacgcctcctgcatatgtgcgatcgcggcgagatgccacggcggagcccgcacctgcgctaccggctgttttccttccaagagcagccatagcggtatgcgtccatatcgcgcttgctgcaatacgcccgtcaacagatagaccgcgcctcgacgcaactgcccacaatacgattcatcggcgtatacgcgcacggcgaccgtggaacgtacgtccgcgccatccacagtgatgccgctcagccgtatgtccgtctgacaatcgtatgtgcgttggtccgaagcgatcacgggcgtcgtcaccgtggccatgacttcgtggtatgaactggattggcgagcttgtgcggagacaggatcatgccaggcaatggtgtccgacgcgattgccgtcatactgccgatgcacgccaccgcgacgcatacggtcaatgttcccgtccacctgatccgcaggcggaaagacaccacgatcatcgccgccacagcggcacatgacgccactgttataggtaatattcgtgtgacaggccattccatgccgattatggtggcgtcaatgccagctccggcatcggcctttgcctgaccggtgccgagtccatcagacatcctccatgcgaataatgcgtgcgctcccagactcgccgcccacatcactatggcgatcggcagcatcctccaatcgcggctcccctgctcgcgcagtatccgatccctgctcatccgaccgtcacctgccctcgcatggtctccagcgtcttggagccgatgcctttgacatccagcagctgatcgactgatgcatacccgccaatcgccgtgcgatgatcgatgatccgctgagcggtaaccggcccaatacctttgatggattgcaattcctcaacggtggccgtgttgaggttgatgagaccatgcgtggaagcgccggcatcgctgccgtccgtctgcatgtgcggagattgcgtggtatccgattcggggttcgctgtggcatcggaatgctccgactgctgcggatccgtgcgtttctcgtccgtggtgttctgcgatggcatcgtctgatctccagcggagccgcccgtggtctgcatggcggtcggttgagacagcatggccatattcatcgactgctggaccagcaatgccaagctgatgccaagggcgacgatcagcagcaatatcacggccaaggcatgcccaatggtgaacgacaatcgcggctgatcccgggtgagtctggctgattctccgacggcatcggcggaacgtacgccaatcagatccgataacgcacgtttgtcacgggtcgcctgccgcaggccgctctgcgccctttggggcgggtggccggccggacgaatccgtgcatggccgggaggcggcggaggcgtcgtgggccgttccactcgcggttggggcatggcttcgctctgcctgctgaatgcgcgcaaacggttggcggcatggtctgcgcgatggttatgagaaacgcccatgcatccacgctgatggattcatgggcgtttgtccagctgaaacggggtatgtggttctagcttatgaagttatccacaattgaggtggggcggttgacgctcccctcagtctcgcgacgcgagcggctcccctcaaagaggggagcctaacccgcaacaagtcactccgcggggacgatggagacgatcttcggggccttgacgatcaccttgcgcggctccttgccgccgagacggtcggcgacggcggccagcgcctgccgttcgaggtcggccgggtcgatgtcgaccggcacttcgagcttggcgcgcaccttgcccttgatctgcaccacggcggtcacggtgtcgtggcccacgtaacgctcgtcggccaccggccacggctcggcggacagggactcggggtggcccagcttgctccacatctcctcgcagatgtgcggggcgatcggggcgagcatcaggaccaacggctccactgcggcacgcggcacggccttcagacctgtcagatggttgttgagcacgatgagcttggcaatggcggtgttcggacgcatgccttccatttccgcggtcacttcggcgatcgtgttgttgagcagtttcagtgtcttctcatcgggcgcgtcctcggtcacgtgggcctggccggtggtctcgtccaccacgttgcgccacagacgctgcaggaagcgcatgccgccgaccacgttgcgggtgttccacgggcgggattcgtccagcgggcccatgctcatctcgtacaggcggaaggtgtcggcgccatagttctcgtacatgtagtccggagtcacgatgttcttgagggacttgcccatcttgccgaattcgcggttggcgtgttcgccgttccaggtgaacgtcggctcgccggaggcgtcggccggcccttccacgacctcgtccgccggcacgtactggccgcggtcgtcggtataggcgtaggcctggatcatgccctggttgaacagcttgtggaacggctcggccgaatccacatagcccagatcgaagagcaccttgtgccagaaacgggagtagagcaggtggagcacagcgtgttcgacgccgccgatgtacaggtccacaccgccttcatcacccgagtacttgttgtggttcgggcccatccagtagtcgaactcgtccttctccaccatgtgcttggtgtcggtcgggtcgatgtaacgcatgtagtaccagcaggagccggcccagttcggcatggtgttggtgtcgcggtagtaggtcttcttgccgtcgcccaagtcgagctcgaccttgacccagtcctcgttgcggctcaacggtgcctcgggattggactcggcgtccatcggatcgaaggtgcgcggctcgtagtcgggcacgtcgggcaggttgattggcaatgcggaatccggcagcaggtgcggggtgccgtcttcgccgtacacgatcgggaagggctcgccccagtagcgctggcgggagaacagccagtcgcgcagacggtagcttacggtgcccttgccgacgccggcggattcgagccaggcgttgaccttggcgatggcgtcgtccacgcgcaagccgtcgagcgacagcgcgtcgcccttagcgtacgtggattcgacgtgggagttgatcacgatgccgtcatgggagacgaacggcgccttgccctcgtagttggccaagtcatcgccggattccggcagcggttcaacggtgtagatgaccggcagaccgaacttcacggcaaagtcgtaatcgcgctggtcgccaccaggcacggccatgatggcgccggtgccgtagtccatcagcacgtagtcggcggtgaacagcgggagcttcgcgccggtgatcgggttggtggcgtacaggccggtgaacagacctgtcttctcaccgccttcgtccacgcggtccttggcggtcttggcttcggcggcgagcctgtaggccttcaccgcctcgaccgggttgacatagccgcccttccagtcttcgggtacatcggccggccattcggcgggcacgttctccagcaggtgatgttccggggaaacaacggcgaacgtggtgccgaacagcgtgtcgggacgggtggtgtagatttccatgtccttgtcaccgtcggcagtggccacggtgaagtgcacggaggcaccatgggattcaccgatccagttgcgctgcatgagcttgaccttctcaggccagttgatgccgtcaaggtcggcgatgaggcggtggccgtacttggtgatgcgcatggaccactggcgtagctcacgctggaagaccgggaagttgccacgctcggacttgccttcggcggtgacctcctcgttggccagcacggtgcccagacccgggcaccagttgaccggggacttggagatgtaggccaggcggaagtcgttcaagatatcctgctgctcggcgtcagtgaggtcggaccactgcttgccatcggactcgtggcccggaatggccttttcgccggattcgaacttggccacgagctcggcgatcgggcgtgcggagcccttggagccggacgggttggtggcgtcctcgtcgtaccaggaatcgtagatgcgcgagaagatccattgggtccaacgcacgtagccggggtcgatggtggcgaacgtgcggcggttgtcgaagctcaggcccatgcggtgcagctggcggctcatgttggcgatattcgcctcggtggtcacgcgaggatgctggccggtctggactgcgtactgttcggcaggcaggccgaaggcgtcgtaacccatggcgtgcaggacgttctcgcccttcatgcggtggtagcggctcgtcacgtcggaggccaggtagcccagcgggtggcccacatgcagacccttgccggaggggtacgggaacatgtccatggcgaagtaggcggtgcgcccctcggcgttgcggcccttgccgtccttcaaatcgccgttgacgttggccgcccagaaggtgccttgctcatcccagatcttctgccacttgttttcgatgtcctgcgccagtgcggcgttgtagcggaagttgggctcttcggtttgcgtgctcttctcgttgtcactcataaatcagcaaggtagcctcgcaactggacacgtcgtcaatcgttattcagcatccgagacgatggctttggggtcaccgttcagcgaaaccgtgagctttgtttggcttgtgaacgtatccttggcggccgtccagctgccatcctcaaccatgtcttccaatgcttccgcgattttctgcgccaattggctggtgccttgactcacggcgatgccataactgacctcgcccttgtccgcaatcacgtccatatactggggcccgttggccgcttgaagaccggaaagcaccgccatatcggaggctatggcatccgccgaccctacttgcacagccgtgacgcactgcgcataactgctacgctcctgaatccgagcctgcgggtggttgccgcggaagatgccgactgtctcgtcacctttcactgcgcacaccgtgccgtcgcctacgtcgcccaccgaacctgcgtcattggtgaatcggccacgctcatccgacctgaccagcaaaccgacgctggtcgtgaggtatggtccggcaaaatcaacgatcgcgctggacccatcggtgataggccaagaggcgacgaccatgtcgacctgtccattgtccagcatggagcgccggttttcggggcgaacctgcttgaagacgatctgcttgttcgcatagccgagtttggcggccacgtatttggcgatggtgatgtcgaagccctggtatgtgccgtcatgccatgctcccaccgatggttcgtcggctgcgaccccaatggcgatggtgggcccctccggcgctccggagacggtggtgacttgaatttggccgcaaccggccagaccggacaatggcaatatcatgccaaaggccgcggcgaatcctgccatcagccgggagcgaaatccgcgccgcatcgggcggcgggcgcggagcatgctacggctgacgaacgatgaccagtggtgcataaccgtcaaacgccttacttgaacatgcgcgaacgtgtgaggaaccaggcaaccacaccggaaagcaccatggagatcacgatgatgagcaggaagccccaaggcttgtcggtgaacggcatgcccatcatgccgccgtcgaagttcatgccgtacatcgagaaaatcagcgtcgggatggacagggtgatggagatgatggtgaagatgcgcatcacgttgttcaggttgttggacacgatcgaggcgaaggcgtcggtcatgttcgcaagaacgccgctgtagatgttggccatctcgatggcctgcttgttttcggtgatgacgtcgtcgagcagatcctcatcgtccggatactgcttgatgcgctgcagggtggtgagtttctccatcacgatctcgttcgatttcagcgatgtggtgaagtacaccaaggtcttgctcagttccatgagcatcacgatctcgcggttctgcatggagtggcgcagcttcagttcaagcttgtcgctttcgcggtcgatgatgcgcaggtaacgcaggtacatcgtggcgttgcggtacaggatctgcaggatgaagcgcgaacgcatgaaggtgttgaagcctcggatcgtgccttccatgaatgggtggagcacgggcgtgtcctgcatgcagacggtgatgatgaggttttcggtgacgatgatcgacagcgggatggtctcgtaccagtcgcgtccgccacgctcctccacggtggggatgtcgacgatgatcatcgtgtaatcgtcttcgacgtccacacgtgaacgttcctcgtcatccaaaggggcgcgcaggtcggccaggtcgatgccggtctgtgatgcgacggtggcgagctccacatcagtgggttcgctcaaacataaccaggagccgttttccggtttctcgatctgctccacttggccattgattgagctgaagattctcagcatgtcgcctcacccgccttccgcgctttcttactgttctatcgctgtacggttccaaaccgagattagtctagacccaccgttcgaatttgcgagcggggtttcgcatagcgaccgtcaccagacgattggctgccaactcggcatgtgcggtcctcgcagatcggtcggcccgttctcccagtcggcgctgtcggcgatggcgggagccttgttgtattcctccaactcccacaggggctgttcggtgggggtgccgttgacgctgtggcgcactttgagccggcaccagcaggcgttgcgcatgccgccgagtgcgttcatgccgtccgggtcgagttcgagcaggttggagatggtggcggtaatccatgagccatgggtgacgagcatcagcgtggtgggcatgctgtctgaataggcggagtcggtgaccagtgcgcgcacggcatcggcacctcgctggcccacggcggcacggctttccacaccatgcttggtttcgcccccggtgtgctgtttccaagaggcgtagtcgtcggctgccacagctttgatttcggcgcgggtcatgccttcccactcgccgaagctgcgttcacgcagtcgttggtcacaggtgaccggcaatcccaaaatatcggcgaaggcgtgtgcggtctgttgggcacggaacaggtcggaggtcatcaccaccatgcgccggccggcggcgggggcctcctcgaactgtcgcgtatcagtgcgttcggcggcgtcaggaccgggctgggcgatggcttcgggatgctcggcaagccggttcaccttggcccagtagtaccgtgaagcgagcgcgaatccggtctggtcgacctgccattggcctacgatgtcgagcggcacatcgatctggccttgcaagcgatgttcgagattgtattgcgtacggccatggcgcagcatcatcacttcatcgatcatcggttttcgccacctcgttctcttgcggttttttcatactcatctcagcacaacccctagaatggcggcatggagatttctgagtcgacttgggcgttcatcgccaaacaccgccgtgaagatgtgcgtgatgtggccttgcacgccaagcatgatggcgacgtggatgtgccgttcgcgctggagcagattgccggctggcagcgcgcttcgctcaagctacctgactgggcgtcccatgatgggctgattttcccgccgcaagtcccaatggaacaatgttccagccagttcacggctcaatacaaagcccggttagcacagcgattgttggacggggaagcagtcgacgacgccgacgattccccgacatccctagtcgatctgaccggcggtttcggcgtcgacttttcttacatgtcccgagtgtttgaccatgccatatatgtggaacaacaatccattttatgtggtatcgctcgccataatttcccgatactcggccttggccacgccgaagtcatcaatgatgattcaacagcagtgcttgatacgcttggccgagtctccatgatcttcctcgatccggcccgccgtgacgatcatggctcgcgtacctacgcgattgccgattgcacgccggatgtgctgaccctgaaggatacgctgctggccaaggcaccgacggtcatggtcaagctctcccccatgctcgactggcataagaccgtcgccgatttcgccggcgcggtgcatgaggtgcatatcgtctccaccgggaatgaatgcaaggaattgttgttggtgttggggcgcggccgttgcgcctcaccgctcgtggtatgcgtcaatgacgggcaggtgctgtcgtacaaggccggcgataacagcgacaatcacacccctatcagcgattctgccttggttgcacgcaatacctgtaataccgaggatttcccggctgaggaaagcgcgaacggcttcgattcctcgcattggaagtacctttacgaacccaacgcctcaatcatgaaggccgggtgctttgatgttctcgaacagcgcttcgtcgtgcatcacatcagcccgaatagccacctgttcgtggcggccgaacctattgccgatttcccaggcagatcattcgtcatcgaatccatcgtcaccatgaacaagaaagaactgaagcagctattggccggtctcacgcacgccaacatcgccgtacgcaatttccccctatccgtggcccagctgcgcaaaaaactcaaactcaaggacggcggcaacacctacctcttcgccaccaccgacctcaaaggccatcacctagtactgcgcactgaaaagcgaaaaagtggctccctctgacgaggaagccaccaatacgtcagctaatcagtccttggcgatggtcttgccggcggtcggaccggaggcaaggttctggatctcggtgacttcgagaaccggaatcacggccggcttcttggtgcccttttcctcggcgatcttgacctgctcgttgtagatgtcgtcgtcaacgtgcagcaccacgttgccgcggaagcggtagccctgcttcttctcgaggttggcgaaggcgatgaccagcggagagccgttcttgaggttctcgtagtgctggccggcggtgcgctcgtggtaggcgatgtgcgtgtcgtccagcacgaacagggacatcttcgggccgaggtccagttcgccgtccttggagacggtggtgatccaaccgaggttgttcttgatgaattccttgatttccggagtaatgactgccatgtcgaatcctttcatgattgctatggacaacgtatttttactctttccagagtaccggtttcgagcgcgactagcccggatgttcgctgtgagtaacctcaccttcgcacagctttcatccggttcttacctgtttggcgatgccgcgccccggccgcgcaccagccacacacctgtcacacacccgacgcccatcgaccggtcgattttggccggtagttcccgtaatctgtgagccgagagagccacaagttttcctaactgtcctgaggtgcaccatgggtttggtcgaacgtttcagcaagctgcgcagccgctggtcccgcagctttcccccgaatctcgcccgactcatgttgctgggctgcgccgcattatggggtggcagttatctgctcgccaaattcgccatggaggcgattccgccccaatggctgatgggtctgcgcatgataggcgcctgcctgtgcatgctggccttgttccataagcacatcgtgccgtatctgacgccgaagatcattgtgccggcgctcgtggtgggtctgacctactggggcacgatggtcacccagaccgtcgggttgcagaccattgaaccgggccgcagcgcgttcctgacggccgcctactgcgtactcaccccgttcgccacgtggatcatttcgaaaacccgcccgaaggccatcaatctggtcgccggcgtgatctgtctgatcggcgtcggcttcgtctcgttgaagccgggcggttcgttgtcgctgggcgccggcgactggctgaccatcgcaaccgccgtcatcttctcgttcaatctgacctgccttggtgtctacaccaaacgcttcgaccctatcgccgtcacttttgtgcagttcggcgttgccggcgtattgttcatcatcggcgcgttgttcaccgaacccatgccgaacgccagctggctggcaccctcagtagtggccagcgtgctctatctgttcctcggcgccacgatgagtgcccagatcatgcagaacatcggtctggctcacgtgcctgcctcgcaggcgtcaatcatcatgtgtacggaaagtctgttcgccgtcacgttttccgctttgttctggggcgagaggatcatgtggagctcactggtgggtttcgctttgattttcgccgccgtactgatgtcggtgatcagaccgaccgggcagtcgctgcatcgtaattgacgatgtcccgcggcctgcggcgacgcgaaacgcacgtgtgtgcgctgcagggcgtgtcggacctgcacgaaggccgattttgaaggtctcgtgtaggcctcgccccgcttccatcgagtctcaggcaacctgtcagcccgacaccctacggtcgtgcattgtgaagaagttttttgaaggaatctccctctcatccatcgtggcgggcacccttgccgccgtcacctcgttcctgctcgcctcgaagatcggcatcggcggttcggtgatcggagcggcggccagttacgtcgtctccgccgtggccaccaagatctaccagaacgtgctcaccgcctccggcgaaaaactccaatcggcctcgtcctccggcaacgggatcacgaaggacgccgagaacggcgatgccgatggcggcaccccccgaacggccggcagccggaccgacgttcgggacgagcccgatacggcgacgggcgtgaccgccgatgatgcttcctccacacgcagaccgcgtgaaatcgtgttcagtcgggcgaacggcaggacgtactcggtcgatgagctgcgcaagtcccgcttccgcgcttcgaagcacaccgccatgatcgtcaccttggtgtccggcctgctcgccgtggcggtgacggccggcgtcgtgatgctggccacgcagggacgcggcacggacaatctcgtatcccccaccacgaccacgcccgcgcgcaacgacaccggcacgcgaacgggcacccccgatcagaacaacgctctgccccagacgggcaccggcgatgattcgaagggaaccggcaaggattcgaaaaccgacgccccctccaccgacctcgacgccaacggcacctcgggttcgaccggcgccggcgcctcggattcgaaaaccgacggcaccgccaacggttcgaacggcaccggcacctcaaagaatccgaccaccgaagacccgaccagccaaggcgtcggcggcagccagaccggttcgaacggcaccggcaccggctcgacgcaaaaagatccgtcggaatcgacttcaaccagcaccggcaccagcggcaccagcggatcgccggccaccggcccagacgcgggcctgtctcgttaagtgtgtaactggcgttttcattgttgtgttccctcgcttggccagcggtcggcgaaggtgatggcaaaggcgttgagcgcgggcttccggcgcgcgctccatcgtatccgtcccttgccggtggggtccagcgagcggacggtcaggtacatgcacttgagcgcggcctgctcgtcggggaagtggccgcgggcgcgaatggagcgcttgaatctcgcgttgagcgattcgatggcgttggtcgtgcagatcacgcgccggatctccacgtcatagtccaggaacggtatgaaccgttcccacgcgtccacccacagcctgcggatcgcgggatatctcgcctcccacttgtccagcatcgcgtcgcgggccgccgccgcggcggcgggcgacgtccagatgcccagcacgtcgcggtcgccctccagatccacgccaacggccacgtagaacgcgcggttggcgacctgcccgtcgcgcaccttgacgacggtcgcgtcgatgaacacggccgcgtacacacgatccaggggacgcgagcaccattcgtccttctcggccacgacccgctcggtgatgcgactgacggtctccctggacacgtccgccccgtagatctcctggaagtgggcgctgatctcgccggtggtcaggcccctggcatacagggacagcaccacctcgcccaccccgggcagccgccgctgccgtttcctgacgacgaccggctcgaacgagccatcgcggtctcgcggcacctcgatcccgaccggacctaccgaatcggtgaccacggtcttggcggtggtgccgttgcgcgtgttcgcggccctgccgtccttggatttcttgtgcttggcgcggcccaggtgctcggtcatctcctcgtccagggccgcctccagcacgcttttggtgaactgtttgagcagtccgtcgggccctgtcaggtccaatcctttttccttggccatgcgcacgaatgtgagcgccgcctcccgctcggcgttgcgtttttccgcgtccggcttcttcgtcggtgtcatgtttcccattgtcccagcacacatcgtccaccagcctttccgaccggccacacgaccggccagttaaggccagttacacacttcgagagacagtcccacgtataccggttctttgtttatgtaagggaatgattgatggttcggtttgcctgtttgtataatgcgcttatttatcttggtgccggatgtttttcggtctactatatggtggcctatcatgatgtgggcctgtcggtgctgctgatctccatcgtcaatgtggtgttcgacgtcagcgaatcggccagcgagctgcccacgtccgtgctgttcgaccggtggtcccgggaacggacgctgatcatcggcgtgttgtgccgcgtcgcgggattcatattgatgctgttctggtccgcgaacttcgccgtgctgtgcctggccaacgtgctggccggcatcggggccgcggtcgaaagcggcgcggcgtcctcgctgtacatcgaatacgcccgcaagcacgatccctcgctgggtatgaagaccttggtgtcaagactgtcggcgatgatcggtgcgtgcacgatatgcggcggtgcggtcggtgccgtgctgttcctgcttgactcccagctgatctggctgggcgcgacggtgttctacgtattggcgatcatcccgcttctcggtctgatgagggccgggtcgcgcaccaaggccgcagcgacggatgggagcgggacgacggaacggcaggccgaggcgtccgtcgaatccgatggatccgccgagccgggcgagtccgggacctcgctgacggtgttggatcatgtcaggcagaccgtggcggccgcggccgtgctgctgcggaagccggagatatggaatatggtggtgttcaatctgggtacgttgtcggtgctgacgttctggcagctgctgctgatgggccaccagaccggggtctggtggcagttcgccggcctagtgttcactaatatcgcgcagatcgtcggcagtcgtctgggtatgctgcggctgcatccacgttccggcgacattgcgatcctcgtgctcatcgtgtcggcggtggtgcttgcggccacgccgatgccggcggtgaggatcctggcgttcttcgtgttctcctgcgcgcagatgtacgtggcgaacacgatctccagcagcttgcacgagagcattgacgattcgatccgcgcgaccgcgttctccgtgggatcgctcgtattgatggccttcaccgcggtcgtcaccccgctgtgcggctacatcgccgacacgttctcgatttcctggggtacactgacgacgatccccctgctggtggccctcctcatcgccggacttgcgcgaaagcctgaatccgacaaacgggtaaaagtcgatatttcgttggattgagacgtcaagggcttgcgggcacgatgcccgcaagcccttgacgtctatatgtcattcattcatggttggaatgcgctcctcctacgcgtgcggttgaatggttagtccatcgctatcgtcggagggtgtcagggccgaagatgaaaccgtctgttccgggtgcgtgatccaggtggaatggattggcaacggtgtacgacttgtcgccgggtttcacgtcgtccgtgtcgaattcgttggaatccttgtcgagcagtgggccgtccagcgaggcgggacagtacacggtgacgtgccagttgccgtcgtccatggggatgagcacggtgcagtgccttggagaccgtctgctgcggcatcccttatggatgattccttgataaaggagtttcggggggcgggtaacaaaaacccggaaccgaagttccgggtttttgtctggctcctgcggctgggcttgaaccagcgaccgtccgattaacagtcggatgctctgccaatagacaacgggcaattcgactgccatgtcaggtatggtaatctcgaaccagccagaagatcgataagccaaattacctgcgactgaagtgaggacggaatcatgcgtagcgagttctctggtctgttgtattgcgcgggtgcattaatcgcagtgacctcttgggctcttttcatgttctcgaaagaagtccatcggaaaggccgaacagtatccatcctgagattgcccgtcatttggatactgttcctcgtgagttcggcgccggctctcgcatcatatccggtttttgaaatatactcaggatctatggatccagatgtcctcgatttctacagtcagccgttcatacggctactgccggcggcgacctgcatagtgaatctgtgcgtatcggcatgctgctccatggctcttgtcagtaagcgcagaaaaaccgaacatcgaaaaatctgaaccacagcattcgagatgagatgccatggaaaaaccgctgtttccgctggccttggtgccgctggccgtcggattggtcctgatatacgtcgtgattggatccaaaaaactgggaagagaacgcaaaaggactcttctgcgtgtcttctcggcgctcatggtcgttgccggcgcgttggccatcgcgagacaactcgtatgacgcttcacgctgcggctcggcttcccggctatcggccgcggccagtccacggctctccgcgccattcccgcaatcgcaccatcgccggtctcaagcccatgagacacttggaaccatggctaccatcatcatgcgcacctcgcatgataatcctagccaactgtttttggctttgttccaaggctttcgatttttgggaaacctaccgattaccctcgtttctccacgaggcacccacaggcacccaagaataatctcaactgattcccaccccaccggtcggccaccatcagccggaacgctcgtatctcgcggcgttggcgatctcgttcgcctgaagcgtcgggcatcgcgttgacgatccgctcgaccttctcgcgcaccatggcgtcgagcttgctctcgaacatggcctggtcgaactgtatgatttccttggacatggctccatgcctctttccaatcgcggtttttcattgtctggcgactgaaaatcgtacccggtacggcccatgtccttttccatcaaggccggaatccaaaaatgcgcaagaattcggtcgttatccccttagagactaaaggaattctattagttcagcaaattcgtatatcaatttattttttagcatgtcggacaatacagtaaatcaaccactctatggctaagataccaaggtagaaaagcgcccatacggaaaaactaattagctttactcctagtgtctgtacagttccatgcccgtccactgttcttatgaaaaggaatacactaatgcataagaacaatatgaattgaatgatttggaaaattctccaacctttgttttccacaatcaccctcctgtaaccccaatctctatatgctgattccaccattataagccgcccttggtgaaatgtcaggcgccccgttgtctaattgaaagtgcaacacccgttggattggagattgtccggataaccagtccgacgggatgttgcacctatggggggggggaaaaaaaagcaggttcgcacctgtcggaagaggaacgccaggtcatccggatcgagatcggcaacggcaccatcatccgcaggatcggtctgatgctcggccgcaacgcctcgacggtcggcagggagatcaaacgcgacacgtggttcccgtccaacgagaacgagtcctgccggccgtaccggccgaaacggctgaagacgggcccatggacgggcggatgctacatcgccggccccgccgcggcgcaaggccgaccgcaggcgcgccgaaccgcgcaagcgctaccgcctgtcatgcgaacgcctgtgggcgcgggtggccgaatggctgggtcgcggctggtcgctgctgctcatcagcggcaggctgcgcgtcctgttccccgacgactccgccatgcgcgtgtgcccggagaccgtctaccgttggatccacgccgaccgccatcgccgtgaacgctgggcgcgctgccttccacgcggccacaggaggcgtcgcaggcgtggcggcaggaggacgtcgcgtttcccgattcccggacgggttcccatctccgagcgtccgccggaggccggcgaccgcagcggtttcggccattgggaggccgacggcgtgatcggcgccggatgcaacctgcacaccgaggtcgagaggaagaccaggttcctcatggccgggatcgtgcccggcaagaccgccggggaaagcgtcggggcgcagctggcgatgttctcgccgctgccggccggcgcgcgcggcggcgtcacgcacgacaacggcaccgagttcgcccgccacacgcgcctgcgcgacgagccgggcatggacacgtgcttcgccgacccgtactccagccggcggcggggaagcaacgagaacaggaacggcatgatccgccggcatctgcccgaacgcagcgagatccggatggacatggccggggaactgcgggagattgtcgacgaggccgacaaccgtcccatgcgcgtgctggactaccggacacccgccgaggcattcgccgacgaactgctagaattgcaggaccaacaggggtgttgcacctctaaatagacatcgggcgcttactgtggcgagaactggatctacagggccaacgtgacacaaattatcgaagaacacggcatctcagtcacggtccaacggcagaatgccggaaccgctcgccgcatcgttacccaatgcattggtctcaatcttggtggtcggctaccccatgcccctaatcacaacccacattcctgcaatcaggcatcaccacccggtctcaagcccatgagacacttaagaccatgactaccatcatcatgcgcacctctgatgataatcgcatgtggtcgtttttggctttgttccaaggttttcaatttttgggaaacctgccggttacgctcgttttccacgaggcacctacaggcacccaagaataatccgggaacgttccaccaccctgccggcgctcagcgtcttcgccgaccggcacggaaaagcgcaataccccctgtggtttcatgatgttccgcatgggtggtgcccagaagcattcacccggcagcatgtctccatggcggacaatagacagaacgatacgcagcccgtgcaaccgtcccagccgccaatggcatccaaatccatcccgaatcccacaggcccattgcagacagcccagatcagctggctcatggtccaaagccgcctgcgacgccaccgtcccaatagcaggaacggtcagctgcgcagtatgatttccgccctgtcggccagttcccgttcgcgcacacccatggcagacaggatcgcttggctccgcgatggcatggtggaggtcacccgtgcgaccaatgcggagaagcgaccgaacaattccaagtaatcgtccttgtcaagcaaataaccaagatcaccgatggcctgatacacgttctcgttagcgcgcccatcgtaccgggcacaatagcagcgctcgtcatgcgcgcacaggttgcggtagaacaccagtctgttgaagatgctgtccagccgcttgatggtgatgcgccgtggcctgtcgtgcgtgtccgcatacaaaccggtgaaactttcggcgaccgccaatcggacggccggggactggacttggaagaaccataccgtctggccgaaggaaagatcgttggccagcacccacaacgggacttggccgttgtggtcttccatgcaatggcggatatacgccttgccgccatagtcgcccctgttgcgcgggttgccgtccagctcaagtatccgcttgaagaccttgtcgatcaatgccatggcgctcggacggcacctggaatcataatagtcgggattgagatacgggttgacctcgtcggggtgcagcccggtgaactcatgcgcgcacactgccttgagcgcggcctccgcccgtgtggtggaggaaaacaacagttcacgcaactcacggtcgaacaggaacagggcgtacagatcatcgaaacgcgcgcccgttccgtaccggtcatcaccagcggtcaggcatgcctttcggtcgaggaacaaatccttatagccattgacgatcggataatagccctcgcgcctgagcacatgacccgcaccggcatcgacggccatgccacgggagcgcagaatgcgcagctgttcgttcacactcctgtagggcttgcgcaacgacatggatccgacctctcccaatccagcgatgaaagcactgaggccaccccgcgtccacggaatggcctcagcgaaccgaacgaagtccagcttatttcgctgttacagaatagcgccaatcccccgcgaatgcaacccagccagacggcggacgatataatgaaacctccatatcatcattccagaggcacacgccagtccatcaagaccaccaccagaaaaacccaaacgcccacaaaggagaagacgcgcgcctccacgaggcctgtatgaccctcgctctttcaagcgtctgcacgaaccgggcgaagtcgtagatgccgtatgtcgtacatcgatgatgtcgggtccccaagcagggtgctcgtggctcttcaccaggaggctggaacactttctcgtcgattccgcaggagcgacgcaagccttccgctccttgaactgggcctggcctctccggcaagccctactacaataggactcactcctccgcagttcgagaatcgagtcaatatgtgccgaatttgccacattcttgcaggtctcctagtgtgtgccggactcctacgcacagtaagcggctttatttttgactacctgcatccagaatacgtgtctagctttccttcatatctttattttttacgagcggttcccttccttgtcgctgctggtgctatcgaaactattttattcctgacaaaaaggagaaataaataaagaaactcaaacaaattgtcactgctctagtatctgtaatattggctggaactgtgacagtaaatgcgtcggcagcagaatctatcgaaactccctataggagtcctaccctatccagctttccgtctaatgcttctctggaagatcttgagaaagcctcagataacgaagatctgagaattatctcatctccttctcggggtgctaattacaaaacgtgcgctgcagaggctgtagctttactgcggatttattctactacaggatccggctcgtcatctagtttcacgaatctcggtcattcttggcttatgatcacaaacctgtctggttctacggcagacattgctgggattaacgttgctgatggtaaatctataacagcaagcacttgggatgaatccgtagatgtcagcagagaatataagggtctgtggctcaatctttattcgaagcttaattccaatggtattaatcttcagaatgtttccattcaattacccttaaggcaaattgatttagatacagtgaattctaatattaaaaataacgatagatggggctatcttaacaactgttctactttcgcttcaaaaatttggaattcaattgctagtggcagcagtaaagttggcgaggcagaatcatacacgttgttaaagtacaatacttcttcaccgcattacggttccgtatattatggctatcctcccataaagagtaataacaataattagataaccaaatctgtccggtaaagccagactagttttatctataatgtgagccgcaagtgttggcctagcgcttgcggctcattaaagatgtctttcgccaaataaatccgcgtgtcgggactggtgacgtttcgccggactcgtcattgatctcaccgccaccaatcatgccacaaggggtaggggataaggggctgcggacattttcttggagataatcacgcggccattccttggctttgacggtattgtaccgggctcatccaaccaagcgactgtttgatgcgctcgtggtcgtgccagcgtatgtactcatcgaccaaggcgagcacctcgttgcgggtgtgttcctcccacttctcgggg

SEQ ID NO: 2325 - DNA, 18499 bp, Unknown
  R119_18m  MAG No. k141_43787
cacatgggcttcgttaatttcatcctcgaactgctgaaggatccgcgtgccgcgattgccggttggattgccatgggcgtggcgccgaccctcggcttcatcttcctcatcgtatttatcgaaacgggtgtggtgttcttcccattcctgccgggcgactccctgctgttcgccgccggtgtgttcgccgctcccgatgccgcgaccggcaaggccgcgctgccgctgttctggctgctgccggtggtctggtgcgccccgattatcggcgaccagtgcaattacttcattggtcatttcttcggccgtcgcatcatccagtccggcaaggtgaaggccttgaccccggagcgtttggccaaaaccgagcacatgattgagaagtggggcccgctggccgtgttcctgggccgtttcttcccgttcattcgtacgttcatgccgttcatctccggtatttccggtatgcgttggagccgtttcacgccgttctcagtgctcggcggcctgtgctggtccacgttgttcacgctgctgggctacttcttcggtaacattccggcagtacaggaccacttcgagctggtgatcgtgctgattctgctggtctcgctcgccccgaccatcatcggtctgctcaaggccaagttcggcaagaagaagccggccaaggtgaccgatgctcagttggatgctatggaagacggcattaagaacctcgataagtaagcaagaaatgtagattaccgcataaggaatcgtcgtgaaaatgaaggccctgactgtgcatgtgaggtcagggccttttctgcatgagatgggcgtgaaacagcagcgtggttatccacatttgtcgtggacgacatgccggggtgtggataactcagcaagctagaaccacaatggtcgattcgtgttgagcattgaactcggacacgtttcaatcggcttatgaatagcaacaccacaccccgcgtggcgcgtaggatcacctcgccagcggtagcacctccgggcattccgctgcccacggacgatgcgccaattccagcgtatcgctactacactccgccgcccaggccgttggcctcatgcgaacggcagagatcgggcgaggctccggcactcgccctaactacagacaccagcttccataacattgtaacgatgacgtcaggtcatggaggcgtggggttgagtgtcatggcttccatgcttgcatggacattggcgagacgtgaacacagctgcgttctcatagacgctgatttcgtggccggatgccttgacctgctgcttggtgtagaacgagagccgggcttgcggttcagccaagtcgacgcgcccctcggccgtatcgagggtgaggcgatgaaccatgagctgatgatgtgggagggtgtgcgagtacttccctatgacccttggagcgcgcgccagcctgactggtgggaagttcaagcggccattcgggctttggcggaaacgaacgacgttgtcatcgtagatgccggtcagggtggactcattgagaccgtacccgatctgcgcagtggcctgcaggtgattgccgcggaattgtcggtaatggggctggccagagccaagtcgcaccggtccagattggattcatggggctgtgaagcgccacatatcgtaggtgtggaaccacgtggcgctccacgtgggagaggccatgtgggtattggcgaggcgcaggactatttgactgccacggtattggggcccatcaagccaagtgtcaatctgtgcggagacgtactggaaggcctcggcatcagatcggtgaccaaaggcagtcgcaaagccatgaacttgcttgccgatctcgtagaacaggccattcgcccggtttcgggagcttctcacaaggaccagtgatgctatggctgccgtcagcacgcgagccaatgaggctggcacagcgctcagaaccatattcttcggtctgctggatgacgtggcatctgacccgcaggttaccgatttggcggtgacctgtgatggccgcgtttgggcggaccgcggcaatggcatgcgcgaaacagtattgcatgtgccgttccgctcgccgcaagtagttcgagaatacgccgtccaactgtgcgcgcagctcgggcgcagactggatgatgcctgcccgatagcggatgccgccagtccggatggcatccgcgtgcatgcggtgattgccccattggtgccacaaggtgccgcgatttccatacgattccctgaccgaaccatggcatcgctacagcacctgagcaaattaggcgtattcccggctgcttggctgccgacgttcgtgggattggtgcgcaaacatgccacagtgctgattaccggcggaacaggcgtgggcaagaccaccttgctcaaggcgctgctggcgcaatgcgacgtgaacgagcgcatcgtcaccgtagaggaagttcgtgaactgggggaactgggacgcgacgatcatgtctcgttggtaacacgcgaggcgaatgtggagggcgtcggagccataagcctggcggacttggtcaaagcgacgttgcgaatgcgccccgaccgcgtggtgctgggcgaatgccgtggcgcggaaatcgtcgacctattgcgcgcgttcaattccggtcaccacggcggcatgaccaccgtgcatgcggacggcgtgaaccgagtaccgtccaggctgatttcgcttggattactcgccggagtcagtccacaggcgttgaccatgctggcggcaggcgctttcgacgcggtggtgcatttggagcgagtgaacggacagcggcgtatcacgcagatcggcgaactgcgcgtagcacatggtgaactggcaggaacaccgctggcggtatggaatggctgccatcctcctcggtatgccgccgaatgggggcacttcattgaacgatggggcatcgttcccaggccgagtggtggtgggtgatgatgtggtgtgctgttctggtggcgctcgccgtgctgatatggccggggaacaagtccgggaggctgtaccggctggcttaccgcgggcgcgcggtcgattccgcagccataaacgaacctcgatatgccgactcacctcgcgtgggcgttgcgcaggtgattacgtccgccatcgcgcgattgcgaggtggcggcacattggttgaagcattcgaggaacaatccagcagacgcttcgccactcatcgcattactgtggaacggctcataacggtgttcgaacagcggcgtctgcccgacgaatcaccagcgcaggtacttgaagctgcacgcggggtcgccgccgcagcggttttgagcgatgagctcggttgccaagcggtgccatgtctggaagcggtattgactgcttaccggcagatgaggctgatgcagaacttgcgatcgcaagcatgtgccgttcctaaagccactgtggggctgctgagcgcgcttccggccgtcactgtggcattgggcgagcttctgggagctagaccattggcgttcttgcttggatcgccacgcggtgtggtctgcttgatattgggaggatgttgttatgctgccggcttggcatggatgcgggcattgttgaaaggcagcggattatgagtacggtgtgggtacacgccgcggcaggctgtgcggcgattgctggttggctgtataaggctctgtctcgtcatgacagccgcttgccgggcgaggagccggccgtagcgcatgattgcgggtcgtcatggaccatactcatattgcgtatgttgcaggtgtccttgcgtcagggctcctcgattccccgggcgcttgacatggtgggcaaagccgtcggcggcgactgcggcgctcacatgagcgaggtcgggaactccctgaccagaggggttccctgggctgatgcgtggcatgccgctatggctgttcagcatgagggtgcgccagctgatagtccatccaagggaaatacgaataccacgcaacgagatcttggcctgctgcaatcggctttggaatcgtcatggacgcatggcgatatgcctggtgtgcgcctcgaatccgccattgaacagctggaccgtgacgagcgtgctgctatcgaacggaatgccgcgaagctgtcggtaaagctactgatgcctacagggctatgttttctgccggcattcgtgctggtaggagtcattccggcgattgcgtccttcatgatgtgaatataggcgtgaactgagtgcgcttaggctgaatcttgttgtattgctcggtattgtacttggctgcgtttggttatccacatttgtggtggacgacacgtcgaggtgtggataactcggcaagctagaaccacataccccgtttttcctggtgcatgaagcgttgatagtccacagtggtatgcaccccgcgtcaacccggcgcgggggccaaccactcacatacgcatggggaaggtgcgaagccactgcgcagcttcccctccttaccgaaaggaacgccaatgaatacccctatccccgtcatcgtcgacgggcaggccggcatctttgcgcacagcaaggctcgtgtggccacgctgaacgccaaggcgaaagaacggctatgcctcatggacgcacgcatccgcgccctcatggctgagcccgaagaaggcgcagccactgcggaatacgcagtcgtactcgttgcggctacaggctttgcggcggtgctggtcgccatcctgaagtcggatgccatcaagacgttgctgaccaacatcatcaaacaggctctgaaagtcgggtgacagccatgaagaccatgagatgccggtggaggctcgccagactgccgccagacctatgcacgggatcggccaccgccgaattcgcgatcgtattgcccagcgttatcgccatcgccgggctgatactggcaatgggacgtgtggtcatcgtttccatggactgccaaggtgccgcgacggcggctgcacgcgagtttgtggttaccggtgacgaatcatccgcgcgcagcatagctgcggacgttgcagggggagatccccgcgtcagcattgcccacaacggccaatcgacgagcgtgatggtcgaatgttcggtactgcccggcccactggatgtcactccaacgcgggtcaccggcaacgctacggcgataagccaataactggtcggctgctggctgggcggccgcaatagaaaggaactgcggtgcagggaatgcgttatgaggagggatcgggcacgatggccggagccatgctggttatggcggtgggcattgcgctcgcggtggcggcaagtgtgggcaacctcatgatctgccagaatcgagcgcgttccctcgccgatctcatcgcctttgacgccgcgtatgcgctgtggcatgtggatatcggtgatccatgcgcgcttgctgcaaacatggctgaagcgaatggcgtcacgctgggctcctgctccgtgcgggatgaagacgtgttggtaaccatcaaggtggaaaccatggttccggtggcatcatccgtggagcggatggctcgggccggaccggtgaattgtacggaaagagacaattatcacaataatggaccgtaagcactgatgctctggcgggcttctggacctttggttaaggtgagagcatgagcgagagtgaacgcacagaacgccgtcgcgtggtggccatggtgggcaatcccacttccgataagggccgtggtgccaaggtggatgcgcgagtattgggactgctggaggacgccggccgtgcccataacttcgacgtcatcgacatcaccggcgtaagtttcgacgattccctgaaccaggcgcgtgaacgcgcgcacgagtacgactatctggtggtggtcggcggcgacggcatgatcgcactcggtgccaatgccgtgggttgcggcggtaagccgctgggcatcgtggccatgggctcgggcaacgatttcgctcggggacttaagctgccggtcaatcgcatcgaaaccgcagtggaaggtatcgtcggcgctatcgtgcgcggatcacacattgatgtggacatgggacgcgtgacctctttggatggtggctatgccgtgaacccatccaccggcggggaatacgagtaccgggagaacaagtctgccgagcacccgattgaccggtactatgcgggcatgctgtcctgtggtcttgacgcaagtatcaacgaccgtgcgaatcattcgcatctgccgaccggcaccatgcgctactttgcggcggtgctggtggagctgacgcatatgaagcgttatgggtaccacgtcaaggccacgctggcggacggtaccacggatgaacgagacatcatcacgccgttgctgacgattgcgaattcgcgtcatatcggtggcggcatcgaggtctcaccgtactcctgcttctccgacgggctgttggacctggtgtggatgaatcatgtgccgaacttcgtcgaatgtgcggtggccatctcgaacgcctacaacggcaagctgctcgcctcaaaggtgttcgggtggaagcgcatacgcgagatcgaagtcacgcgagccgcagaaggcgacgagccaccggtgctgatggcggacggcgaatacatcgggcatctgccattcagggtagtggccgaggactgcgcgctacgcgtgctggtaccgccggccgtagccgcccgtgaggtggactcccgacaggaagtgctcgacgccatcgcccgagacggtcgcgaccccgtaaccggccagttcgcctgacctgattatattggctcccctcattaggctgagccgtaaagcaaacagcccagtgggatgtttgtaggcgagggttcgacgatagtcgaaccagaagaaagtcagccgtaggctgtccgcaattgcggacgagctggccgcgaagcggactgaggggagtgcgggagagcggtaccagagccaatggccgtcagacctcagacgacatagctttcgatatgcagcgtctgcgccatgacctctttgatggttcggtcgctgatgttcggatgcgagcgaaccagcgagataagccccacgattagcgtgaagaatgtctcatggacgttggtgattggcagaccatgcatctgctcgaaatcacgtacggtggtctgggcaatgtagtcggcaatacggtccgccgcgcggtcaatgaacttgatatacagttcggcgttgccatcttggatcatacggtttgagaaggggctctcgtcggcgattagggaacggagcacatgcacgatgtcgtctaatgccttgttcacgttgcctgtttcgcgcgcttggttccactgcttcaacgtggtgaggatttcgtcgatgacgtcatcgagtactgcgtcggctacggcttccttgtcttcgaagtagtggtagaacagcgaacgcgtcataccgacttcgcttgcgatgtcggaaacggtgattttggagaagcctttttccagacacaccttgcgcgcggcttgcacgatggcgtcgcgccgggcatcgccacgggtggggcgtttcttgtcgaggatatcgctcatgggcacctcctgactacaaccgttattgacactatgttaatacaaagaaagcggttaataacaataaaaatgcggtaaccgttgtcagatgaatgtcgttggaatataaagagttttcccgattcggcagctatgagcccggtttatcttgactttttatcggttaattctgagggcaaaggtaggttagtagctatggcacttgcactgtatcgtcgctatcgtccggacaccttcgaaggggtcatcggccaggaccaagtcacggtcccgctgatgcgcgccttggacgaaggcaagcttacgcatgcctatctgttctcagggccgcgaggatgcggtaaaaccagctccgcgcgtatcctggcccgttgcgtcaactgtgccaaagggccgacttcccacccctgcggcgaatgcgaaagctgcaaggacctggccaccggcggtccgggttccatcgacgtggtcgaaatcgatgcggcctcgcacaacggtgtggatgatgctcgagaattgcgagaacgcgctggtttcgcccctgcgcgcgaccgctataagattttcattctcgatgaggcccatatggtcacgcagcagggcttcaatgcgctgcttaaaatcgttgaagagccgcctgaacatgtgatgttcatcttcgccaccaccgaaccagacaaggtgatcggcaccatccgttcgcgcacccaccactatccgttccgtctggtgccgcaggaagtcatgggtccctacctggagacgatctgcgacaaggaaggcatcaagcccgagcccggtgtgctgaaactggcgatgcgcgccggtggcggctccatgcgagataccctgtctgtgcttgaccagctgatggttggttcggtcgaaggcgttatcacccatgatgccgctgtagccctgctcggcttcacgccggaggctctgatcggtgaggcagtggatgcggtaatcaatcacaacggcgaagccctgtacggcgttatccagaaagtcgtggtcggcggattcgatccgagacgattcgtcgaagacctgctggctcgtgtgcgtgatctgctggtgcttacgttggccggggaccgtgcggaatccgtgctgtccgacacggctgaggccgaggatatggacgatctgcaccgccaagccaaggcgctgggactgggcgcactgaccgccatggcagacatcatcaacactacgttgggtgccatgaccggagccatttctccgcgtatgcgcttggaactgctggccgcacgattgttggccggcagtgaatcaggctttgcaacagccgctcccgcgccagcttcttctggcatgccgcctgcggctgcttcttcgacttcgactacgtcagccgcttccggtacgggtgccagtggttttgccggcgcatcgcgaggcgggtttgccggagcctcacatggtggattctccggtgctgcacgcaaccagcaagcagccgcgcctcagagcaccgcttcccatgaatccgctgtgggagacaatggccctgtcagcagcccagtcagcgaccggcccgcgggctctccgtctgcgcaacctgccgcagcaactgctgctgccaatgcctggggtgctcccgccacgtcgccggccgtcccggcccaaccggtgacctcgcctgcggcatcggataatcggtccatcgacgagaagtgggatgcagccgtcgccgctttgccggaaaccattcgtgaatatgtgtcacgagacaaggtgccgaccgtaaaattcggtcccaaccgtaagagtctgccttgcctgtcgatgacgttcgacaagtcgctgagccagcacgctttcgccttggccgtggacaacagcggtaagaaggcggcgtccgtggtgttggatgccgtgcgcaacgagttcggtgccaatgcggttattgcaccttctgcggtcgcggcgaatggcgagcgagtcgaatccgtcaaacgtatgagcccggagcaattggccaaggtcaagcagcagattgccatggccaaggccggattggccgcgtcgagtttgggcgcgggtctgggcattcatatggggagcgagccgaaagctccgaagccgactgcaacaggccaagccgaggatacggacgacagccatcgagccggccaatccagtgcatccacggcggcgaagagctggagtgacgatgacccttgggccaagccggccgtaagcaacgcttcaccgcaatctgcagacgggttcgcacctaacgagcccgctgctgcgcctgcgcccgaagagcatcacaagaagcatgttgcggttccggacatcagtgatggtgttgatccgtgggccgctccggctgctcctgttgcacccgctgcgtccgttgcgtccgctggacccactggacagtccacggggcagccagccaccgcagctcccgctacggcagttgccggcgcaagcgatgatccatggaatcagccgcaatctcaggctacggcctcgctggcactgcaaccggtcgaagccgacccgtggaaccagccatatcagcagtctcctcacgatgatccgtggaatcagccgcaggggaaccatgctcaggcggctccgcagccaggagacgacccgtggaatcagccgcagtcccagactccggcttcttcggttcctcagacagtgtcgggcaatatgtcgggcgatgacccgtggaaccagccccaatcggttccgcagccggctgccggcgatgacccgtggaatcaaccgcagcccgcacagccgacgccgaatgccgacccgtggaatagccagccgcagccgcaaccgcaagtcgcggccgaggacgacgaatactcgatgaacgaccagtcgctcggcgaggcgacggccatgaatcttgacgatctgaaaaagctattcgaggtcaaaaaagtcgagcaattcgcggcagatgatccgaagaaccccaagaacatccagcctgccaagaagcactcggatgaataatgaggacgaataacgaggaatacccatggcacttgcttatgacggcgcaatacagcgactgatcgacgctttcgggcggctgcccggcatcgggccgaagggcgcgcagcgtatcgccttctacatgctgtccgcgcccgaagatgaagcgcgcgatttggccgaggccatcgaggaggtcaaggccaagatccgcttctgtgatatttgcggcaacgtgtgcgaatccagcccctgcccggtatgcgccgacccgagacgcgaccgttcggtgatctgcgtggttgaagagcccaaggacgtgatgagcatcgagcgcacgcgcgaataccgcggcctataccatgtgctcggcggcgcaatcaacccaatggccaacgttggccctgccgacctgcgtattcccagtctgctcaaacgcttagaaggcgatgaggtcaaggaagtcattatggcgctcgacccgaatattgaaggcgaggccaccaccagctacttgacccagctattgcgacccgtaggtgtcaaggtcacccgacttgccagcggcctgccggtgggctccgacttggagtacgccgacgaaatcacgctgggcagggcgctggccggtcggcgtgaggcctaggccagcgtatcattggcgctttcgcccttgcggcgcatccacggccagaatgcgccgtggcggatgatgcgcgcggccttgtgccgtcgtgccaaccagataatgaacagtcctgccgccagtatgcccagaccaacaccaagggcgatattgcgcgcgtcaagcacgtcattcggctcgggggccggcatcggaattgccacgcggtgcccggagataagcagtcgatgcgtgttcacgccgtatggcgtacaggtcatcaaggtgacacggtcctcacccggcacaatcttgagcttcgacgtgtcatccggcaaaatcaccgaaatgcggtccactttgtagcccaaagtttcgcccatgacaaggtattcagttatggggttctgcggaaacctcgccggtttgctttcgtttgccggtaattgatagttaaccgctcgaatctcaaaggatggatgcggctgtctcaaagaaccaccggtgaaaacttgaatatttgctgaacaacgtaggccatacctgtgtccgcatgccggcgcggggtcgcggggtgaacgcgacagcccttataatcgttgcgtttgcgtagaatatcgaccaaacaaatccctaagagaagagcaaaggacagcagtggctctcatcgtgcagaagtacggcggctcgtcggtcgccgataccgattcgatcaaacgtgtggccaagcgcgttgtggagacggagaagaagggcaataaggtggccgtggtggtctccgccatgggcgataccaccgatgaccttatcgatcaggcgctgagcatcgactccaacccgcccgagcgcgagatggatatgctgatgactgcaggcgagcgaatttccatgagcctgctggccatggccattcacgccgaaggcagccgcgcccactccttcaccggtcagcaggccggcttcttcaccgacacccgttacggcgcggcccacatcaaggccgtgagaccggaccgcgtgaagaacgcgctctcattgggagacatcgccatcgttgccggcttccagggcatcaacgccaagggtgacgccaccacgctcggccgcggtggttcggacacgtccgccgtggcactcgctgtggcccttggtgccgacatctgcgagatttacaccgacgtggacggcatctttaccgccgatccgcgcattgtgccttccgcccgccgtattccttccatcggctacgaagccattctggaaatggcctcctgcggctccaaggtgctggcactgcgctgcgtagagtacgctcagcgtttcaacatgccgctgcatgtgcgctcttcgttctcccgtcgccccggcacgctggttgtgcctgacggcattgacccgcgcacgctgccgaacctcgactgagcgcggctacagcgaacaataatcgtaagtaatttcaaccaagacaaggcaagacatgactgaagaagaagcgaaatccatgggcgacctgttccctgacctgggccccgaggcaccggtgatttccggcattgcccacgatcgttccgaggcgctggccaccgtgcgtggcgtgccgaacgagccgggtatggcagccaaggtgttcaccgagctggccaccgccgacgtgaacgtggacatgatcgtgcaggccggcgcatccgttggcactgcagacatctccttcaccgtgcccgaatcggccgtcaagcaggtgcagaacacgctgctcgacaagcaggaagtgctgggttaccactcctttgatgtgaacaccaacgtcggcaaggtagccgtggtgggtgttggcatgaagacccacgccggtctggctgccaagttcttccaggccctgagcgatgagggcatcaacgtgctgatgatctccacttccgagattcgtatcgccgcactcgtgccgctcgatcagctcaacgacgccgtcaaggcgctgcacactgcatacggtctcgatgccgatcagatcgaagccgtggtgtacggcggtactggccgctgagccgcgaattccgcgcctaatacgatgaaagccctccttgcggagggcttttgcgattttaacgagattcaactacttcttagtgatgtagcctagagccttgagcatttcggcgcattcgagggcgccgccggctgcaccacgcagggtgttgtgggccagacccacgaacttccaatcgaagatggaatcctcacgcagacggccgatggaaacgcccatgccaccctcgtagtccacgtcgagcttgacctgcgggcggtcatcctcggtgaggtactggatgaagtgcttcggcgcgtgcggcagctccagctcggaagccttggacgtgtagttcaccagacggtcgataagctcttccttggtggccttcttgccgaagttcaggaacacggtggcggtgtgaccgttgagcacgggcacgcgaatgcattgcgaagtgatcttgaggtcgccgtcgaacggcacgatctcgcccttttcggcgtccacatggccgaacaccttgagcggttccttctcggacttcgcttcttcaccagagatgaacgggatgatgttgcccaccatctcaggccaatccttgaaggtcttgcctgcgccggaaatcgcctgataggtgctcacaaccacctcacacggctcgaattccttccatgcggccagtgccggcgtgtaggcctgaatcgagcagttcggcttgacggcgatgaaaccacgagtggtgcccaggcgcttgcgctggtgctcgatcacctcgaagtgctccgggttgatctccggcaccaccatcggcacgtccggggtccaacggtgagcgctgttgttggagaccaccggggtctcggtcttggcataacgctcttcaatggcgcgaatctggtccttcggcatgtttaccgcagagaacatgaaatcaacgccagaggccacggactcggcatcgtcgccatcgacgaccaccatgttcttgacgtattcgggcatcggggtttccatcttccaacggtctccgaccgcctcggcatacgtcttgccggcgctgtgcgcggaagcggcaagggtgaccacctcgaaccacgggtgattctcaagcagcgtgataaaacgctgaccgaccataccggtggcgccgagaatgccgactttcaacttttcggacataacaaccttctgggtttgacggattgatttcacgttcgggcagccgtagcgaaatggccacacgtatccatcaatcttacgaatcgggcggaacaagaagaaccgggtgcccgtatgctgggccggatcgccggtgcgacgggacgccggaaccggctggaacgtcacggcgccgccccgccgcgatgctctacactgggagtcatgtcgaaggcgtcggtagaagcgcagcgccagttggaccgcatcgtggcattggggtacccggacgtggtggatgtgagcgccgcggcgttccgctccctggcccgtccgctgatcgaggcgctggagcataccgattttgacgagcgcatcctgctggcgcccacgcgcgagctggtgtcgcccgaatcgctgatttcccgtacgtcgatcaaccgcatggccggtttcgccacgatgccgccgcgcgacatcgcgagctttttgccgcaggacggcttcgagccgcccgagggaccgttctacatcgtcgtggaaccgcgcaccggtaccaagtacacacaaaccgcgagcccgacgtggcccgcaagctcattgactccgacgagcgcattccgctcacgctcgaggagggactggccatcgccacgcagcatccgggctggcttcaggagaaaaacgggttcaacctgctgggctcgcgtagcgccgacggccgcgtgcccagcatctggctgagccagaacgccccgaggctcggtgcggtgtggccgaattccaagcacacgtggcttggcaacgcattctgcatggcccgcaggggcgtctcgctgttccgttagtgagcggattgcgcggcttgtcggggccgtgccgcttgcccgctgacttgttgccgcacggagtccacatacgatttcaccggctggctgcggctaagacggtgaaatcgtatgaccgtatacggaaactccggctgggcgcccgtcagccggtgaaatcgtacagggccatacgaaaactccgccgtagcgggcgccagccggtgaaaccgtataagcgcatgccatttcaccggctggccgcggttagcatcccatgtcactatttgttgataatttctggttcccctccagggggggcaagcatagtaagcgaatgcatgatgctaaggtcggcaggccgagagaagacacgccgaagtaatctgcctttaacagattagatatcagatgtctgatgatagtacgataggaatgctcagcgaacccgcatcgggcatttcaaggaggaaagcgatgccatcattcgtcgtcggcgcgtacgcgtcattgccgcaggggcgcgaagcccaggaagcctattacgatctgctgggcggtcagccctggatcgacggcaccgagatccccttcccgggggaccttgccgaaaccgccgaccgcatctggcttgccggccaactgcccaggcattggaagaacaatacggtcactgccattccgggcaccatgcagcacgtatggaaggacccgaacttcggactggccagcccggacgaggacggacgccggttcgctctggcgttcttcaagcagctgcgcgacgcgctcgccgactttgcgcagtggcggggcagccaggacgtcaagttcgtcgaaatccacacggcgcccacgcgcattgccagccgcgacgcgatgaccgcctcgttgcaggccctcgcgcagctggactggtccggcgccaagctggtcatcgagcactgcgacaagtacgtcgaggggcagaagccggaaaagggcttcctgccgattgaggacgagatcgcgctgtgcgggtcggccggcatcgggctcaccgtcaactggggacgctcggtggtggaggggcgcacacccgaaaccgccgtggcgcacgtggaggccgccgcgaaggccggcgtactgagcggcctcatgttctccggcgccggcccggaggagacccagtacggctacggctggatcgacggccacctgcccatgaacccggacgagccgacctcgctcatggacgccgccgccatcaaggccgccgtgcgcgccgccgggacgcaggagcgcccgctcgactatctgggcgccaaggtgtgcgtgcccaaggccgcgacggtcgaggagcgcctcgactatctcgcgcgcatccacgaggcggtcgtcgcatgagcgcgggggcggcgcccacctacctcgccttcgacatcggcggtaccaaggtcgcctcgggattcgtgacgttgcccgcaagcgcaaacgcaaacgcgggcgcggacggcaggcccgaggtgacggcccgctgcgaaatcccgaccgaggccgcgcgcggcggcgaggacctgaagaaccgcatcgtcgccttcgccgtccgccagcttgagcgcgccgaggccgagggcgtggcgatcgccggcgtcggcattgcggcggccggcgtgccggacagtgaaaccggcgagatcgtctccgccacggacatcctgcccggctggcgcggccagcgcatctacgacgcgttcgcggccgtgaccgacctgccggtgcacatgatcggcgacgtgggcgcgcacggtctgggcgaggcgacgtacggcgccggacgcggcaggggcgtggtgctctcgatcggcgtgggcaccggcatcggcggcgcgatcgtggtggatggcgccctgttcaccggcgcgcacggcgtggccggccacgcggggcacgtgccgagcgcgctgggccgcggattcctatgctcgtgcggcaccctcgaggggcacatcgagccggtcgcgtccggcacggggctgaaggacctctacaacgcccgttgcgatgccgaagagggcgaaccggtggcggacggctcccaggttgcggcgcgcgcggccgctggggagcccctggccgtcggcgtgatcgaggacagcgcccgtgcgctgggcgagtgcatcggcggcatgggcaatctcatcgacccggacgtcatcgtcgtttccgggtcggtggtcaaggccggccccctgtggtggaacgccctgcgcgcgggattcgaggattccgcattgcagctggtcaggtccgcgccgctggtggagggcgaactgggcggcgccgctccgctgatcggcgccgcggtggccgtgcgcaggcatgtcgcgcagggccgcccgtgatccgccgccgggctgggactcccctcgggaggaccccgagccggcgctctccggcaattcgtcgcgcaatcgtcaacacccatatgaagcaatgtcaaggcatgaggaaaggaagcgcatcatgcatcaggtaatcgaaaagatcaggggcgggcttgtcgtcagctgccaggcgtatccgggcgagccgctgcgccaccccgagacgatggcccaaatggccatggccgcggtggagggtggcgcggtgggcatccgctgccagggacttgccgacatcgctgccatcaaggggcaggtgaaggtgccggtgatcggcatctggaaggagggcgacgagggcgtctacatcaccccgacgctgcgccacgcccgttgctgcgcggccgcgggcgccgacatcgtggcgatcgacgccaccggcaggcctcgcccggacggtctgagctacgccgacaccgtgcacgcactgcacgacgagggcgtgatcacgatggccgactgcggcagtttcgccgacgccgagcgtgcggtcgaggccggcaccgacatcatctccaccacgctgtccggctacaccggtgagcgtctcaagaccgacggcccggacttcgaactgctcgagcggatggtcaaggcgttcccggacatgccggtgctgtgcgaggggcgcatccacacgcccgaccagctgcaccgcgtgatggaatgcggcgcgtgggccgccgtggtgggcaccgcgatcacgcatccgacgacgatcacgcgctggttcgccgcgaagctgtgatgcctcgcggcatgcggccgtgacgctgcatgcccggtgccgcagccggaatgccggtgcggtggcatcccgtggcatgggccgccgtggtcc

SEQ ID NO: 2326 - DNA, 15503 bp, Unknown
  R119_18m  MAG No. k141_43856
ccagtatgtcgacatgttgcgtcggcacatgatggacggcatcgtcatgtgtgcgcacacttcgcatcccggcgattattggacgtcgattcatcgcccgatcgtcgcgttcgaccgtgtgcttggagacggtatttcgtcgattggatccgaccacgagcagggtgggcgattgattgcgcagatgctgatccgcaatggtgccaaacatgtggtgatgattggcggtccgcgagatcaattcttcgatttggctgcgcgcggagaagtcgaggaaggatcgttcgatttgggaaagaccacgttcccgacggtgcgctactacctcacgttggaacaggaattgacctccgcaggcgtgaaatacgagtatgttgaagctggcgaagtgatggattttgccggctatcatcgtgcggtcagcaatgcgctcgacaaggtggcgaccgacggcgtcgatgccgtggtcagttccgacattggtgcgtcgttctgcgtgcgcgaagcgttgagccgcggaatttccattcctgacgagctgcagatcgttgcctacgatggcacgtatttgactgatttggccggcatgaagctgaccgcggtcgcgcaggatttctcggcgatcgcacagtcggcggccgaccatatcgtgcaggctattgccaatgaggaagtggccgcggctaacgcttcacgcaggaacatccccaagccgttcgagccaaacgtgcttattcccatgacgctggtgccaggcgataccacgcgttgatgctgcgcgttggaacgctgggttgtgtagaacaccgcatcaaaccggttcgacacgcgcattttgcggtattactagacatcaacgtccctttcgaggtaatatcaaaccggttcgatacgtataagtatgtaaaagcacgcatacactgcgtacacattgcacctgcatccatgaaccaagggaggtcccatgaaaaacaaagtgcagctcatcgcttacgccgatcgtctcggcgatggcactcttagctcgatgaccgacatcctgcgcacccgtttcgacggcgtgtatgacggcgtgcatatcctgccgttcttcactccgttcgatggtgcggatgcaggctttgacccgatcgaccacaccaaagtcgacccgcgtctcggcagctgggacgacgtcgctgaactttccaagacccacggcatcatggtcgatgccatcgtcaaccacatgagctgggaatccaagcagttccaagacgtgcttgaaaaaggtgaggaatccgagtattacccgatgtttctgaccatgagctccgtcttcccgaacggcgccaccgaagaggaactggccggcatctaccgcccgcgcccgggcctgccgttcacccactacaagttcgccggcaagacccgcctggtctgggtcagcttcactccgcagcaggttgatattgacaccgattccgacaagggctgggaatacctcatgtccatcttcgatcagatggccgcatcccacgtcagctacatccgtctcgacgccgtgggctacggcgccaaggaggccggcaccagctgcttcatgacccccaagacctttaagctcatctcacgcctacgcgaggaaggcgtcaagcgaggcctcgaaattctcattgaggtgcatagctactacaagaagcaggttgaaatcgcctccaaggtggaccgcgtctacgacttcgccctgcctccgctgctcctgcactcgctgttcaccggtcacgtggaacccgtggtccactggaccgaaatccgcccgaacaacgccgtcaccgtgctcgatacgcacgacggcatcggcgtgatcgacatcggctccgatcagctcgaccgcagcctcaagggcctcgtgcccgacgaggacgtcgataatctggtcaacaccatccacgccaacacccacggcgaatcccaggccgccaccggtgccgccgccagcaacctcgacctctatcaggtcaacagcacgtactactccgcgctcggctgcaacgaccagcactatctggccgcccgcgcagtccagttcttcctgcccggagtgccgcaggtctactacgtgggcgcgctcgccggccgcaacgacatggaactgctgcgcaagaccaacaacggccgtgacatcaatcgccattactactccaccgccgaaatcgacgaaaacctcgagcgcccggtggtgaaggccctgaacgccctggccaagttccgcaacgaactgcctgcattcaatggcgagttcagctacgaagccgacggcgacacatccatcaccttccgctggatcgctgccgacggcaagaccaaggccgccctcatcttcgagcccggccgcggactcggcgcggataacaccactccggtcgccagcctcgcctggaccgatgccgccggtgaccacgagactgatgatctgctgagcaacccgccgattgccgatatcgactaaccgttggcccataaacgccactccgctgtgcgcgctccaagtagtgcgtccggcgtaagctgggtccatggaaaacaaaccgcccgcagtgcactgaagctagtgcgctcgggcggttttgcatgtggcggggttgcgggtcatgctcagtcggagctggccggtacctcccgccggtgatgagagcaaagaaagagcagcaacatgttggaaccgtacgtgcgcccgggtattgacgaccgcccggatctcgacaaggcattgagtcccgaagacaaggatgccgtggcccgactggccatcaaaaatcgtcggcgtcctcccgaggcatccgccgatcagcccgaggcccaggccgtgcgtctggcggccgccggttcgtcggctgctgccgctgccgcggccagcgtggatgcccctgcgcctgatctgtcgtctgcatatctcgatatgcgcgatccgatggtcgccgccaatggtcagcgacccaccacgggccaggtatcccgtctcaactgggggttcttcgccgcttccattctggtcggcgcaccttggatagcattgaataccatcgccatgcccaacgccgtggcgcgtttgttcggctacgacaccgcttctgccatatcggtcaccatcaatccgtccaccggccgtccgctgcccgtcgccactgacttggtggtgcctctggccgtgctggtggtcgttggcgtggtggcctccatgttcgcgatgcccttggtctccgcgctgtccgaccgcacacgtattcctctgggccgccgtaccccgtggatggtggcgggtggcgtgctgtgcgcgctgatcacgctggttctggggcggaacacaggcctcgtagtgctgtgtttcttctgggcgctcatgcagtttgcctatgcgatgatttccgtgccgttggccagcgccatcagcgaacgggttccggacaaattccgtccgcgcattgagcgctggcacggtatcggcgtgatgcttggccaagcgcttggtgtatgcatgggtgcgctcggcgtgatgttcgactccttcacgccgtttgcctacaccgccgtgctgtttgcggtttccggcatcctgaccgtgatcatgctgcccaaggagccttccagccaggagcagccacatcaacgattcgagtcgagccaggtgtttgaccagctgcgtccgccggcacatgcgcctgcattcgcccgtgtgttcgccgctcgcgtgtgcatgatgacgggcgttgggctgaccggggtctttctgtggtatctcgtgcgcttttgggtgtatggcaaggctgtggtgttcacttccgcgccattgaccattcccgcgggcctcctcatcgccggcatggccgcggcaacgctcatcggtgctgcgctcgcgtcctgggccgctgggccgatctccgagaagatcgaggaacggaacatcgccaccactgcagtggtggcggcatcctgcctgctgtatgccatcggcgtggcggtggcatgggggctcggcgtctggtccaccggcacggcacgcgaaaacggcatgctgctcttcgcgctgatctccggattcgccttcggcgtctacgatgcgttaggccttgaactggtgatggactctttgcccgacccgcgccgagccggccacgacctcggcatttatgcgctcgccaactcggccggtctggcgctcgccgccatcatcggcgcgctactggtgaacgccttcgagcgcagcttcggctattacctgctcttcccgtccgccatcgtcatggtgctgctggccggaatcgtcaccctcaccgccgagtccgcgcaatgacgggccggtccggctccccggccgccggcggcgttcctccccgcggcgggggcgttcgtctcggcgacgtggcgtccacaatgtgaacccttgctggattggcaagacagccaaacctatgtttacattccagttcaggtcgaacggcctgaggaaataccgaaaggaggccacgcgatgactggattcaatgcttctgcgtttgtatccgcacgaattattagcccgtcttcgctggcggactaattcggcattgatgcttgaagccccgtcaacgaaggcagggccaatcaagctgacacaatcggtaaggccctgcaagttgcggggctttttttgttgcgctcacaaggcttacggcagaatcccgcagacggaaacggtagcggacagtacacggcaacaacacagcaacagaacaacaacctccctgtgagacgaaataatcgcccgccaatgagagtgaacgagagcaaaacaggagtaacaatgactgcagcagtcgaagagactggcttagggcaggcggcaggtaaagccgctaccttggtacgcgattcggtcaagaccgtgatcgccgcatcgatggtcggtaccgccatcgaattctatgacttctacgcctacggcaccgccgcggcaaactacttcccgcacatcttcttctccgcgaaggacaaccccaccgtcgcactgctgatgagcttgctgaccttcgccatcgccttcatcgcccgcccgctgggctcgctgatcttcggccacttcggtgaccgcatgggccgcaagaccacgctggtcgtcagcctgatgaccatgggtgtcggcaccttcctgattggctgcctgcccacctacgatcaggtcggcgttggcgcagtcgccatcctctgcctgctgcgcttcatccagggcatcggcctgggcggcgaatggtccggcgcggcactggtcgccaccgagaacgcgcctgaagacaagcgcgcactgtacggctccttcccggagctcggtgccccgatcggcttcttcctgtccaacggcacctacttcgtgctcgaatccttcaacaatcaggatgcgatgctggcttggggctggcgtgtgccgttcctgctgtccgccatcctggtgatcgtcggcctcgtggttcgcgttcacatggaggagaccccgatcttccgtatggctcaggagcagaagaaggtcgtcaagtccccgctgaccgaggtcttccgcaagtcttggcgtcaggtgctgcaggccaccttcctcgtggccgtgacctacacgctgttctacacgctcgccacctggtccctcgcttggggcaccaaggagcagggcgaaggcggcggcggccttggcttcaccaaccaggaatacctgctcatgctcatgatctccatctgcgtgttcgccctgttcatcgtgctgtcctgcctgtacgcggacaagatcggccgcaagcgcgtgctgaccttctcctcctgcgcactcgtcgtgttcgccgcgctcttcccgttcctgctggacggacaggtcgtcggccagcacaacttcttcgccaacatggtgttcctgtgcgttggctttgccctgatgggcgtcgccttcggcccgatcggcgcgttcctgcctgaactgttcgaggcgaacgtgcgctactccggctccggcatcggctacaatctggccgccatcgtcggcgcggcgttcgtgccgaccatcgccacttggctgagctcccactggggcgtccactccgtgggcctctacctcgccgtgatggccgtgtgctgcctggtgtcggtcctgacctgccgtgagacgaaggacgctgactttaccaagtgaaatcctccataactaaatatcgccaagttcacaacgtgaaaaatctcaattccactaagtgaacctctgcagggcttttccgggtcaacaggactaaacctgcatatcggaaaagcccacaaggaaagccaaaactaaaaacagtttctgcagaaccagcagagcacaataacaattaaagatttcacccccccccataaacaaataaataaaaggagcgccaaaaatggcagcaactatctggtacgagaaggacgccgatctgtccgtgttcgatggcaagaaggtcgccatcttgggctacggctctcagggtcacgctcacgcgctgaacctgcgtgactccggtgtcgacgtggtcgtcggcctgcgtccgacctccaagtctgtcgagttcgccaaggagcagggcctcgaggtcaagccggttggcgaggccgtcgctgaggctgacgttgtgatgatccttctgcctgaccagtaccaggccaaggtctacaaggaagaagttgagccgaacctgaagccgggcgctgccctggccttcgcccacggcttcaacatccactacggctacatcaagccgtccgaggatcacccggtgttcatggttgccccgaagggcccgggccacatcgttcgtcgtgagtacgccgctggccgtggcgtcccggtcgtcgttgccgtcgagcaggacccggacggcaagacctggccgttgtgcctggcttacgccaaggctctgggcgctctgcgtgcgggtgccatcaagaccaccttcaccgaggagaccgagaccgatctgttcggtgagcaggacgtcctcatgggcggcatcaaccacctgtgcgacctcggcttcgacgtgctgaccgaggctggctaccagccggagatcgcttacttcgaggtgttccacgagctgaagatgctggtcgacctggctaacgagggtggcctgaacaaggctcgctggtcctgctccgacaccgctcagtacggcgactacacctccaccgtcatcaccgaggagaccaagaagcgcatgcagtaccagctcaagcgcattcaggacggctccttcgccaaggagttcatggacgaccaggccgctggcgccccgaagttcaagaagctgcaggaagagtactctcacccgcacctcgagaccgtcggcccgaagctgcgcgccatgttctcctggaacaacgccgaggccaaggacaaggacgaggccgagtccttcaacggcaagatcgctcgtacccaggttcagtgattgccgcccctgaaggggatttaagctagcaaaccgccgttcccgcccatacgggagcggcggttttgtgttgttgcgcgcagcgaatcattctcaataacaactatgcgctgatttcttgcaggcaaacgaacaccgaatatgcaagatcgttgatatctcagcctttccccatatgtgggattgtgcgattctgttcaaaagggtgcagagttgttatcgagaatcgttctctgcacacggctgtccatactccaatagtgacctagctcacgttgtggactccagcggggctgcgacggcgttctcggtaggattgatttcggtttgaaggacacaatcctcgcaacacaggacttatctgcacaccgtagataccccggcgcccagcggcgccacaccccactactgaaaaggagtgccaataatggcagcacaaatctggtatgagaacgacggcgatctttccgtcctcgaaggcaagaaagtcgcaatcatcggctacggctcccagggccacgcccacgcgctgaacctgcgcgattccggtgtcgacgtggtcgtcggcctgcgtccgacctccaagtcggtcgacttcgccaaggagcagggcctcgaggtcaagtccgtggccgaggcttccgccgaggccgacgtgatcatgatcctggcccccgaccagtaccagcgcaccatctgggccaacgacatcgagcccaacatcaagccgggtgctgctgttgcgttcgctcatggcttcaacattcactacggctacatcaagccgtctgaggatcacccggtgttcatggttgccccgaagggcccgggtcacatcgttcgtcgtgagtacgccgctggccgtggcgtgccggtcgtcgtggccgtcgagcaggatccgcgtggcgatggttgggctctgaccctggcctacgccaaggccctcggtgctctgcgcgccggtgccatcaagaccaccttcaaggaagagaccgagaccgatctcttcggcgagcagaacgtgctcatgggtggcgtgaacaagctcgtcgagatgggcttcgaagtcctgaccgacgccggctaccagccggagatcgcctacttcgaggtctgccacgagctcaagatgctcgtcgatctgatgaacgagggcggcctgaacaaggctcgttggtcctgctccgacaccgcccagtacggcgactacgtcaacaccgtcatcaacgaggactgccgcaagcgcatggaataccacctgcagcgcatccaggacggctccttcgccaaggagttcatcgacgatcaggatgccggcgccccgcacttcaaggaactgcaggagaagtactccaacgagcgcatcgagaccgtcggcccgaagctgcgcgccatgttctcctggaacaaggatggcgtcaaggatgccgacgaggccaactccttcaccggcaagatcgcccgcgcccaggttcagtgattcttccttggctcccctcgggtgaggtgcgcacgaacagcgagccggcaatcgcagccttcaggctgtccgtgttgcagtacgctggcgcgtaagcgcctgagggtggtccccagtgcataccaaaaggccgtcgctccgattcattcggaacggcggcctttcgcttattccaaaagctctactgaataacccacgcagaagtgtcggtggggagctggccttcgggggtcagcgggccggacgccagcaccacggagccatcgggcagcgcgaccggggcattgccgaagttggtgattgaggtgaacacccgcccgccaaccgccgcgcgggtgtacgccaccacatcgtcgcccatgtccacctgctcggccgtggtgtcgcgcgtggcggtcagcgactcctggcgaatcgccagtgcggcgcgatacagcgcgagcatcgagtccgggtcggcttgctccacgtccaccgcgtaatccttgaaccacagcggttgcggcaggtgcgggtcggcggccggcgtcacgccctcagcgcgcgtagccggcgagaagccgaaggaagcgcccgtgccgaactggccggcggcgcacagcggcacatggttctcgccggtaccgtcatcggccggagtcggacggctgaaatcggccaaggccggctcatcggcggcggtccacggcagcggcacgcggcagccgtcgcggcccttgtccatcgtggcctgagcagtgtggaaagcggtcggatcctccaagtgatcccacggaatatcggccacctcaaacaggcccagctcctcgccctgatagatataggcggcgccgggcaggccgagctccatcaaagcggcggcgcgggcgcggcgagtgccaagctcgcgatcctcgggataggtagtgccgttgcgcagcagccagtcgtgcggcagctggtggtagggcgcgcccttgatctgcggcaggccgtaacgggaggggctgcgcggcacgtcgtgattgttcatgacccacgtggtggtggaaccgccggtttcggccgccgccttgagtccggcggcgatggcctcgcggaactcgtcggcataccagttggcttgcgcgaagtcgaagttgaaggactggcccagctcgtccatcgaagcgtacaggtgctggtgctcgggcaccacccacgcctcggccacggcaaagcgcggcgggttgtactcgttgaacaccttgcgccattcgcggtagatatcgtgcacctcgcgacggtcgaacagtgggtggctgaagtcatgattcagcacgccgaccacgctgtattcgcggccgagctcttccaacggcttggattcgaggtccttggccaggccgtgcgccacgtcgatgcggaagccgtcggtgccgtggtcggaccagaaacgcagggtcttcttgaactcctcgtggatgtccggattcttccagttgacgtccggctgcgccttatcgaacaggtgcagataccactggccgtcggccacgcgcgcccaggccgggccgccgaagaaggattgccagtcgttcgggggcagttcgccatgctcgccgcggccgtcgcggaagatgtagcggtcgcgcgccggggagccaggctcggcggcgagggcctcctggaagaacacgtgcttgtcagcggtgtggttgggcacgatgtccacgatcactttgatgccggcctcgtgcgcggccttggccatcgcgtcgaagtcttccatggtgcctaggcgcgggtcgacgttgcggtagtcgattacgtcgtagccgccgtccgctaggtcggaggggtagaacggggaaagccagatggcgtccacgccgaggctcttcaggtagtccatcttctcggtgacgccggcgatgtcgccgatgccgtcgccgttaacgtccttgaagctgcgcgggtaaatctggtaaacgacggcctgcttccaccagtcgtcattgaggttatttgcggtcatgccgattccctcctgttccgggtgcgttgtggttgggttgttccggtcgcgcccgaactgctgtgtgaaggcccgaccgttgtattgatgatgacaacgatatcatgtgaattacgcatgcaaaaatcgatttatcggcgttttgcggtggtaacgtgctcacgcctgcgcgggcgctgctgtcgcggcaggcggcgcggtggtttcgcgcagtattagcggagtgtccggccgtacgaatgccggttcgattgacttgccggcaatggcatccaataccatgtgcccggcagtcgcgcccattgcgaacgggtcctgatgcagcgtggtcagtcccacggcggcggacagggtggaatcgtcgaagccgatgatggaaatgtcctgaggtacccgccgcccgtattgacgcaggcgatacagcacgggcgcggccatttcatcatcctcaaaacagaaggcggtgatgctgggggagacgttcagtacggcgttcaatgccgcgttgctttcgccaagaccgcgttgaatgctcaggggcgttagctcgatccccggatgggcggcagcggcatcaatgacgccctgcaaacgagcctcggtactgtagcgcatattggtttcggtcggtgcgctgccgacgaacgcgatatgccggtggccgagtgcaatcaggtgctcgatagccgaacgtgtggcggcgtaatcatcaatgctcacgcctgcgtcgaacccatcggtggaggggatgttgatgccgacaatcggcacgtgcatatgcttcagtcgctccacttcagccggttcgatgtcgaaggagctgacaatcaccgcatccgcattgcgccgcacgggcaaatccgcaaagaagtcgtggcgctcgacggcgttgcgcatggggtagggcacagtgtcgtagccggaggggcgcagcgccgagtcaagaccggcgaagatgttcgaattgaaccagctggcgatggtctcgctggcaagtagtgcgatacggaacgattggccggattttagggcggcggccgagcgtgagactgagtagtcgagcttttcggccgcggccatcactcggtctcgagtctcgggaagcaccagatccggcttggcgaaggttcgggacaccgtggatacggaaacgccggcctcgtgggccactgcctgaatgcttgccttggtcatatgccgtcgctcctttaccgtcgcgaacaatcattgtcatgacaacgataacatgcccataacaagtcgccgtcttcggctatctcgattacgaggggctgatttagggcattccggacatctacttccgtttcaaggggctccttgccggtaaaaccacaagtgcaaacgactttgtgccaacgtcattccgccgttctcgcgctgggtctacttgggcgccagccccttgaagcggaagtggatgtccgggaaaggccaaatcagcccctcgaagccgatttagaccaatttcccattgcggaatcgatcaccgcttctctcggcgcatcacggcggctagggactgcacgcgtggcaggtcgaagacctcgtcggtatgcaccacgtggcctgagctgtccgccagcggcacgcgccagttcgaatactcgctggaagtgcccggctgattctgggaacggcattcgcccacgccgtccaccagcgctgcctgcagcagcagcgacggcgtatcggtgagcatggcgtgcatcgcttccacgatctcctgcacatggccttccacatcatccgccacggtctgtgagatatagccgttctccaccagacggttcatcatggccgtgcgttcggccatcgccgaggcggcgaacgcctccaccggctcgctcaggagatgcagctcctcgcgcagcttgacgtgttcgaagttcaggtagccggcggtgggtggcagatcgtgcgtggtcaccgaggccaatgcctgcttgcggtagtcctcgggtgcgcggtacgggtcgccggcgttcggcgaatcgtccacgcggttgaaccattccacgtcagtgccgagcacgccgtgatcggacagaatgcggcgcacgtaatccggtacggtgcccagatcctcgccaaccaccatgcctccggcgcgcgtggcctcgatggccagtactcccagcatcgcctcgtggttgtacgtcacgtatgcgccgttgagggcgccgagcccctgcggaatccaccacaggcggaacaggcccagcacatggtcgatgcgcaccgcgcccgcgtgctcgtacatcgaatgcaccatctcgcggtacacctggtagccggtggcctccagatagcgtgggttgaacggcggctggccccaatcctggccctgctggttatagaagtccggcgggcagccgaccgtgacgccgccggaggcgaagcgttccggattggcccaggcatccgcgccgagcccgtgcacgcccacggccatgtcttgcatcagacccagtgtcatgccgtggtccagcgcctcctgctgtgcggcgttcacctgctcggcggcaatccactgcagccagcggttgaactcgaacaggtcgtggtgctcctcgacgagctggcgcacggccgggtcgtcgaaggtcttctcgaagaaccaacggttctcaccccacggcgcgccccatacctcgaagcacaggcaccaggtggcgaaggaatcgaggtctgggccggcggtggtcttgaaatgctcgaattcgagctcgcgcttgttgttgcggcccgcgtcgaagatcaggcgcagcgccgggcgtttggccgcccacgccgcgttgatgtccatcgggttcgattcgtcgttgcgtgcggccactgaatcatgcagcgcatccacctgcgcgcgcacgtcggccggcagcgtggcatattcggggatatcctgcggccggatgtacgtcacgttgaggaaccggcgcgattccggtagatacggcgatggctcaagcggcggaatcggcgcgccggcgtgaatcgggttgatgagcatgaagtcggctttggacttgtcggccgcgtccgccagcagcagcttcagatcgccgtaatcgccgatgccccacgattcgcgggaccgcacggaatacatctgcgtcatccagccccaccgctggtgctcggcgaccgcctccggcacgggaatgcgcgcgggggcggcgatgatggccgccttgccctcgcgcccgtccaccgtgacggtcagtgtgtggtagcccatcggcaaatcgggggcgatggtcaagtccggcttgccggaattgaggtgcggcagcagggcaaagtggccaaacgcggtgccgtcctccagttcgatggagacggtgatgtccgcgtccgacgaacagttcagggtgatgccggtcggtttgccggtggtggcgacgatggtggaggggagcaaacgtttgctgttttccacctcaagttgggtcatggagcgtgcgatggcctcgtcgctggaggcgtccacatcgagggccttgagcacggcgaccaaggcctcgtcgctgatttcggtgtaggtgccgagctggtcgatgaatgaggtggcaagcccgcatgctttggccagcttgaccagcgggcgggtgagtcgttcagcgctttccgtacgctgcgaggcaccggaagcggtgtcgttggtggcgtctgcgatggtgccggtgctggtcgctgcgtcgttgccgtgcgcgtcggtcatgatgactccttgcttgcagatcgggtactgctagtcgtttgcattgctgttcgagggccgctctgcgttgaggttccggcaatctggcagaccaatgtccgagctgttctgtctttaccgtaactcatattgacaacgattgcaatacattcggtgagttgggcaattagcgggctatccgagcacgacgaacgactgcggggagagcgtcgggtggccgtcccagcgccagtcgaggtagaagtccatgtcgaatccggcctgcattgattcgttcggtcggcccacattcggcgacgaacgccgcctcggggaattcggggcggattttcgagaacatgtactgccaggtgcggatcgtgtatggcttgccggttcatgcggcgatgatgccgtggcccgattcgacgaagaatgttcatcgttcttccggcggtatccgaacgttggcttgtgatgcctaccgtaggagccggaatcgaaagatccaagcaatgcaggtgcggaacggttccgcgaagctggaaggcgtgacgacgacggacgcggccgaacgggtgcggccggaggagtgcgggccggacggtgcggatgacactgcatggaagaaggacgaacaatgggcaatcacaaggctttgacgagcgccgtcgcggcggtcgcctccatcgcgacgcccggcgcgcttgacgacgtgcaggcgggcaccggccagtacacgaccttctcgctcggcgacggcagcaaggacagcgccgtcggcaaggatggcgccggcaagctggtcgccaaccccaacccgggcaagctcacccc

SEQ ID NO: 2327 - DNA, 44948 bp, Unknown
  R119_18m  MAG No. k141_46716
cggcgttaaggctggtactgccaccatcaccgccaccactgagctgggtggtgtgaaggccgaactgcccgtcaccgttgagccgatgaacgccaagaacgctgccgaagccgacctcaacgccgcgatttccgcgctgaaagttccggcggccgagaatctgccgctagtcgccaagggcaccaagaacggctcggcgattacgtggaagtcctcggacgagaagctcattacgtccactaacgagaagtacgaaaacaagaccactggtgccgatgacccgtatcgtggtgctggcatcatcaatcgtccggcctacggcgacggtgattccaagccggttacgctgaccgccaccgcttcctacaacggcggtgagaaggtcaccaagaccatcgaggtcactgtcaaggagaagacccgcatcgcgcctgacaccggctatgcggccgtcacttttgagagcgacagcaacggtggagaaaaggcctgggtggcttccactgagaagaacgatttcttcacgtttaagactcgcaacaatggccaggcggtacttaccaatgatgcagatacgggtggcttgcgtgacatgttcgtgctgcgttcccacgaaggcgacaagtactacctgattgccactgatctcaaggtctcgtcaatgggctggagccagaaccaggttaacggttctcggaaagttgaggtctacgagtccaccgatatgatgaactggacccgtaccaacggcgacggcaacggcggcatcaccatcaacacgccgaacgccggtatgacctgggcgccggaagcttactgggatgatgacctgaacgcttacgtggtgttcttctcttcccgcatgttcactgatgacacccgtaccactccggtcaagaacgacaaaaccggcaatagctcctatgctcaggtgcgttacgccatcacccgcgacttcgtgaacttcaccgagccgcagatgtggcaggacaccggctactcgcgcattgattccaccgtgcgtaagatcggtggctactactaccgattcaccaagaatgagcagggcggtgccgctggcgattacatcaccactggtaagagcatcttccttgagcgttccaaggtgctgactgcaccgaccaccgaggcatctccgggtcaggacccgaacaccggttggcagctgctcgagcaggcgttgctgccgttcgaaggaccagagaccatcaagctcaacaaggatgacgaactcaacacgaaggacgacgacggctacattctgctgtccgacaacttcgcctaccgtgcatttatgaccacgggtgccgagctttccaagaccacgtgggacaacccgatgaccaagcgttacccggacttcaacaacgaaaagaagccggtcaaagccgagccgggcgctcagggctacatcactcagggtgctaacggcggtctgccggacaaggtgcgtcacggtgcgttcgtgaacgtgcctgagtctgtgctcaaggtgacgaagtcctggaccgctgccaacccgacgcacatcgaggctgttgactccaccaccaaggccgtgtacaacgccggcacccgcgagctcaccgccacggtgaccgccgccgataagggcacgctcgccggttcggtgaagttctctgctggcgactggtccaagaccgtgaagctcgacgccgaaggcaaggccactgtgaccctcccggccagcgtctctggcactgttgcggttgcttacgacggctacaccgatggtttggtcaatccatccgatactacggttgacggcattgaacagggcaaggtcgatttggctgagctcaacaagcagatcgccgccgccgaagcgctcaaggaatccgactacacggccgattcctgggccaagcttgccgccgcgctgaagactgccaaggccgcgctcgccgctgagaatcagggcgaggtcgataccgccgcagccgaccttaagaccgcaatcgaagccctgcagaaggctccgaccaatccgggcgaaggtgacggagataagggcgacggcaataagccgactaccccgaccaccggcgacaagaccaacgtcaacaagcccggcagcgcgctgagcaataccggtacggccgtgctcggcctgggtggtgccgtggtagcactcgccatcgccggcatctccctaaccctctggcgcaagcgtcgcgcctgagctgctacggcaaccaagcccccctctgacgagggggggctgtcagccgaaggctgactggggggagagaccgcggcgaagccaccgaaagaacggcatggccttcggccgattctgtatcccgcggctgccgccgcaggtctctcccccgactgcctaacggcggccacctcgaacgcaattaaggaccagctttcagctggcttcatatttgctcactgtcgttcaccttcgcctaaaaacgactctggcgttttcttcacggctcagctcatcagagggcggccacaaaacttcgctccataactgaaggcgcaaccacaatcaaccctatcaatgaggagaaacatgggaaagctgatacgaaaggcaaccggactcacggtcggcgtggcaacactgctcgctggtctggtgctgccgatgacggccagtgccgagagcgcatcgccaatcgatgccagtccgatcatccactattcattcgataacgcactgacgtccaagaccatcgccaacgagggcagcgcggccaacagcgatgccaccctatccggcgacgccacggtggccaatggccagatcagcctgaccggctcgcaaaccattagcgtgccgaccacggccatcgccggtaagaaggacgttaccgtctccatctggctcaagaacaattacggcaacggcaataccgccgccgcgtacatcggcgcggccaagaccggcaattatccggccaacggctactggctgctcaacccggccaacccgagtggctacgcgaaatccgtaatgaccaatgccactgcggccgacccgaataacagcccgtggggcaccgaagtcggccctggatcgacgaacgccgccaccaccggcaccaaggccaccagcgatttggctctgtacaccaccgtcatcagcggcaccaacagcaccatgagcttctacctcaacggcaagcaggttggagacgtcacctacaccattccggccggtggcctgaccaattacggcgacctcgtcgcctacattggcaagtcctcctacgctgacccgaactccaagctcgacgtggacgattacgccgtatacgacactgccatcagcgccgcagacgtgaccaagctgtatgacgctcaggtgctcgacaaggccgaggccgctgtcaaggccgctgtgcccgcatccgctaccgaggacttcgcgctgccgaccagcgccgctggcgtgagcatcgcgtggaagtcggacaacgcagctatcgccgttgacaacgctaccggcaaggccacagtcactcgtccggccgcaaccgcagctgatgccgaggtgaccctcaccgccacgtttggcaacaacgccaaaaccgccgcctacacggtcctcgtgccgaagcagctctccgatgccgagcaagccaaggccgaccttgacgccgtcaccatcgaggactccgacgacatccgtagcaacttctccgtgcccaccaagggcaacaatggttcgaccatttcgtgggaagtgaccggtggcaaggatatcgccacactaggcgaaggcgtgaacgacaaatctcgaacggtcactgttaagcgccctgccgccggtagcgatgccgccactgtgacgctcaaagccactgccaagtacgataccgccaccgaaacgaagaccttcaccgtcaccattcagccgatacctgccgccgaagagaaggacgaggcctacgtgtgggcgttcttcaccggtgagggcgtgggcggcgagaaaatcagcctcgcggcttccaagggcaacgatgcgctcgactggaacacgctgaacaatggcactccgctgttcacttccgagtttggcgagaagggtttgcgcgatccgttcatcatgaagtccaaggatggtgacaagttctacatgcttgctaccgatctgaagattgacggtcgtgcccccctcaacgggctgaatggctttgctggtgcacaggctaacggttccaagtacattgagatttggaagtccgacgatctggtcaactggtccaagcaaagccacgtcaaggtgagctctgattacgcaggcaacacttgggcacctgaggcctactacgacgaggaaatcggcaagtacgtggtctattgggcctcgaacctgtacgacaacaccgacgagaacagccgcaagcagctgacctacaaccgcatggtgtacgtcaccaccgatgacttcgtcaacttctccgacccgacagtgtggattgacgttgatcgccgaggtggtgcaggcagtggatccatcgatgtgaccgtgcaaaaggtaggggatacctactaccgcatctacaaagatgaaaacacgatgtctttgcgtcaggagaagtccacagatttgactgccgcaattggtggtgccggcgtgaagaactacgccgatgcgcttaagggtagtgcatggagcgaagttgccacgaacatcggtaaaggccaggctaacggttacggtaaaaccttcacttccggcgaaggtccatcgctattcaaggccaacgatggcgacgtgaacggctaccagtactacctgttcgccgaccagccgagctatcatcaaggtccaaaccactatgtgccgatggcgactgaggatatcgccagcggtcagtggaccgttatcggcaataagatgcctgaggtgaacttcccgaccaattccgatggcggcaagccgcgccacggcactgtgctgcccgtgacccgcgcccagtatcagaaggtgctggaggcgtacgctccggctgtggctgtgaagtccgttgacgcgctgtctgccgagacgacggttggtgtggcgccgacgctgccggaaaccgcgcatctgactcatgcggacggttccgtttctgacgttgcagttgagtgggatgccattgacgcagcttcctatgccaagaccggcactttcaccgtcaagggcgtcgcccaggacgattcccgtatgccggtcgaggcgaccgtcaccgtgactggcactgacatctccggggcggtcgtcacggccgaacccaacgagttcaccgcagacggtgctgccaaggaaccggccgtgaccgttacgctcgatggcgcgacgctcaaggaaggcgccgactacacggtggcctacacgaacaacatcgaacccggcaccgccacagtgaccgtaaccggcgctggcaagtactccggtactgtctcggcaacgttcaccatcaaggccgccgagcccggctccacgctggacaagtccaagttgcaggcgcttgtcgataaggtgaagggctataacaaggctgattaccagtctggttgggatgctttcgccgccgcgctcgccgacgcgaagcaggtgttgcagaactccaccgaccagcaggaagtggacaaggcgctgtcgcggctccagtccgccgccgacaagctggtcaagaagtccggcgactccggcaagaccgacggcaaggacgacggtgcccaaaagcccgcctccaagccgagcgacaagatcagtgacaccggttccgccgtcctcggcgtaagcctcaccgccgcggcgctgcttgtcgccgctgccggagcctacgccctgcgcaagcgccagtcctgattggcgtcgcactcggctcccctgggtgaggggagccgagtgccgaagacggatgattggggccctcgctccacaaagagtgaacgctcatattaaacttgcaagtacttataaccaaaaatgcggcttcgcgttgccccggtccctcaaaacggtgtcgtttgagggggcggggcgttgcgcggatgcatgagaacacagttcgcgctggcaaacgaagcagcttcgtcggtgcgaaaaaggcgcgaaactaggccgataaaggagcggccgaccgtcgcacgataacaatttgataacaaaatcgatgtttgtttcctgttcaggaagctgaacaccgttgatcaataacttcgatccataactcagcgaaaaaaccaaaacccacaatcagaggagacacatgggtaagtggaagaaagcggtggcagctcttgcagctgtcccgatgctgatggcgttggcgccagcagcaaatgcggttgaatcggatcccaccgattcatcggccgcgcagcgggcgctggcagcggccctgaaatcaaatgccaaggcagcggcagacagcgatctgctcgccagtcttgatttcgacaacgtcgctgcaggcgctactggcactattgtcgatgacaccaccggcaccaaggcgaccatcaacggtgctgccgcagtggctaccagcaaggacggcactgctgcagttcggctcggttctggattctggctgaatgtgactaagtcggacgattctgccgtgctcaagggcctggatgcggtcacgatttcgtacgattccaagtccgccagcaccaatcagggctggtcggtatttgcggcaccgaatacgaatgcgcagacctatcagcaagagcattacctcggcgtgatggatcgcaccacttcggtgaacgttgagcgttacaacaacgctggtaagcgcgacaccaccggcaatgtgagcaaggatggtctcgccagccagtggcgtcacgtcgatttggtcatcgacgaggccgcttccacgctgtacattgacggtgagcaggccgcaaccgtagccccagctgatggcgcgagcttcgctcagctcaccgatattctcggcgcagacggcggcgtgctgcagatcggcaaggccaactgggtgaatggcgaatactataccggcgcacttgacaacctcaagatttacggctctgcgcatactgctgaccaaatcaaggaagcctacgattccacgaagtccgatgccgccaaggccgacgctaatgcgctgaccattaacaacggcagcactgatgtgtattccaacatcacacttccggccaagggctcggttaacggttccgcgattacgtggaaatccagcaacgcaaaggtcattaccgatgcggcagatggtgacatcgcagctggtgtcgttgctcgtcagaaaaccgacaccaaggtgacgctcactgccaccattaccgatgctgacggcaacacggaaaccaaggaattcgagctgaccgtcaaggccgccgtcgaacagccgaagaccacggactatctgtttgcgcacttcaccggcaccgaaggtagcgctaccgacgagcagatgtacttcgccaccagcaaggatggcctgagctggcatgacacccgcgagtccggcgatccggtactcagctggaacaacagccagaccggcaactctcgtggtaaggacaacggcgtgcgcgacccgtatctggtccgctctccggaaggcgacaccgtctacctcatcgctaccgagctgagcatccataaccgtggcggttggggcgcggccaccgctaccaccaatggcagcaccaacctaatcgtgtgggagtcgcatgacttcgtcaactggagcgaaccgcgcgccgttgacgttgcctctcagattccgggagccggcatggcttgggctccggaagcctactgggatgatgtgaacaagcagtacatggtgtactgggccactgcttccgacgcggacaacaagtccggcgatcgcaccaatatgtactactccaccacgcgtgatttcgtgaacttcacgacgcctgtcaagtggatcgaccgagtcaagtccgttatcgataccacgatgattaaggccgatgacggctattactatcgtgtgtccggtgacacgtacctcggtgttgagcgtagcaaggatccgtatgccacaacgctcaccactggtgacacaattgcgaatggttactacaacactgacagtgatccgaaccagtggacgcttgtcggtacattcggtgacctgactggtaccggtctgaccggtgcgcagctggaaggcccggagctgttcttctacaatgaagatgacgtgcagaccagtgatgcgggcaagaagatgctctacggtctgatgtgggaccagtactcagccggtaagggttacaccccataccgttctgccgatttaggcagcactgataaggctgattggggctttgcctctgatgtgaacttcggttcgctcaagaagcgtcacggcaccatcctgcctgtcactgaaaccgagtacaacgcaatcctgaaggcattcgataagaacaaggacaccgagccagtcacacccgatgaagacggctccggtccgattgccgagtatgacttcgaagacagcaagggtaccgacaccactgagaacagcaacgacttgaccttcaacggcaacgccaaggtctccgaggatgccgaaaagggcaaggtgcttaagctcgacggctctgacggcacctacgccgagttcccgaagggcctgttcgatggccgtaacaagctgactgtgcagatggatgtcaagtcggagatcaataaaaaccagttcacgttcgctttcggccagaactccaccaagtactacttcctgaagtacaacaactccggcgagctcgccagccgcatcaccaccaactcgtatggtgcggaggacgcggctaacgctacgttgtctggcaacggcgcatggcatcgtgtcacggtcacgttggacgacaacgtgatgaccgtgtactctgacggtgcgcaggtggctcagaacaaggcgaccaagaacaaggtcaccgatttgggtaacgatctgctggcctacttgggcaagtccttctacaacgacccatacttcaagggttcgttcgacaatgtgaacgtgtggaaccgcgcgctcactgctcaggaggtcgagaagaccagtccgattgctctgcagggtatttctgtgggcactgtgccgtctgacccgaactcgctgcgtggcactgacgaccactctcaggtgcgttccaccctcgactggtccgcgaagaccgtcaccaccgtgctcaaccgccgtggcgacgcggccaaggtgcccgtcaaggtgaccgtcaaccgtggcgacgactccatcaagctcacccttgatggtcaggcgttcaccaatggtggtacggccgacctgactaaggaccgtactttggttgtcgatttgggtgacggtaatacggaaacctggacgctgaagaaggtcaccgtgggcaacaacccggtgctgcccggccagtacgccgacccggacatcgactacttcgacggcaagttctggatttacccgaccaccgacggcttctccggctggagcggcaattacttccatgcgttcagctccaccgacttggtgaactggaccgacgagggcgtgatcctcgatgtcaacaaggaccaccagccgaccaccgatggcgatgagaacaccgccatctccccgtggtccgtgggctccgcgtgggcaccgaccatcgagaagaagaacggcaagtactacttctactactgcgcgaagttgccgaacggtcagtccgccatcggcgtggccgtggccgacaatccggccggtccgttcaaggccgccgatcagccgctggtcactcgcacgatggaaggcgtcaccgttggacaggccatcgacccgtccatcttcaccgacccgaacaccggcaagtcgtacatcctgtacggcaacggttcgcccgccatcgccgaactcaacgacgacatggtgagcatcaaggccggtacggtgaagaagctcaacggtctgaacgacttccgcgagtccgtggtcgtcgcctaccgcgacggcaagtaccactggacctggtcgtgcgacgacgccaactccccgaactaccatgtgaggtacggcgtctccgattccatcgacggcaccatcacctacaagggtgtgctgctgcagaaggattcctccaagaacctgcaaggtgccgcgcaccagtccgacgtgcatgtgaccgacgcggacggcaacgaccgttggctcatggcctaccatcgccactacacgccgctcggcgtgttcacctccggccttggttaccaccgtgagaccgccatcgacgagatcaccttcgacgcggacggcctgatgcagaccattcacccgaccgacgaaggcgtgtccattgagatggccgatacgacggcgcttgatggcgcgattggagcggccgacaagctcggcaccgatggctctgcttacaccgaggccagctggaaggcattcgaggatgcgctcgccgcagccaagacggccaagcagaccttccttgactccggcctgtctcaggctgatgtcgatgccgccgccaaggccctgaccgacgcgcagaatgcgttggaggagagccagcccgagccagagcacccggccgcaggcacgatcctctccatcgccgtgaccgcgcagcccgccaaggccgagtacaaggtcggtgaagcgctcgacactgccggtctggtcgtcaccgcgaccgtggccgatggcaacggcggctccgccacccgcgagctcgccgccgatgagtacgagctgctcggcttcgactcctcgaaggcctccgacaagatgaccgtgaccgtgcagtctgtggccgattcgaccaagaccgccacgttcaccgtgaaggtcgttgccgacgagacgccgactccggatcccgatctggccactgaggaagagctcaagcagctcgaagatgccattgccaaggccgaagccgagaatctgaaccaggacgattacaccgccgattcgtggaaggcttacgccgatgcgctggcccaagcgaagaaggtgctcgccaaggagaacgccacctccaccgaggtccaggatgcgattcgtcacctgaccgaggcccgcaaggccctcgtgaaggtctccgctgatggcaagaagccgggtgccgtcatctccgacactggtgccgccgtcttcggcgtggctggtaccgtggtggtcctcgccgccgccggtatcgccctgaccatctggcgcaagcgccgtatctgacccctcatttgcaaaaaactctcactgacgttgagtcagtgagagttttttgcaataggggggtgttcctatgtttttgtcaactccttggggagttgacgtgtcgggattccggttggctgtcgtgggcgcgcttcgccctgccggtggcgtccggcgtcctttcccgtgtggcccggttcaggctacgagggctggttcctggtagagggttccgtttttgagcatgctgtagatcacgtcgcagcgccgacgcgcgaggcagatgatggcggcgttgtggtgtttgccctgttcgcgtttgcgcttgtaataggccacggagggcgggtgtttggtggatgcgacgaacgcggtctgccacagcgcgttcttgaggcgtttgttgccccgcctggagggccgttcgcctttgatgctggtgccggattggccggtgacgggcgatatgcccgcgtaggcggccagatgggcggacgatttgaagttggcgatgtcgccgccgatgccgagcaggatgttgcttgcggtcctgacgcctatcccgggcatcgacgtcaggaccgtgagaagagggtggtcctccaggagcttctcgacctggcggccgacctcgcgccgccggtccctgatcgtcttgatgtcgtgggcgatggaggggatgatggtctcggccatgagggtgccgggcacggtgacggtctgctcgccgatcgccttgaacatgtcgtcgatgatgcggccggcgcgaagcccgttggacttggcccagtccttcacgtcctcgatcccggcccgtttcacgcccatgggcccgccgtatcgttcgagcagcgcgagcgtcgcgtcgcgcgtgattctctcgcccttgagcgcgcgttcgaacgcggggtgggtctgcagcagcaggctccgcaggcggttgacgtggcgggtggattcgtgggcgaggtcctcgtcgtggccggcgagcagcttcagggcggcgagggtctcgtcatccgggcccgcgtccctgagcgtctcgggcagcttgagcgcggcccacgcgatcacactatgattgcaacgccaccagcgccgacgaggccaacaacggcgacatcgcctacagcatgcacctcgcgttgcagaacgctgacggttcgtacaccccgtacaacgagaattacggtatcttcttcgcacgttcgccgaaggcgcagaatctcaacgagaacctcgacggcaatgattaccgcagtctcaaggatccgagcctgctccgcatggccgacggcacctatggcgtgatttccgtgcgtaccaaccgcggcaccgccaccggtgactccaccgcgaagtccagcgtgctcatcgccacctccgaagacctgctcacctatagcgaacaggagaactccggttccatcgtcgaccttggcgagaccaacggcgtcaacgctccgtacgccgtgtacgacaccgccagcaagcagtatgttgtcggctgggccgatgacaacggcgtggccaagtacaccacgttcgattcgctcaagggctccgcgtccaagcatggcagcgtactgtacggttccatcgccaagtccggcgtactcgatgccgacggcgtgcagggcatcgcgaacttccgctccggtgccaccatcgcggtggacgaggcgaccgtcaaggcgctcaacacccgttacggccgctctgagaacaccggcacgagcaatctcactgacatcaccgtcgagaaaggttcctcgattgatgagatgacctcgcagctgccgaagaacgtggacctcacttactccgacggttctaccggctccctgccgatttcctcatggaacactgagggtatagatttgacgaaggtgggtgattacactgtcaccggcaccgtcaagcagaccgaataccagattccgttcgccgaggaccgcgccgatccatcggtgtataagtggcagtggacgcatgaggtcgacggcaaggaagtcaccgaaaccaagttcctgatgatcgcttccaacgacatccaaggtgatgtcacttggcagcatggttcgccccacatgccgttccgcatggccgacacgatttccggtctcgccgacgagccgggcaacccgaatgccctgattcagtcgaacggctacaacaacaaggaggtgtcgctgctcaaggctggcgacaaggactccgagggtaatgccatcatgcacagcttctgggctccagaaattcatgagattgatggtaggctcacgattctgttcatggccggatacggcaacacatggtccaacggcaagtcggtgtacatgcagctcaagcaggatgccgacggtcatgacctcgacccgaccgaccccgataactggactgtgccgacaccgatctaccgcaatgacgcctcgctgctcaacggtaacaagcagctcgcagccaccgcgtccggcggagtgggcatgtcgctcgacatgacctatttccaggatgccgacggcaggtcctactacgcctggcagcagctcggcgccacctacatcgccacgatggatccgaaggacccggcccatgtgaccagctccccggtgcgcatcgtcaccccggagtatgcgtggaacgccgccatagccgaaggtccgaacgtgaccatgcgtgatggcaagctgtacctcatgttctccggttccggcgtaggcaagacctacaccaccggtttggccgtggctgatgccgccggctccgacctgaccgacccggccagctggacggcgctcaactacccgattcagaagtccggtccattcaatggcgagatgcagctcggcaccggtcacggcatgtggagcgaggacgaggacggcaaccagatctacgtgttccatgcttatgctacgaagaacctcggctccgtgaatgccaccggccgcgacatgttcgtacgccgcgtgcactgggctgccgacggtatgccggtgttcgacatgagctcttccgaggagctggcgaacaagatcgtttccgttacggtgcatgtggttgacgatgcggttgcggtcgataagtctggtttgtccaaggcgcttgcgtccgccaagcagctgcacgggtccgactacaccgccgcctcgtggaaggcgtttgccacgatgctgacctccgctgagaaggtctatgccgacgatactgctacgcagaaggacgtcgatgacacgaccgtcgcgttggttaaggcgcaggctgcgttagtgaagattgatggttccgattcaggcgatggctcgggcgattcgactaagccgagcgacggttcgagcgtcgatgcgggcgataagacgggcaacaatcttggtttgtccaagaccggtgcggctgtgcttagtcttagcggcgtagccgtggcgcttgctgtcgccggtatcgctctgactctccagcgcaagcgtcgcgcctgagtggccatcaagctcccccctctgacgggccgagccgtatagcgaacagcccagtgggctgttcgtaggcgagggtgagccgataggcgaaccgacaagctgcgggcaaagcccgtccttgattgcgggacgggctcccggcgaagccatgtggggaagagacttacgacctgtgaacaacattcgcgttctactgattgccttcccgaaaaggaatccacccctccaaaagtgaacgctcacactaaaattgtaagtacttacaactaaagatgcggccctgcagcgccccagtccctcaaaaacggtgtcgttcgagggggcagagcggtgcatggccgcatgagaacacagttcgcgctggcaaacggagcagcttcgtcagcgcgaaaaaggtgcggaacccggccgataaaggggcggtcgatcatcgcacgataacaatttgggcctttcgctgtttgtggtgggtggttgtggtgtggggtgatgccggcgggtgggttggaggcatggatacctcttgcctgttcaccgccgcattgcagttgcgggggccttggaaggtcgggtccgtggatttcagggacgcgggcgacggcgggcggggactgcacatcatgatcggcttcgagcccggcgtgcgcttccattgccccgagacgggctgccggggggggcgcctgtccggtgcatgacacgagggagcgcgtgtggcgacacctgaacttcttccagtacaaggcgttcatccacgccgccatgccccgcgtcacctgtcccgtgcacggggtgaggacggtgtccgcccccgtgggccaggcccggcagcgggttcacgctcctgttcgaggcgtgggccgtggagatggcccggcacctgccggtgagcacgctcgccgggcagttggacgagaccgacacccgcctgtggcggttcatctcgcattacgtggacgaggcgaggggactcgaggaccacacgggcgtggaggccatcggcgtcgacgggaccagccgcaagggccgcaactgcatcaccgtggtcgccggcctggtcgagcacgacgtgaccgacgtgaccccgggcagggactcgaccacggtcgaacggttcgccggggacttcatggaccacgacggggtgcctgggcgcgtgcggctcgtcacctgcggcatgagccgcgggttccagaaggacatccgcgagcacctgccccatgtcaggcggatcatcgacaagttccacgtggccaggcacgccaacgaggccgtcgacaaggtcaggaaggccgaggggcgggagaacgggctgttgaagaggacgaagtacctgtggctcgggaacgaggcggccctctccgacctgcggctggagaccaagcgcggcctcacgcggcagcggctgaagaccgcccgcgcgtgccggatgcgcgaggtcctgcagggcatctgcatggacagccgcccgccggggcatgggtcaggctataccgcctgtgctcgtggatgatacactcgaggctcgaacccgtgaaggaacccgcccgtctgatccgccgccgcttcgccgaggtcgtcgcgtacttcgagcacccgtacgccaacgccgtccttgagggtgccgacagcgtcgtccggaacgtgaagagacgggcccgcggcttccgtgacatggactacttcgccaccatggtctacctgacctgcggcaagctcgacctcaaagccgtcaccacctccccctcagtgagagttttttgcaaattggcccgtacccgcacctcgtcacagcttgtataatcacgattatactaatcgtgatacaataaatcgtgatgcgatagaaatacgccggcgtatggcataaaggaggcgggcagcatggcattcatcggacgagacgatgacctcaagcaactgcaggaatgtttcactgagcgtagggcacagcttgtgttcgtctacggccgcaggcgcgtgggaaaaacagagacgcttattcaactcgcaaaagacaaggaaaccttattcttcgcggcgcagaatgccactaaagatgaacagctggcatcgttctcccgtctcatgttcgaggcgggtgccccgggcaaggattatctgagtcaatatccttcttgggaaagggcgttaaccgagttaacccggctgccagagccgagcgatggcggccgcaggcttgtgatattcgatgagtttccttatctggtcaaatctgatccgtcattgccgtcagtgctacagaatctttgggaccacacgttgcgtcatgcaaatctgatgattgtgatttgcggcagtgccatgagcttcatcgaaaaggagctgttgggagaaaaatcgccgctatatggtcgtgcgaccggcatcctgaagatgctgccgatgccatattgggatgcagcgcaattcttccccaactatagtagcgaggataaggcgctggcctacgcaatactgggcggtatcccgcgttacctagaggaatttgacccagatgagaccatagacgcaaatgtcaagcggcatattctgagacgcattgctccgctatacagcgaggttgaatttttgttgcacgaagaactgcgggaaactgcgaaatataacagcgtgatacgggcgatcgcgctcggcgcaacttcgctgaatgagatcgcgacacacacgatgatggcaaacgcaacagtatcgtcgtatctcgccaatcttatggaactggggattgtggaacgtgagttcccagtcacggcgaagcctaaggagcgggcgaaaggttcgcgtgggctgtatcagctgagcgacaatttcttccgattctggtattcgtttgtctttccgtatcgttcggaattggagcggggcgatgtggaaggcgtatacgagcgtcatatcaagccggtattacatgattttgccggcaaaccgttcgagggtctgtgccgtgaatggatgtggcgtgagagtgctgctggacggttgcccttccgtgcgcgtgcggttggccgttggtgggatcgtcaggatgagatagacgtgatggccgttgacaatgcgtctgatgctgccattgtgggcgagtgcaaattccgcaatgcgccggtggaccgttccgtgctgaatctactgcgagaccgtgctgcgcgaaccggtatcggccagcgaacatacctgctgttttcgctcggcggtttcgatcaatcactggtcgacgatgctgcggcgtctcaatccgacgttcagctcgtcggcatcgatgagctgtttcatgaataaatcccatttgcgaatagctctcactgagtgctcatcagtgagagctattcgcaaatggagccttacttcttcgcctgagtgagctggtaggcggcgaagaggatggccagccagatcacgccggcgatgacggcgatgcggtagctggtggagaagcacatcagcaccacgaccagcgccaggaacgccagcaccacccacggggtcaccttggcaaacggcagtttgaagtgaatcgcgtccagtgcctcctggccgctcagaccggccagctcggaatcctcgggagcgccgcccgcggcgaccaccttacggaacttcatttcggtgagcatgatcatcgtccagttgatgatgccggcaatggtggcaatcgacatcaggtagttgaacgcgaactcaggccacacgaacaccacgaccacggcgatggcggtgatcgcggcggacgtcagcacgccggccactggcacgccgcgcgagttgagcttgcccaagtaagcgggcgcattgccctgcttggccagcgagtacaacatgcgggagttggcgtacaggccggagttgtagacgctcatcacagcggtcaggcacacgaagttcaaaataccggcagccgcgtgaatgcccacggaatcgaagatctgcacgaacgggctggacttgccatcgatggtgttccacggcactacggccatgatcacacccagagcgccgatgtagaacacgaggattcgccaaataatatcattggtggcgcgcggaatcgtggtcttcggatcctcggtttcgccggcggtgatgccgatgagctcggtgccgccgaagctgaacatcaccacaaccagtgccatcagcaggccggtccaggaaccgtcggaattctgccccatcaggccgttcgggaagaagccgttacccacggtgaaccagttcgcgaagcttgcgcgcacgccggatgcggtgggcaggacaaagatgatgacggccaggccgccgataatcatggcgatcacggccacaatcttgatgatggcgaaccagaactcgaactcaccgaatttagagacgcccagcaggttggcggcgcagatgatcaccaagaacacggccgccgacacccatgtcggaatcgccgggaaccagtagttcacaaacgaacccaccactgatagctccaccatcgagacgaggatgtagttgaaccagtagttccagccggaaataaagccggcgcgcttggaccagtagcgggtggcatagtagctgaacgcgcccgccttcggatcctcaacggacatttcagacagtgcacgcacaatcgcgaaaatcgcgaggccgccaaccaagtaggcgagcagaatcgagggtccggccagcgcgatggattcactggaaccatagaacaggccggttccgatggcgccgcccagcgcaatcagctggatgtggcggtttttcaatgacttgcgcagcgtggccggcaccggcacgtcgtcggtttcgcgcggcttcttaggcgcatcagtagtactcattgtgctcttctctcacatttcttgggtttggcgcacgcggggcttgccgtgatgcgcaacgttcgttattctatgccgccgtatcgtctcagaaatggtcaatcgtctatttgtgcgctattgcaagcgcgggcgtgggcgcggccggtgagcaggcgaagctatagcgagcgatgcttatgaaaccgcacgcttcactgagttcactgaattcactgtgctcactgcgtggcaggcatacacatggtgaagatggtgtgggacaccgattcgggagaggccgcgagatcggtggcgagccaatattgcaaaagcccaatgctgccggacacggcgaatcgcatacgcatctgcgcctcggctgggtaacccgccgaagattgcaactgttcgcctacaccgcgctggctgtaaatcaatcccagcagctgctgctggaaaccgatatccgctttcgggctcatcagcacttggagatgattgcgattgtcggcaatgtactggcagatgcgctcaataacatgctcgatgccggcaggatctggctgggcgagtagctgttcgagtgcggtggtgacccaggccatggtttcgtcttcaatgtcgtgcagcagttcctcgatgctcgcataatgcgcgtaaaacgtggaacgattcacatcggcccgctcgcacaacgctttaacggtgatggagccgagcggctgatctcgcagcaactcgataagcgcgtcctgcatggcacgtctcgtgtagcgggtgcggcggctttccgtcaattctttggccatggccttctccccaagttccgacaacccacaatccaactgttggttgcagaaccgacacagtgttgttttacttgagtatagcaggaagttctggcggggcctatggggctaggtggctgccacgagcgcgttggaggtgtgcgatggcgtatatcgaattcgaccatgtggtcaaggaatatccttctggcagcagtgtgattcgcgcgctcgacgaggccagcttcaccgccgaacaaggcgaattaagcgtgattctggggcagtccggtgccggcaaaaccacggcattgaacattctgggcggcatggataccgccacaaccggccgcgtagtggtcggcggacgcgatattacgggtctgcggaaaaaggaactggtgacctaccggcgcaacgatatcggcttcgtcttccagttctacaatctggtgcctaaccttaccgcgctcgaaaacgtggagctcgcctcgcaaatctgccctgaccatttcgatccagaggaaacgctgcgcaaagtcggactgggggagaggatggacaacttccccgcgcaactgtccggcggcgaacaacagcgtgtatccatcgcccgcgcgattgccaaaaagccgaagctgttgttgtgcgatgagccgaccggtgcgctcgattacgagaccggcaaggaagtgctgcagttgctgcaggatatttgccaaacacaaggcatgaccgtaatgatcatcacgcataattccgcgcttgcaccgatggctcacaaagtgattcgcttccgctccggcaaggtgaccagcgaggaggtcaacgcaacgccgcggcccatcgccgatatcgaatggtaggtgattggcgatgctcactgcaagacactctgtgaaacgccccgtgaaacaagcgaggcgattcgtgaaacaacctgtgaaacattctgtgaaacggcggaacctcgacgatagcggcggtcgaggagcgggcgtttctgcggtatttgccaaagatacgttgcgttgctggctgcgcagctggaagaggttcgtctcgatcgccgtcatcacgctgcttggcgtggccgtgctgaccggcatctacgccggatgccgcgatgcttttctggcggccggtcgtttttacgatcagcagggactgcatgacctgcaggtgctatccacatacggcctgaccgatgatgatgcaacggcactgcgccgaatcgacggtgtgcaaaccgtgcagcccgaacgttctcagacggtgaccacgttggtggacggcaccaagaaaaccgtgaccatgcaggaaatcggtaccgaagggcttgatcagccgtacatacggcagggcaaactgccgaacaaggccggcgaagtggcggttacgcagcaattcctgaacgatagcggactcaagattggcggcaccattactgtgacgccacaagacacctcttcatccgtcatatcggtagcggccacggagactgacgattccaataatgccgatacggtaggtgtcgccgccaatgcctcggcatccgatgcgaagtccgacgccaatacggacgccgacgccgagcaatccccgcagttccccacgaaactcaccatcaccggcgtcgtactcgacccgcgcgacctcaacaatccagacggctattcgggcatgacctccttccggtccacctcatccgaggactatgcgttctttgcacccagcgacggcgtgaccggcaatatatacactgcgatatcggttgccgtcactggtgcgtccgattttgacacgttttccgatgcctacgatgaagccatcaaaaccgtggccgaccgtatcgaacatcagatacaggccacacgccagaaagcccgtcgtcaacagatcgtctccagcgcgcagcgcaaactggatgatgccaaagacgaggccaacgagcagctggacgaagcccagaagcagatcgatgacaactgggccgagctggaagccaacaaaacgacattgcaagatagccgtaccgaattggagaacaacaggacaaccattaccgatggcgaacggcagctcgccgatggacgtgcgcagattgcatcggcccgtcaacagatcgcgcaaggtcgccagcggatagccgaagcgcgcacccagctcgaatcgggcaaagcgcagctcgcctcggctcgcaaacagctcgatgcggcgcaaacggaactgactgccaatcgcacgaaaatcgaacagggcattacccaaatcgaccaaggcgtggcacaaattgatcagatgctgtccatgattcaacaggccgacaatctactggcgcaacttgacccgaatatcgacttcaactcacccacatggcaggccatcaagcaactgctcgcgcgccttggcattaccctgcctgaagtgccgtcaatcagtgagctgcggcaacagctggccgccaagcaaacggaactgcaaacgcagcgagacagtctgacccagcagaaagccgatttgcagcgcacattaaacgaaaccattgcccccgcacaatccaccttggaccagcagaacgcgcaactgaccgccaaggaacaggaagcggctgcaggagaggcacagctcaataccaaatccgcggaactcgaagcgaatgccgcaaccctcgaaacccagtcggcgcaacttgaagcgcaggccgcccaactggccagcggcaagcagcggctcgaggaaggcgagcggcagctggaagaaggcgaacaacagctcgcggacggcaaggcgaaactggatgatgcgcagtctgaactcgatgcgaagcgaagcgaagcggaaagcgaattcgccaagcagcaacggcgcatcgacgatgtggccaacgcacgttggtatgtgcagacgcgcgcttcgatcgacggattcagctcgctcaaatcagacgtcagttccatcgaatccatcggccgcgcattcccgattgtgttcctgctggtcgccgtgctcatgagcctgaccaccatgacccgcatggtcgaggaagaccgcggacttatcggcacctaccttggactcggctatggcggactcgccgtgtccagccggtatctgctgttcgcgttgctcgcctgcttggtcggcggcggcatcggtctgctggtcggattccttggcatcccggcattcctgctggtggtgattgagggactgtatatattgcccggtgtgcgactcgaatacgactggctgtacggttcggccggcatcgtgctgttcgtggtcggcgtgggcgtggccaccgcgctcgcctgtcgcgaggagatacggcacacgcccgccgcgctgatgcggccgaaggcaccgaaagcgggcgctcgcatattgctggagcggattcgcccggtatggagccggctgaacttcctcggcaaagtcaccgcgcgcaatatcttccgattcaagtcgcgcttgattatgaccgtgggcggcgtggccggttgcacagcgttgattatctgcggatttgcgattaatgacaccgtcgacacgattggcgtcaaacaatacgagcagatctaccagtacgacctgatggtcgtggccaatgacgatgacgccaccgcgatgcgcaagcaggtggcacaagatggccaaaccaccgaaacgctgaatctgcgcgtggatagtggcgagatgagcaatgcggcgcaggaaagcgaaaccgtgcagctgatgaccgtgcccaacgattcgctgaatatcttgaacgatatggtcacgctggaacaagctggcgatgatggatggtttgggctgcccaatatcttcggcaaagcgggtggcggcactgtagcgttggacgatagtggcgtgattgtgtcgcagtccgccgccaactcgctgaatattcatgccggcgacaccgtcacgctgggcaatggcggcagcagccgggccaaggtgcaggtcgcggccgtgacgcgcaatcttgttggctctgatgtgtacatcagtgagcgactgtacgaccagaagtttgcggccggcggtgtgacgtcttcggcttcgggagatggcactgcctcgaccttgacgtggaacgcgatgctcgccaagctgaaaggttccgagaccgaacaggccgaatatgcggatcggttgggcgaggaatcgtcggtgctcaaggccgtgagctgtgcgcatctggccgccacgtttaagttcgatttgatgggtgccgtggtggcgctgattgtggggctcgccggcggcctggcgctggtggtgctgtttacgttggccaatacgaacgtgtccgaacgcatccgcgagatggccacactgaaggtgctgggcttctatgaccgcgaggtgcacaactacgtgaaccgcgagatgatgatattgaccggtatgggtgtggtggttggtctgccgcttggcaggtggataggcggattactgactgctgcgttgaatatgccgtcgctgtatttcgaagtggaagtgcactggtacagctatgcgattgccgtggtggcgacgctggcgttcgcgctgctggtgcagctgttcaccaacccagtgctcgatcgcgtagacccggtcagctcgctcaagtccgtggaatagagacaaaagttcaatttggtgttggtaaattgaacttcttggctgaatatttacagtatcatcgcatgtattcttgagctgagcggttttcgcgacatatttcggtgatacagtctgaacttgttttgaacgagtatcgcgtccggtacgtaacaatcgggcggcggagaagagaaatgaaatcagtatggccgatacgaatgtgaatggtggtacacggcaggctacgggcagactcaagtctgtcgaaagcctggaccggaccaacgagatggagcgcggcctgaacaaccgccacgtgcagttcatcgccatcggcggcaccatcggcaccggattgttcctggggtccggcaagtcgctggcactgaccggcccctcgatcgtcttcgtgtatatcctggtcggcgtcatcatgttcttcctgatgcgcgccatcggcgagatgatgtaccgcgaccccagccagcacaccttcatcaatttcatcacccgctacctgggcaacggatgggggcatttcgccggctggacgtattgggccgcgctcgtgctgttgggcatgaccgagatcacggccgtctccacgtacttcatcaccttcttcgacacgttcggcatcgacctgacccattggaaatggctgatcgaactgtgtttcctggtgtcgctggtgtccgtcaacctgatcgccgtcaaggtgttcggcgaggtggaattctggttctcgatgatcaagatcacgctgatttgcgcgatgatcgtcaccgccgtggtcatgatcgtgatcggctaccattacccggccgcgcggattcatggcgtggatcatgtgagtccggcgggccacgccggactcgacaacctgttcgccggcttctcgttcgccccgaacggctggatggccttcctcatgagcttccagatggtgttcttcgcctatgagctgctcgagttcgtgggcgtcaccgtctccgagaccaagaatcctcgtgaggtgctgcccaaagccgtcaacgagatcatcgtgcgtgtgctcatcttctacgtgggcgcgctcgtggccatcatgtgcatcgtgccgtggacctcgttcaagccgaacgaggacggctccttcgcctccccgttcatcatggtgttccagtatgccgggttgaactgggcgtccgccctggtgttcttcgtggtgatcaccgccgcgtcctcgtcgctcaattcgctgttgtattccgccggccgccacctgtaccagctgtccgaggtgtcgccgaacccgatgctgaacaagctcggcaaggtgtccgaccgcaaggtgccggcccgcgccatcttggtgtccgcggcgctgatcctgctgtcgccgatcgtcaacgccatccccggcatctcgggggcgttcgtgctgttctcgtccgccagctccgcggtgttcctgttcatctacatcctgacgctgctggcgcatcgcaggtatcgccgttccgccgatttcatcgcggacgggttcgtcatgcccgcgtggaaggtgctcaatacggtggcaatcgtgttcttcgtgttcatctacctgacgttgttccttgcggacgatacgcgcaattccgcgattgccggcctggtgtggcttgtgggcttcggtggattctctatgctgcgcgaacgctaccgtagccgcgatttgaaggccgcactggaacacaaggagtgattggacgggctgattggctggcggctattagttgggtggctgttggctgttggcggctgactggctagcggccgatagccaatgactgggctgatcgtcagccaatcggctgcctataggtctcattgatacattcggtcatccgattagtgcatttgcgcggacaattagtgcattcgatcatcggattagtacatcagtgtgcaattattagtacaattagccgcctaattagtacattaggacataaaacaatgtcctaatgtactaattagatgctaaaatacgataagtgccatgtcctaatgtatgaattatcgctatgaagggcggaatgcgatgacgcaggatgaacttatgcaagtgctgcaggccggtgaatcatctatggtcgagttcaagcgctgcagcgaattgcctcatacggatacttttgagactgtatgctcattcgccaatcgttctggtggcagcatttatcttggcgttgacgatgacggtcaagtgctcggcgtcgattctaagcgcgttagtgagatagagcgcaacgttgtcagcgtagtgtctaatcgtaagatgttcgaaccggctccaatggtggaaacggaacatatcgagtacgacgaacggattattgttcgtatttgggtagctccgagttcttcggttgtgcggttcaagggcgcagtgtttgatcgcattgctgatgtggatacacacatcgaaagcgatatccagattagtcaaatgtatattcgcaagcagaactactattccgaacggcgaattttccgttacgtgactccgtttgatttgcgtcctgagctgattgcgcgaatgcggcagctggcggtcgctcagcgagctgggcacccttggggaactatgtctgacgaagaactgttccgcagcgccaagctatacgatcgtgattacacgaccggcgaagagggctttaatcttgctgcagtgctgctcttgggcaaggatgaagtcatttcctcggtttgcccagcgtatattactgatgccgtggttcggcgagacaatattgaccgatacgatgaccgacttatggtgcggaccaacttgttcgattcgtacgagcaactccgtgaatttactgagcggaatctgcctgaccgctttgtgttaaagggcgataagcgagtgagcccgcgtacgatgatcgcccgtgaattggtggcaaacagcctcatgcatcgggagtattccagtccggtggtggcgcgtgtcaccattgataatgaatccatccggacggttaatgcttcgcgctcattctttgaaggtcgaatgaagctgggcgagttcacgccaatgccaaagaatccgattatcgctaatgtgtttgtgcagaccggcatagccgagcagctgggtagcggactgcggaatctgataagagcgtcccggcaatatactgagcgagagcctgagttccgcgatggtgacatattcgaggcgacgattcctattgttcctgcgctgaagaccgtgggtggttctggttttgctagcgtgagatctgtagttgagaaagatgccgaagagggtgcgaggctcattggcggggaacgtgtggatggtaagaaagcagatgcaaccgcatcgggtgaaattgattcgcgggcagcgatgctgtcggcgatgaatcgacgcttgacagaggttgactatgtgactgtacctgaactcgccaagataacagagctcgataacagaacagtccgcaaattcctaaacggtttagttgcgcaaggaaagctgattgctgaaggcaacacgcgtggtcggcgttatcggaagggatagcgggcgcgatatctcgatgcagtgggattcacttaagggctacggcaaatatgattcgtagcgattgggccagcgcaattcgaatggctcatgactttgtgcgtcgtttgtggtctctgaagttgtttgctgggtgacggttttgtgataaaatcgctcatatcaaaatgtttgcgtaaacattttggctgcgccgaaagaaggagtcgacgtaggtcatgtatcaggcaaagaggccggcgcagtgaagcaaaggccgatttttccggtataaggcggatagcaggaacactaaggagaccaatgaaggtactgagcaaatcgcttgctgcaatggttgcggcggcaacactagtgggaggaggggcgtttgcggttgccggcactgcgtatgcggctgataacgatgccattaccgtgaccccgaatccgtggtatgccaacagtttcgatggctggggcacctcgctggcttggttcgccaacgccaccggcagcctcggcgaggaatcggccatcaccacaaatctcggcgatgacgcttccaaggctaaggctgtggaatacggcaaacagctgcgcgaacagttctaccagtccatcttcggtgatgaaggactggacctgaacatggcccgctacaacgtgggcggcggcaatgcctccgatgttgcctacggctacccattcatgcgccaaggcgctgccgtgcctggcacgtggaaagatgacgccaccggctccggcacgtatggcaatggcgtaaccaccaagcaggccgacaaagacaagctggctgcggcattcgacccgactgacgacaaccagtatgacttctccaagtccgccgcccaagactggtggattgagcgcggtgccaccggcgataaccctgacatcaccgacgtagaggccttcgccaactccgctccgtggttcctgaccaacagcggttacgccactggtggacgcaactccggtagcaataatcttgcaaaccctgagaaattcgctcagtacatggccaagaacgtcgagcacctcgaaagccttggcgcaaacgttgacacggtcgagccgttcaacgagtccgagaccagttactggggcactccgggcgacatggcttcgaagtacaccgatgagagcgatgacaacaccaagctcattaacaactactgggataagtactactccgacaaagataagtccgtcaccccatactccaacgcgctgaagaagccgcaggagggtatgcatgtcagcaacgcccagcagcagcagacgattaccgcactcgctgaggcgctcaaggacaatgatgacaccatcatcgcagccaccgatgccacgaactccgccgacttcgtcaagtcgtacaaccagtacccgcaggcgatcaaggaccttatcggccagtacaacgttcacgcctactccgacagcaaccagatgcagtcgcgcgatatcgctcaggcagacggcaagaagctgtcgatgagcgaggtggacggctcctggcagtctggctcctacaacccgtacggtttcgacaacgcgctgggcatgatgagcaagatcagctccaatgtcacccgcctgcagtccaaggacttcaccttctggcaggtggtcgaggacctctacaacatgcagatgggctcgaatgtgaatccggccggtgagaacaccaactggggcaccgtgctcatcgacttcgactgcaccgtggctggcatggacggcaagctctactccgagcgccgcgtgaacaacaacggcggtaccaccgatggacttgaaccgtgcacggttattgcaaacgccaagtacaacggcgtcaaggccatcacccacttcatccacgcgggcgacaaggtcatcgccaacaacgatgaagacaacaacatgactgccacctccgacgatggcaagacacagaccgtcatccaccgcaactccggcacctctgaccagaccttcgtcatcgacctgtcgaagtacggcgagattgccgacaacgcttacggtgagctctacctgaccaccgaaacctctgccgaagacaagaacgcgggtgtcgattccgccactccggaagtcttcgccaagaccagcaacgtcaagcaagctgaaggctctgtgatgattgacaaggctgccaagaccgctacggtcactgtgcccgcccgttctatcgcctccatccagctcactggcgtgaccggttacgccaaggatgctgccgtcgagaccggcgacacttaccagctcgttggtaagcagtccggcaaggccgtggctgataccacttctggtgattccgcgctgtccctggccaacgtcgcttccgatgccgagaacgccaagaagcagacttggacctttacccagatcgagcagcccgccgactccgagcgccctgatctcaaggcttatgtgattactaacgccgaaggcaaggtgctggtgtccaaggatggcacgaacgcgctttccaacgaaacggttgaggccgctaagtccgacccggctgccaagtggattctcaacacttccgatggttcgacctaccagctgctcaatgccgcgactaagacgaacctcgatgtggataactctggtaccacagtcggcacgaaggttggcttgtggcagtcaccgagcggcacttcgccgtccgccaaccagacatggactctacgcaatgtaacgccgaccagccagaagaccgtgaacgtgcagaccgccgttaacgagaaggccgcgctgccgaccgaagtcacgctctactacacctggggcgaaggcaaggccacggttgccaactgggatacttccaaggtcgatgtggccaaggaaggcacctacgaagccaccgctaccgccaccgatgtgtacggcaacgagttcaatgtcgccgctacggtctacgttggcgcgctcaccgtttccgatccggtatcggctacagtgctggccggcaccagtgcgagcgaggcgaaggccgcgcttgaggctgcgccggtgtatctgcacgtcaaggcatcgcctgcattcgagggcgatgcggctaaggttacgtggaacttcgatgggcttgataccaagctcgccgatgccaaggctggcgacaacattgccgtgaccggtacttaccagctggacgacgcgaccacgattgcgctgaagggcacgatctatgtcaccgccgccacgcctgagaatgtggccgacactgcttccagcctgaccgtgaccaaccagcagacggaatacagcaagggcgatcagtggaagaagctcaccgatggtgacacgtcagctgaagcctgggtgacgtggaactctgctggtgactattccgccagcccgaccgccacgattgacttcggctctgagtgtgagcttagcagcgtgaccattacgtatggtgacaaggctccggcttccgccaaggccgagtacaccactgatggcgagacgtggatgcaattcggtagcgatgttaagcctgccgcaggccagacggtgacgttcaaggccgataagggcacagtgaatgccacgaaggtgcgcattgtgaacaccgtgaacaacgactacatgaacgccaccgaaattcaggcattcgtgacgccggttcagggtgctgcgaagaacatcgccgcggcctctggcacgaacttctcggtgaacttccaggagggtgcctccgcttccaaggccatcgatggtgacactacgtcaaagggttggtccacttgggcttccaccgcctcgacggtggacccggtcgccacgttcaccttcgacgaagctcagaccatcaccgaagtgaagaccttcttctactacgatggtcgtgcgtcttggccgaagagccagacgctggaataccaggatgaggctggcggatggcatggagtcggtaccaaggatggctggaagatacaggccggcgatgccggctctggctccgacggcatcaccgccgccgacaccccgaccgttgacttcgtgctcggcaccccggtaaaggccaaggccatccgcctgactaacacattgcaggacaccaaggtgtacatcaacgtggctgagatccaggtgttcgcacaagacagcacggtactcaccccgcagccagcatccgatgccacgctgggcgacctgcgtcttgacggcgaaaccgttgaaggcttcgacccggccaagaccgactacacggttgatctgccggtcgacgccgaggcaaacccggtgctgcaggccttcgccaccgacaatgccgccgccgtcaaggtgactggcgacgcggttgagaacggcaagcttggcggcaaggccgccattacggtgacctcagccgacgagtctgagacgaagacctacacggtgaccttcaacgccttcactttggcttcgctcaaggtgatcggacccacgaagaccgagtacgccatcggcgacaagctcgataccgccggtctgaaggtgactgccgtctaccagagtggcgacaagaccaaggaagtgccggtcgctcttgacgacccgcagcttgcgattggctcgttcgactccaccaccgcaggcaagaaggcgattaccgtctcctaccgtggtgtgaccgcgaccttcaacgtcacggtcaaggccaacgcagtcgcccctggccctgaagaacagaagcccggcaacaccaacaagcccggtgccaccggtaacggcaacaagaacacggtggccaacaccggttccagtgttgccgccatcgctggcgctgtcgctctgctggccgctgccgcgggtgcactgttcatgctgcgcaagcgtgcatagcaccctcgcgcagtaatgggtgaaggaacaagccggcaatattgactattgccggccggttcctccgctctttgaccataattggtccgacaagttgaatactgagttttcagtatcggtatattgatttgtcgaaccttttctggcttcgcggatagcgatataactgtttgttcaaaaaaccgttatcatcaatcaaggaaccaaatcaatgaagataaacaataagggcaagggcgctcttatcgcggcaattaccgccgcggcaacgctattgtcatgcgggctggccgctgcaagtgccagtgcggcaggtgtggattacctgcctaccatcggccaagtgccgacatacaccaagttccagcccacagccgatccgggcaagaacgctagcgattacttccagccatattggtatgccaagaacgccaatgataatggcggcacacacatccaagcgcacggtggccaagtggtcaaggttggcgacgcctactactggtatggcgaagaccgttctaacggttacgacaacagccccggtgttcatgcttatatgtcgacagatctatacaactggaccgatcttggtgtggcgctgcgtgcggtgaccagcaaatctcagttgacggataagagcaatgccgattacgcctacttcgacaaggcctacaacctgaccaagtccgacggcagtgtggacgctgccaaggccgacgcaatcttcccgtacctcaacaccaaccccgatcaggatggtgatggcgcggttgattccgtacagggcattttcgagcgtccgaagatcatctacaacaagaagaacaagcaatacgtgctgtggtggcattccgatggaagcaccacgccgggcggttccaactatgcacgtgcacttgcgggcgtggctgtttccgacaatccggcgggcccgttcactatggtgggtgcctatcgtttgcctaaccagaacaattggaaagaagccgcaggtaaccccagctggggtgagaacggtgacagccgcgatatgactgtgttcgtggacccgaaggacgacagtgcctatgtactgtattcttccgaagccaatgccacgctgtacatcgccaagctcaacgatgattacaccaatgtagtcaagaccacgaatgtggaccagtccgagggacaaaagcagtactctgctgacgggcagtacccatacattcttgcagacgctactacggatgccccggtgcgtggcgaagatttccaaatcgtcaaacaaaatggttcgctggaagctcctgccgtattccaatatgacgggcgttacaacatcatcgcatctggtgcaaccggctgggccccgaacaagcagacctactacaccgccgactccatgctgggaagctggacccgtggcgtggaaaaggacgatgtcaacgagaacacgtggtacaacaacatgccggaaggcgcggatggtctgttgtccgtgggcgatacccgcggcaccacattcggttcgcagtcggctagtgtgctcgcagtagaccaggagaaaggtcacttcatctaccttggtgaccgttgggattccggtaaagccgattccacctatgtttggctgccgctgaccatcggtgagaacggcaccatcgaaatgcacaatcctgctcaagaaggcgagcccgacggttgggatctgagctattggggcaaccatggtagcgccaagggcaagctggtcaactggactgtggaaaccggcgatgatctcccgaagaccgtgaacacgggcggaaccgttactctgccggacaccgtcaacgtcaaggaaggcgacgataccattgctaccaaggtgacatggaatgtggaaggcggtacggcagtcagcaagtcgaccaaggctgctggtaatacctacgcattcaatgtgccgggaacctacaccattacgggcactcttgccgagagcagtaacttcaatccgggccgtacattccgtagaaccatcgatgtttcctgctccaacccgatttccggaagttggaaggaagctcattggaagggcggcagcgcgtgccaggtttctgcgtccggcggtgcttatgacttcacgattacggacaacgccaatcgtggcgtctggacggatcgcaacgagggcagtgcggtgtaccagcctgatgccctggacgtgaacgaaacgctggaaaccacggtcaagccgctcgacttgggcggtaatggcgatccgcgcgccggtctggtggtccgtaacggtcttactggcgctaacggcggcaagggatatgccacgttacttgccagcccaagcggcgtttacatgcagtacgattccaatgccgatggctacatcgataaggaaacatcgcatgttggtaccggcttcggcgaccaagtgcagctcaagctggagcgcacctcaaccgatactctgaaaggctactggcgcgcttccgcgaacgatgaatggcaggatgtcgctacggtaacgctgaccggtgcggacgtaaccgggctcgatgccggtgctttcgccacgtcgaacagcaatgccggcgcattcaccgtggccttcaacggcactgcgttcggttcgcagactgctgctgtggagtccatcgcagccaagggccctgaagccactatcgccaagaggcagacgctcgcgcataaggacgtgacggttaccgctacgctcaccaatggcaagacgcgtgtactggagccagatgaatacacgttggaaggcttcgacaccaccaaattgggcgagcaaaccgtgacggtacgccttgtcactgattcttcagtaactgccacgctcaccgtgactgtggaaagcaaccttgcccggttgttctgctcgtccgccgcagcctcgaagtatgagccggccagcagctgggcctccgcttctacggccgacctgacttgcgacaacaatctgagcaccaactggtcgaactggggcaccggcgacacctcgccgtggctcagctacaccttcgataaggcatatcagctgggcaagctcagcgttgcggtggataaggccaagggcgaggccgctccgaagagcttcactgtatcgtacctagctgaagacaacgccacgtggactgatgccacgctgccggcagtcactgtgaatggtgctgctggagccgtgacggaagccgatgtgagcgctctgcccgccaccaagggcattcgcctcaacttcacctacgccgatggcaatgactatgccaagatcgctgaagtacgcatcgccgaaggcgaagcaacgccaaagccgcagccgtctagtaacgccaatcttgctgatctgactgtggatggcaagacggttgacggattctccgcggatatcaccgaatatgccggtgcgctggccggagacgctgcttcttacccgacggtggaggcgactgctgctgacgcgaaggctacggtgcaggtggagcaggcttcgaccgagaacagcggcgtggccacggtgactgtaactgctgaggatggcacggcggaaacctacacagtgacattcggcgaactgcctcagttggccgagcttgctgtggaagtgaccaaggattcctatcaggtaggcgataagttcaacgctgccgatgtgaaggtatccgccatttacaaagtcggcgataccgaaacgctgcgcaagctgattgatccaactgatggtgatctgaagttcactggctttgattctgccaccgcaggcacgaagaccatcaccgtctcttatcgtggcatgaacgcgacgttcgaagtcacggtcgcggccacggaggtcactcccggccctggagagcagaagcccggcgataccaacaatcctggcaacactgctaagcccggtaacactgccacgaataagccggctgctaatggcgctgcgcccctttcgaatacgggtgttgccgtggctgccattgcggtcgtggttgtggtgctgacagctgcggctggtgccttgctcgtcatccgcaaacgccgcgcataaccatggcaactgctgagtggcgtggattgcgttgctattgagcaatctgcgattcacgccactcagcgagtgcacccgagtgcgcccgagcttgcgcaatgcaggcgcaatacagtgcaaacagtacaaagcaacaataatggccggtctgagccagctgctccatgcgagggcagctggctcagaccggccattgtgtctgcaagtacatgcaattagagcatgaacatgtggaagccgttgagcgttactggttgttttgctttgttgttgcgctcagcagtgcgacggatgtccgtccgcagtgtagtgcagcgctccgtgaaccagcgccgatgtgaaatgcatgttgcacatgcccgcttcttctgcttcgtgcgtgcagccggcgatgctgcataggttcataccccgaatcatggtcataccccctctttgggatggcatccgtgccgccatctgccttcagagcatagcggacaattgttgcattgcctaggcggtacaacgctttctgtggcctgtatcacatccttgccggcgttctgcggcgtggttgggcgtgtacatgtgctcttgtgcggttttgttgtgtgtgatttgggtatacggatagagtttcttctctgcagtggcaagggcctctcggccggcgagccggctgatttctcccatgcgttgctcaatgatttccgttttgcgagtctgaacggcaaaatagctctggagaagtgccacttcttctttctttggatcaccgttttgagcaatgagatagcaggcgtatcgggtgagcttgacgtccgcgatggagcgggtggcgccgctgccgagagtcacgtctcgcgtagtgtcacggaaatgggattcaacggatacgccggaattgtcgcaagcttgcttggctcgtgtaatagctttgctgaagttttcccatctgtcgtaccccatataggtcattagctcgcgtgcataccaatactcaactttggagtcctcggtggtgtgtgcgatagtgctgagttcgctggttttgcgtgtgatttcgtcgcggttcatgggtgtgtccttatgtttttcatgaccattttcgtgactccacgaaaatggtcaaagccaataattgcaatggttttgaggtatgggcgcgctccgcccaactggcctgtcttcgtccgccttttcgaccagatacctcatggagcacaatgccaacgtcgctaccgttggcccagcaaatattcttagacgacgccccgaagtgaatatctatgcggctttcagaatatcaaagagcgtggagtgtgtgcattatgcgttccaaaaatagtttctagtaatgaattgtttacggtgtgagatattcttggggtgtttgcggcgctctgccgtgtggcgaatgggaatggatggtgctcttatgggatttgagcaggaagcagttagtgaactgtatgccagcgtgtggggcaatcgttcgacgatgcagagggaattcactcgtggagcccatggtgagcagttcgtgctccgggagctgtccatgaaggggacgcaaacgccgtcgcaattggcatcggcgctgcaggccagttccggccgcatctccactgtgctgtcgtctctggagaaaaaaggctgggtcacgcgtgacattgattccaaggatcggcgcattattcgcgtgaatctcactgattccgggcgcgagcagtctcatcggatgatagaggaaatgcgttccgcaatttgctggattttctcgcaaatgggggagcggcgcacgtgcgaattcgttgacctggtgtctgagttcaccacatatatgtcgatttgccatccggggcggcctcggccgacggctgaacaagtgcgtgaggcattcgtggagcgggacaagcgcgtggctgaacacatggcagctaagcgcgcggaggctgagcgagactagcttcctcccgctggcgggtctctccctccgtcactgctgcgcggtgacgcctccctcgtcagagggaggtaaaggtgattgaggacgctcacagcgaacatacagaagtgcgtataatatctcacagtgtaagtaatcaaacaatggaaactattaagacatcgtgaaccgataatcaccgataacccagccaacttaagaaccaatcgccaataaccaataaccaacccaaccaacacaaggggaaaccaatgtttcgcatcatgaaatacctctccaaagcggagatcggtcagatgctcatcgccctggtgaccatcgtcgggcaggtctacttcgacctgaaactgcccgactatatgtcagacatcaccacgctggtcgagacgccgggcagcgacatgaaggacatctggatcgcgggcggcaagatgctgctcatctcgctcggatccgtggcgtgtgccatcatcaccggctacatcgctgcgcgcgtggccgcctcgttcacccagcgtctgcgctcgctcgaattccgcaaggtcgagtccttcggcccggccgagatgagcaagttctccaccgccagcctcatcacccgttccaccaacgacgtcacgcaggtgcagatgttcatcaccatgggcctgcagctcatcgtcaagtcgccgatcatggccgtatgggccgtgtgcaagatcgccggcgaaggcttcgaatggacgctcgccaccggcatcgccgtggcggtcctgctggtgtccatcaccgtcatgatggccatggtcatgccgaagttcaaggtcatgcagaccctgaccgacaacatcaacctcgtggcccgcgagaacctcaccggcctgcgcgtggtgcgcgcctacaatgccgaggactaccaggaagccaaattcaccaaggccaacaaggacctcaccgagacccagctgttcaccaaccgcgtcatggcgttcatgatgccgttgatgaacaccgtcctgaacggcctgatgctcgccgtctactggatcggcgcttacctcatcgacgccgccgggctcaaggacaagctcaccgtgttctccaacatggtcgtgttctccaactactccgtgcaggtcatcatgagcttcctgctcatgagcatggtgttcgtgctctggccgcgcgccgacgtgtccgcgcagcgcatcatggaggtgctcgacactgagccaatcgtcgagaacggcaccaaaaccgccgccgacgtggccaaaaccggccagaggggcaccgtggaattccgcaacgtcagcttcacctacccggattcgcgcgaggcgatgctggaaggcatcaacttcaccgccgagcagggccagacggtggcgttcatcggctccaccggctccggcaagtcgtcccttatcaatctcgtgccgcgcttctatgacaccagccaaggccaggtgttggtcgacggcgtggacgtgcgcgactacgacctgaaggccctgcgcgacaagatcggctacgtgccgcagcagtccgtgctgttcaagggcaccgtggcctccaacgtgagctacggcgatcagccgggcggcccggcggaggtcgagatggccgatacctccaccccggccgggcgcaagcgcgaggccgcgttgatcgccgctggcgaggccgcggaaggtgccgatataccggccgagcagctgaatcgcgtcaaggccgccgccgacgtggcgcaggccagcgagttcgtggcgcgcatggacggcgggtattccgccgcgatcgcccaaggcggatcgaacgtgtccggcggccagaagcagcgcctgtcgattgcgcgcgcggtgtaccgtcacccggaaatcctgattttcgacgactcgttctccgcgctcgacttcaagaccgaccgcgaagtgcgcgacgcgctcgtccgcgaggccaaggattccaccaagctcatcgtggcccagcgcatcggcaccatcatgaacgccgaccgcatcgtcgtgctcgacgacggcaaggtcgtgggtcagggcacgcacaaggaactgctcgacaactgcgacgtataccgccagatcgccgaatcccagctcagccagtcggagcttacggcgtagggggggggcggcagcggtagctcccatgtcaggggctgagccgtaaagggaacagcccagtgggctgttcccaggcgaagacgagctgataagcgagcgaataaaacagcacagctgactgaggggtagtcgcgtacggcttctctccctccgacgcttcgcgccacctccctcatcagagggaggtcaatacggacttttaaggagtaaaacaaatgccaagaggaccaatgggcggcaggcgtgccgtcgaaaagccccatgatttcggcaaagtcatgggcaaactcgtgaactactgccgcaactatcttcccgtcatcatcatcgcgctcatcctgggcgcggccggcaccgtctgccagatcgtcggcccggacaagctcaaggacatgaccaacgagatcgtcaaaggtctgcccgccatcgtcaacggcagaccggtgatgaactcggtagatttcggcacggtgggccacatcgcctggactttggtggccctgtacgtgggctacgccgtgctcggctacgtgcaaagctggatgatggccaacgtcacccagcgcaccgcccagcgactgcgcgagtccatctcggtcaaaatcaacaaactgccgctcaaatacttcgacaaggttagctacggcgacgtgctgtcgcgcatcaccaacgatgtggacgccatcggccagacgctgggccagtcgctcggctcgctgattacctcggtgacgctgttcgtgggcgcgctggtgatgatgttctacaacaacgtgatcatgaccctgtgcgccatcggtgccagcctcatcggcctgatcatcatgatggccatcatgaagtcctcccagaagtacttcgcccggcagcagatggcgctgggtgacgtcaacggccacgtggaggagatgtacgccggtcacctcatcgtcaaggcatacaacggcgaggccgattcgattcgtcgcttcgagaagtacaactcggacctctacgagtctggctggaagtcgcagttcctctccggcctgatgatgccgctcatgaatttcgtgggcaacttcggctacgtggtggtgtgcgtggtgggcgcggcgctcgcgctcgacgggcagatcgagttcggcgtgatcgtggcgttcatgatgtatgtccgcctgttcacccagccgttggcgcagttcgcccaggccttccagaacctgcagcgttgcgcggcggccgccgaacgcgtgttcggcttccttgaggagccggagatggaggacgaatccggcaagtccgctttgcttgggaccaacggccacgaagtgaagggcgacgtggaattcagccacgtacagttcggttacgaaccgggcaagccgatcatccacgacttctccgcctccgtcaaggccgggcagaaggtcgccatcgtcggcccgaccggtgccggcaagaccaccatggtcaacctgctcatgcgcttctatgagatttccggcggctcgattgcgattgacggcgtggacaccaagtccgtgccgcgctggaacgtgcacgaccagttctccatggtgctgcaggatacgtgggtgttccgcggcactgtgcgtgagaacatcgcctactccaagcccggcgtgaccaacaagcagatcgaggatgcgtgcaaggccgtgggcctcgaccacttcatccgctcgctgccggacggctatgacaccgtgctcgacgacaagtcgtcgctctcccagggccagaagcagctgctgaccatcgcccgtgcgatggtgcaggacgcgccgattctgattctcgacgaggccacctcctcggtcgatacccgcaccgaagagctgatccagaaggccatggacgcgctgaccgtggggcgtacgagctttgtgatcgcgcaccgcctctccacgattcgcgacgccgacatgattctcgtcatgaaccacggcgacgtgatcgagcgcggcacgcacgacgagctgctggcggcgggcggtttttacgccgacctctacaacagccagttcgcactcgctgactgacggattgtttcctgcgttagcggattagcggattagctatactcggctcccctctccgaggggagctgtcagcgtagctgactgaggggagcaacccatcggtccacccgagggatgtgatactgatgatttcgtacattagtgtgtgaaaaagccgccgggaaaattgggggattgggcggcggtgcggttggcgttgagaatggcgcattcgaaggggaagtgagcgcgcagctgggtggccggggtggtgaacagggcggtggcgaggccgtcggccagtgtgacagggacgtgtgccgcaacggtgttcgacgaatcgtcggtatcgcggtttgccgttgtcgaggcattgctgccatgcgtcgatgtcttcgtggttatggcgctcgatggcggcgtgacggccacccatgtggcggctacatcgtcaaccggtagtccgtcgatggcgttgagcagatggtgaagttggtgacctgcggcgtcagaccagtggcggcggctgggggagctcgcgcagaatgcgccgtggctgatttcgaccgtacctacggcgttggccggatcggcaggatcttcaagggcgatggtgattggttcgtccgtgtgcactagcaaatcacccccggcgtcgatgacgtattgaatgggttgagggtgacccgcgccatcacccaacatccccgcaagcaaatccaccaaataccccttaccgcacgcgccgaaatcgagcgcgaccggtccgcgcgtcaccagtgttgtgccatgccgctcaacgtcggctgaccaaatggctcgtccgtggatcgcgcctgcatgttcagcggcatctggcgcaggcgtaaacgaatacgactcgtcatagccaagccgaatcaaatcctcgcccacgcatgggtcgatggtcccattagtcgacgcaaacagctggtcgtacaggccaaataaacccaatgcccagtcaggaaaatcgaacgtgccgccatgcgtggccgtgcgcatccggccgaccgtcgaatcatccttgaaccgggacaatgcggcttcataggtgctgatgaacatatcgatgcagttactgagcccgtcgtccagcgcgacatcggtatgcagcagcaacccggtgcccagcgcttcggggaaagcggcgacgtgcggtagtcgttcggccagaccagtcatggctctcatcgtagagcctgcggatggctgaggggaaggcggctcggggtgtggattgtggtgtgcggttttgccctgcagggaattgagtgtaaaaccgttgtagatgactttgttttagcttgtcgctagagcgaagtcatctgcatggcctcgttgccgaggccagctccaagactcacacggcttacgccgtcgcttggttcgcgtttcacaggatgccgcgttgcccgacg

SEQ ID NO: 2328 - DNA, 43329 bp, Unknown
  R119_18m  MAG No. k141_47177
cgtcgggcaacgcggcatcctgtgaaacgcgaaccaagcgacggcgtaagccgtgtgagtcttggagctggcctcggcaacgaggccatgcagatgacttcgctctagcgacaagctaaaacaaagtcatctacaacggttgcaggaataaagaattcctccctgcaagcccatcaccgagacgtgcgttagcactccatgccgatttcggtgcatcagtgcaccacagtcaccgtgcattcggcgaagttcacgatctgacgggacaccgatcccaggaagtgcgcgtccagaccggacaggccgcgcgaaccgaccaccagatggctggcgtaccgagatgccgcaatcagccccttggacgcgggaatatggaaggcattcgcgctgaccttgacaccatcgggaatctcggccttggccatcagcccggcgagaatctcctcggcgcggcgctgaccgaccttcaccggtgccacggcgttctcatagcccggaataacgcccaaatccttgagctgccagcagaacatcacatgcagcggcgcgtcgtgcagtcgtgccttttccagcgcgaagtcgaacgcgcggcgggaagtctcggaaccatccacaccaaccaccaccgggcggcgagcctcctcgaccaccggctgaggctgcgtgtagtggaccggctggtctcctggcgtcagggcattggcgatggcctcggtcacggtctcatcctcgctgccggcgatgcgcaccacggtcaccggcacttcggcggcctcggccagcgaagcggacagggaccccatgaaccagcgggccacacggctcagcgagcggcggccgaccacgatctgctgcgcatcatggccgatctgcagcagggccgaagtgccggaggccttcaccgaggtgagcttcagattcgccggatcgaagtcgatgcctgcagcggccttgtcgacccacacacgcagctcgttggcgatgtcgtggcggactttggcccaagcctcgtcgctgtccggttcggaacccatatcccacgaatgcgtccagccaaacacggcgttgacgctctgaccggttaacgaagcctcctcaagcgcccacttcagcgcggcaaaggattcatcggaaccgtccacgccgacaacgatgtcgggcttggttgcagcttcactcatttcgagcctccttgtaatcgactacgggtgaatctagaaccagcatatcgttttcttctcctctcacggcgcaattcatggaatccgatgaataaacgtcatcgtgaatcggtagagtaagacggaatgtcaattgaggaaggacaagcatgttcgaacggtttaccgaccgtgcacggcgcgtgatcgtgttggcgcaggaagaggcgaggacccttcagcacaactacatcggcaccgaacacctgctgctcggcctgatccgcgaaggtgagggtgtagccgccaaggcactcgcctcgaagggcgtggagctggatgccactcgcaagcaggttgaagaaatgatcggcaagggcaacgcggctccgaacgggcacatcccctttactccgcacgccaagcaggtgttggagttctcgctgcgcgaagccctgcagctgggccacagctacatcggcaccgagcacatcctgctcggcctgattcgcgaaggcgaaggcgtgggcacccaggtgctcatcaagatggacgtcgacctgggtgagctcaggagcgcgaccatcgatatgattcgcggcaactccggcaccggcaccggtgacggcaagggcgatctggccaacgccggcggcgtgacagacaagcagaacaagtccggttccgccattctcgatcagttcggccgcaacctgaccgtcgaagccgctgaaggcaagctggacccggtcatcggccgcaccaacgagatcgagcgcgtcatggtcgtgctctcccgccgcaccaagaacaacccggtgctgatcggcgagcccggcgtgggtaagaccgccgtggtcgaaggcttggcccagaagattcaggccggcgacgtgccggaaaccctgaagggcaagcaggtctattcgctggacctcggttccatggtggccggttctcgctaccgtggtgatttcgaggagcgcctgaagaaggtgctgaaggaaatcaagacccgtggtgatatcgtgctgttcatcgatgagatccacaccatcgtgggcgccggctccgccgacggcgcgctgggtgcctccgacatgttgaagccgatgctggctcgtggcgagctccagaccatcggtgccaccactaccgacgagtaccgcaagtacatcgaaaaggatgcggctctggaacgccgtttccagccgattcaggtgcacgagccgaccatcgccgagaccatcgagatcctgaagggcctgcgttcccgttacgagaaccaccaccacgtgaccatcaccgatggcgcgctgcagtccgccgccgagctgtccagccggtacatccaggaccgcaacctgcccgacaaggccatcgacctgatcgatgaggccggtgcacgcctgcgcatcaagcgcctgaccgccccgcctgagctcaaggaactcgacgagaagatcgccaagatcgccgccgacaaggacgaggccatcaagggtcaggacttcgagaaggccgccgaactgcgcgacaagcaggagaagctggaagccgatcgcaagcagaaggaagactcctggcgcgaaggcgagtccgacgtcaagatggtcgtggacgaggacgtgatcgccgaggtcatcagctccaccaccggtatcccggtgttcaagctgactcaggccgagtccaagaaactgctcaacatggaagccgaactgcacaagcgcatcatcggtcaggacgaggcggtttccgccctgtcccgctctatccgccgtactcgcgtgggtctgaaggacccgaagcgcccgtccggttcgttcatcttcgccggccccaccggcgtgggcaagaccgagctggccaagacgctcgccgaattcctgttcgacgatgaggacgcgctgattcgcgtggatatgtccgagttctccgagaagtacgcggcttcgcgactcttcggcgcgcctccgggatacgtcggctacgaggagggcggcgagcttaccgaaaaggtgcgccgcaagccgttctccgtggtgctgttcgacgagatcgaaaaggctcatccggacatcttcaacacgctgctgcaggtgctcgatgacggccacctgaccgacggtcagggccgcaaggtggacttcaagaacaccatcatcatcctgaccaccaacctcggtacgcgagacatcgccaaggccgccaacacgggcttcaacctgggtgctaacaacgagtccagctaccagcgcatgaaggaccaggtcagctccgaattgaagcagcagttccgcccggagttcctgaaccgtctggacgacatcatcgtcttcaagcagctcaccgagccgcaggtgcgccagatcgtggatctggacgtcaagcagctcaacgaccgcctgttcgaccgtcacatgtcgctcgaactcaccgacgccgccaaggacctgctcgcgcagaagggcttcgacccgctgctaggtgcccgtccgctgcgccgcgtgattcagcgcgacatcgaggacgccatctccgagaagattctgatgggcgatctcgaagacggtcagcgcgtgattgtggatgcggaaggcgagggtatcctcggcgaattcaccttcaagggggagaagttcgaggagccggccgccgccgataagcccgccgaagacggtgccgccaccgatgccgaaacttcgtccgaagccggtgcctccactgatggcgagactccagccgacgccactccggccactgaaccagccgaatccgctcccgccgattccggtgacgctccgcagaagtagtccgtttcgatagcgtagctagcgcataccagcaaagctccccttgacaggggagctgtcagcgaagctgactgaggggtagacctacgtacacataatgtgcacgtttttggtctacccctcagttgcctctggcgatagctcccctgtcaaggggaactactgtttgttgtcgggttattgcagcagggcgagtccggtgtcgatggtctcctcgcgggtaaacagcgtgcggccggcgcgcaccgaacgcaataccgagcagcgctcatacacggcgttgaacacactatcggcgtccagcacaatgaagtttgctggcttgcccgtttccaagccgtacatatcgcgcaggcccaacgtagtggcaccgttgacggtcaggaacttcaacgcatcgtcgatttcttcaaagctcatcatctgtgccaaatgcagcacataatcaagaatgagcatcatattgccattgcccagcgggtaccacgggtcctgcattgaatcctggcccaatgacacattgacacccgcctcagtgagctccttgactcgcgtgatgccacggcgcttggggaaggtatcctgacggccctgcaaatacaggttctcggtgggggcgcaggcgaagttgatatgcgccgccttaagcagcttggtcaggtggaagaagtaggcgttgtccgccgatcccagcgaacaggtgtggctggcggtgaccttcgggccaatgccagccttatatgccaacgccgaaagcagctccacgtaacgggaattcggatcatccgtctcatcgcaatgcacgtcgatgagcttgtcgtatttcgaagccaactcaactaccgtgtgcatggaatgctcgccaaactcacggcactgttcgaaatgggggatgccgcccacgcagtcggcacccatcttgagtccttcctccaccagctcggcccccgattcgccatgcgggccctcgtaggagtacatgccctcctgcgggaagctgacgatctggagagtgaccgtatccttcaattcctccttaagctccagcagcgcctttaatgaggtcaggttcgggtcggtcacatcggcatgggagcgaatgagctgcacgccatgcagcatttctttcttaatgccgattttcgcgcgctgcttgatctcgtcgaccgtcaagtcggacttggtctcactccatcgctggatgccctcaaacaaggttccgctttcattcaccgcaccgggcttgcgggccgtgaatacgtaatcaaggtgcagatgcgtatcgcagaacggtgggcagacaagtttgccgcccagatcgaccacctcaatggccgccagatcaccaccctgagcctcatattgttgcgcgagtccggggccgaatgcggtgaacacgccatccgtgacgagaatgtcctgcaatggcagggtgcttgcagccgtgctgccgggttctccggtggcgatatgtgcgttggtgaacagtgtggtagtcatcgtcgctccttcaactggtgtgttgccgaacggttacgtgaaccgactgcccgcgtaaccaactgaggttattgtcaacagcacgctttgcggtgaggttaaccggaacgaccggtgttccgcgggggaatggacagattgtatgactgtatcgattcgcagtgcgcttcataacacgcagttcaaacgagccgatcctgtggtggaggtcgaaggcaaagacctcgatacgccagtgcgatgggtgtttaccaacgagcgagaggatgtctccagtttcctttcgggcggtgagatgctgattatcgagggtaacgctctgctcgccgccgattggcacggcacgttagggcaatatgtagcaagcctggcacaggctggtgtcgccgctctggtggtcgaactggtggagggtgtggtgcggatgccggacgaactggtgtctgcggccaggctgcatgggttgacgttgattggtctgaaatctcgcgtaccttttgtcgacatctgtcagagtgtcaataccgctatcgtgcacgaacagatgcacttgcaattggaggtggacacaatgtccacttcattacgtgagggattgtcccgtaccggcaatatcgaggctgtggccgaaaccattgcgtcgctgttcggcgaaagcgtcgccattttcgatggtgacggtctgttggccgctcgagcgggtcgtgcgttcgatgccggcaacgaatcgagcgccgtcatcgcccttgaaagtcgctcccggccggtgggagcattggagatcacgcaacgcaccatgactttcgacgccacgatgcgtcgggccatcgccaccatcgtgtctccggtggccgccctctatattgacggcggcgcgcgcatgggcatgatgcatcatctgagtatgggcccggccgacggcgtgcacgtcaatacatttgaggcgcaggaagcgcatgcgatgctcgacgcgctgggttttgccggatcatgcatctatatgccattcgcttttcggttcagatcggtggtggaaggcatcaaccatgtatcgacgatggtcgaacggttcgaagaacggtcgggatgcgccgtctcctgcatgctggaaggtgacttgatggtcggatggtgctccaccaccgattcctcagacggtgcggccgcattcggacgccattgcatggatgcgcttgccgtactggaaggcgacggtgtgtacgtggtgcatggccgagtggcattggacacggtgacgctggtcgacgggttcgcggtattgcgtgacatcgccaatcaggaaccggcatacgggcgaatcgtaagtaccatgtccgcactcgtcgaccgtttcgtcgcatcctctgatatggacaaggcgatgcgcatgctcgtggtgcagaccatcggattcgaggtcgccgcctctccgttgttgctggacacactgtgcgtctgcttcgacaacctcgatagcaaaaccggcgcgtgcgagcaattgggtatcagacggcaaaccctgtacaaccgactggacaaagtgacacaaatggtcggcgtcgactataacgacaaaccgaactggtcgatgctgctattcgccgccaaactcacgaaatcatggcaagaacagcatggtgaataatgcgccagcaccactgggcaacctgtccacttctacgccgaacgggttaatcgacgattcacgtttcagcaaatactcaagggcatagtcgaggctatcgcggcgctggtcgacctgctgcgaaacgaattcccacttgaatcccattcagtcacacgaacagcacatccttgaaaggacggtgacatcatgagttccgcaacgattactacatctgcacgactgatgaatttcacccctcaaactgaagaacaggccatggtcaggaaagtcgcggtatcttccttccttggcaacttcatcgagtggttcgactacgcctcctattcgtacttcgccaccaccatcgccctggtgttcttcccaaccgacaatcacaccgtcgccatgctgcagaccttcggcgtgttcgcgctatccttcatcctgcgtccaatcggcgcactgttctggggtagctacggagataagaaaggccgtaaagccgcattggcccactcgattatgttcatgtccggtgcgagcttcctgattggctgcctgccgtcttactcggtgatcggcgttggcgcgccgattctgcttctgctgctgcgcatggtgcaaggcttctccgcttccggtgaatatgccggtgcggccacattcctcggcgaatatgcacccacctcaaagcgtggcatctactgctcgctgattccggcgtccaccgccatcggtctgctcgctggctccacgctggccacgctgatgaccgccaacatgaactccagcgcgatggtcggttggggatggcgtgtgccgttcctgctggccggcccgctcggcctgattgtgctgtacatccgtaccaagctctccgattcccccgtgtaccagtcaatgaacgatgctcttgagtccaagagcgccgcctccgctgacggccaagtcgtttccaagagcggcatgttcgccccgctcgccgaactcttccacaaccatctcaaggccctgatcatcagcttcggagcctgcgtgctgaatgcggtcggcttctacaccgtgctcacctacctgccgacctatctgtctgacaccgtcggcatggacgccacccagtccggcaccatcaccaccatctgcttggtcgcctacgtgttcatggtgttcggcatgggccacatctccgacaaattcggccgcaagaaggtgctcatcggtgcttgcgtggcgttcatcgtcctcaccgttcctgccttcctcatcctcaacacctcccagttctggcccgtgctgctggttgagctggcaatgtgcgccaccctgaccgccaacgacggtaccctgtccagctacctgaccgagacgttccccacctccgtgcgcttcaccggattcgcgttcagcttcaatctggccaatgccatcttcggtggtacggcctcgttcatcgccactggcctgattgccctaaccggttcatccatcgccccggcctggtacatggtgggtgttgcggccatcgccttggtcgcgatgattctttcccatgaaaacaccgacaaggatctgaatcacatctgatctcctcagctccggctcctttcccgagggagccgggcgcattcattgaccatccaatccaccaccaacccaaaggagtactgcaatgggtcgcaaccgccgtatggaccacatgacctggccggaattcaaggaggtgaagactcatcccgtcatcgtgccgatcggttcgaccgaacagcacggccagcatctgcccatcggtaccgacgcggtactcgccacgcgggtcgccgaagatctggcggaacgcatcgacggcaccgtgctgcccaccctgagctacggatacaagtccaagccgctctccggtggcgggccgctgttcccgggtactatcgacatgaacggcgtgacagtgatcacccaaatgcacgacgtgctgagcgaactcatcgccgatggcttcaccaagatcgtcgtcatgaacgcgcattttgaaaacgaggcgttcatcgtcgaggccatcgacctggtcacccgcgaaaccgggggagtggccaccatcgtggaaaccaattggtgggacccggttccgcagtcggttatcgacaaggtgttcgatggattggtgttccccggctgggcattggagcatgcggccgtcaccgaaacttcgttgatgctccactacgcgccggaactggtgcacatggaccgtatggtcgaggaagccggtgccacggcgaaatcctatgtacgctacccggtgcgccaaggtgacgttcccgctcacggcggactcgccaatccggccggctcaagcgccgaacgcggccgcctgattgccgaggcgtgcgtggatgcggtagctgagatctgcgtcgaggaatttgccgagtaatctccccttgccgacgcattcgtagtgacacgggttgcaaaggcctgaccctgatagtacggggtcaggcctttcccatcccaagacgccgctaagaattcacctgagagtcgccttcctaggcatggccgttcaatcgacgatcctagcgtgactggtgtgagcaggaatatgaagaaccggcggtgggccggcaagcgatcggggatcgcttttggtgcagtagcgcttatccttacggctctggtggttccttatgcttgtgcgggaaccacgggagccgttcctttttccggcgataatccatcttccggcacccgtacggtgaccatcgccgacatcactgattttcacgggcatatcgaacgtggtgcggacaacgccaccgccttcaccgtggccgacagccataatcccggcaatatgatcccggtatcgaccggcgatttggtgggaggttccccgtatgagtcggcggtggagaaggaccaacccacgctggacatggccaaagcgtggggattgacgatttcggcggtaggcaaccatgagttcgaccgcggtgtcgccgatttcaacaatcgcatcgctgatcccagcaatggcatcgactggctgtgcgccaacacgtctgccgccagtaagtcgcctgacggactgctgagccatgtacgtgactctacgattcgaacggtgaacggcaagcggatcggtttcgtgggcgcccttactgatgcgctcggctcggtagccactccgcagattacgcgtgatgccgatcttgacgaacgggcggtggacgcgatcaatcgcgtggcccgtgaactcaaacgctccggaaaggtggatgcggtggtggccttgctgcacgccgatgcctcagccgccgccgatattgggcgagatgttgatgtggtatacaccggccacaatcacgcgatcaagcgtggtacgaccgctggtggtgcgcctatttacgaggcgggcagcttcgggcggaatatggccgtgcaggatttgatcatcaccggtgccgggcgtcgcgccacggtgcgagtggccgatgtggacctcggcaatggcaccagccatacggcggttgacggcgtgctgggcgtggaagggcttaatgcgcatccggcgcaagccgcttggatgtctgccggtgctgaggcgaacgatgaggtatcgcgcgctcagcatatttaccaggcggcggcaacatattcgaatcatgccggcaacgcggtgattggcaccttggcctccggcgtgaatttcgacaaacaaggttcggataagcacgggaatacggtcggtgtgctggtggcggacgcgaaccgcgagtcaatcatgaagcatgtgtatgccggaaatcgtttgccggtaatcggattttcgaataatggcagtctgcggactccacggcttgatatgaatggcgatggcaaagtcaccgtgcgcgaggtggatagtctcatggccttgcagttcaaggccgcgcatgagacgctcaccgggcgcgatgtgaagagagtgctcgccgagcaattccaccgtggcgatgggcgactggagcggcgctggctcggcatctcctcgaacgtgacgtatcggtatgccgaatgcggtacgaccggtgggagcggcaatgccgatgccgccgctgatactgatgccgccgctgataccaacgctgacgctgacgagtgtgctgccgacgaacatgcggcggttcgtatcgtgaacctcgccgttgacggtcgaccgattgcggacgatgacctggtgattatcgcatccaattcatatctgcttcagggcggcgacagttaccccgccttccgtgccggaaccaattacggcgagctgaatatgccatacagccagccgttgcatgaatatctggccgcacatcaagggctcacggcaattgttgcagcaccggtagggactcaggcgtaagacaccaattgctgggtgactgaggaactatggggtggagttatgagtatagggcagaagaaaacggcataaatatgacgaagctcccctcgctgaggggagctgtcgccgtaggcgactgaggggagcttgcggtataaccgtaaactcccctcagtcagccttgctgccggcttccctcagaggggaacctggcacgagacccttacttgatggcgttcagccactgctccttggtggccttctcggcttcgagcttggccttcttcttcgggtcggattcggccgcgatcttggcgtcgagctcggcgagctgggcgttgagctgctcctcgaagctggacttgcgggcgtcggcctccgggtcggtctgcttccaagcggcatcctcgatggccttgatctgcttgtcaacggcgtcgagacggttctcgatgcggcgcatatcgtcacgcggcacgtaaccgatctgatcccactcttcctgaatcttggccagctcctggcgggccttcttggcctcggcgtcggtcttcaccggcaccagagcctcggccttgaccagcagagcctccttggcagccagattctccttctcggaggagttgatctgatcgcgatcagcctgacgagcgttgaagaaggtgtcggcggcttcgcggaacttggcccacagctcgtcgtcctcgttacggccagcgcggccggccttcttccaacggtccatcagatcgttgaacttgcgggaagtctcaccccaagcggtggaatccttgagctcattggcctcggcgataatcgcttccttggcttccttggcggctgtacgctcgttgtcgcgagcctgagcccacttgcggcgagcctggttgaaggtggtgcgggcggcggagaagcgcttccacagcgcctcggcctccggcttgtcgatgcgcacggtggtgcgctggtggttctgccactcgtcgaacaggttacggaacttgtcggcggtggagcgccagttggtgttgtcgcccagagaagcggccagtgcttcagccttctcgacaatggcggtgcgctcggcgacggccttggcctgagcggccttgcgcgcttcggcgatctcggccttcttggcctcgccggcggccttcagttccacgtaacgggccttgagggccgcgaggtcgcccacgacggccggctcggaggtttcttcacccaagagcttcacggattcgtcgatttcacgggccttgatgttcggggaagccagacgggtggccagcagatcgagcttggccttgagatccaggaaacgacgggcgtacagtgccaacgcctcttccttggagacatccgggaactggcctacctcgcgctcggcgtcgccatccttgacgaagacggtgccgttgtcatccacgcggccgaaggcctcggcggccttgacatcagcctcggaataggtggcggtggcggcggccggggcggtagcgcgcggcttggccgacggagtcttcttggcgaaggcggcgggggagggcgcgtgcggtttcggcatggaagcgggggacggagtcggcgccggcgtggccgcgctggcttcgggtgcgggtgtcgttgcctgctcttcgggcgcagcggtgtttacgggttcggtgacagtttcgtcggccatggccagctccttaaagcgtagaatgcataagcgggagcgtctcccatcccgggcgaaccaggaagttttgacgcaaccctcacctattatattgatttcgtggctaaaggtgcatcaatatcaggattcccggagtggctcccctccgaacgtgttgtggagcagcgtgttatcgatacgcttcgtaaggtttttgagctcaacggcttcatcggcattgagacgcgagcggtggaaaccggcgcttctttgctgaaaaagggcgagaccagcaaggagatctacctgctgagccgtttgcaggaggtcggtcatgaatccgacactccgattgaagagcggttgggcctgcatttcgatctgaccgtgccgctgagccggtatgtggtcgagcactcgggtgcgttggcgttcccgttcaagcgctggcagattcagaaggtgtggcgtggcgagcgtccgcaggaaggccgcttccgcgagttcgtgcaggccgatatcgacgtgatcggtgccggcgacctgcccgaccactatgaagtggaactgccgctggtcatggtctccgcgctggaagagctgcgcgcgtatggcctccccaaggccaccgtgcacgccaataaccgcaagctgtctgaaggcttctaccgcggccttggcctgacggacgtcgaaggcgtgctgcgcgagatcgacaagctcgacaaaatcggtgccgatgaggtggcccgactgctcaccgagacctgcggcgccaccgaagcacaggcacgcgcctgcctcgaattggccgagctcactgcctccgacggtgctgagcttgccgccaagttcgatgcgctgtgcgagtctcacggcatcgccaaggattccgaggcatacacgctggctcgtcagggacttgataccctggccatgatcgtcgacgaggccgccgccatccgccccggttccgtcatcgccgacctgaagatcgcccgcggtctcgactactacaccggttccgtctacgagaccttcctcgacggtgccgcatcactcggttccatctgttccggtggccgttacgacaatctcgcctcccagggcaaccgcaagtacccgggcgtgggcctgtccatcggcctgagccgactggtcagctacatgctgcacgctgccggcgcgcacgccaaccgcgtcagcccggccgccgtgctggtcgctgtgtggaatgaagaggaccgcccggacgccaaccgtattgcgaaccaactgcgtgcgcgcggcatcgccaccgacgtggcacccaccgcggccaagctcggcaagcagatcaagtacgcggacaaactcggcattccgtacgtgtggttcccggccaccgctgccgaaggtgcggaaggtgcagagcccgctggcgacgaggtcaagaacatcgtcacgggcgagcaggttgccgccgattgcacgtcgtgggagccggatactgtggttgcccagcaaaccgtcgaaatctgacgtattcgcgcgaaaaatcgaggagaaacaagataatgagccagacggcttacagaacacatcatgccactgaagtgaccgaggccctggtcggccagaaggtcaccctcgccggttgggttgaccgacgccgtgatcacggtggcgtggccttcatcgaccttcgtgattcgaccggcctcgtgcaggtcgtcatttacgacgaggatatggcccgcccgctgcgcagcgaattcgtgattcagattaccggcgaagtgcgcctgcgcccggatggcaacgagaacacccatctggccaccggcaagatcgaggttgtggccgagaccatcgagatcctcgccaagtccgacgccctgccgttccaggtttccaccgctcttgagaatgagtccgagaacaagctgccgggcgaggacgtgcgtctgaagtaccgttacctcgacctacgccgtccgtccatgcagcacaatctgaagctgcgttccgacatggctaaggccgcccgccacgcgctggaagacatggacttcaccgaggtcgagaccccgaccttcattaagtccaccccggaaggcgcccgcgacttcgtggtgccggcccgtctggtgcccggttcctggtacgccctgccgcagtccccgcagctcctcaagcagctgctcatggtctccggtgtcgagcgttactaccagctcgcccgctgctaccgtgacgaggacttccgcgccgaccgtcagcccgagttcactcagctcgatatggagatggcctacgtggaccaggaagatgtgatggccatgactgagaaggtcatcgccgccatctggaagtccgccggctatgaggtccagctgccgctaccgcgcatcacctggaaggatgcgatggacaagtacggctccgacaagccggacctgcgcttcggcaacccgctggtggaactgaccgagtacttcaagaacacgccgttccgcgtgttccaggccccgtacgtgggtgccgtggtcttcaagggcggtgccgccacgccgcgtcgtcagttcgacgcttggcaggattgggctcgtcagcgtggagccaagggtcttgcctacgtggtcttcggcgaaaacggcgaactcaagggccccgtcgccaagaacctgtccgatgaggagcgcaacggcctgcgcgaggccgtcggtgccgaggaaggcgacgccgtcttcttcgccgccggttctcgcgagtccgcccagctgctgctgggtgccgtgcgtgtggagctcgcctcccgcgaaggcctgctggatccgaagaagttcgctttcacttgggtcgtggacttcccgctgttcaagcccaccgacgatccggatgatgacgatgtggctgtcggccactccaagtggacctccatgcaccacccgttcaccatgccctccaaggattggatcgacaagttcgacaaggatcccgagcacgccatgtccgattcctacgacattgtctgcaacggtgaggagatgggcggcggttccgttcgtatccaccgtgacgacatccaagcccgtgtgctcgatgtgctgggcatcaccaaggaagaggccgacgagaagttcggcttcctgcttgaggcattcaagtacggtgctccgcctcacgcgggtctggcccttggctgggaccgcaccgtgtccatcctggccggtgccgactccatccgcgacgtcatcgccttcccgaaggccggcggcggccgcgacccgctgaccggtgctccggccccgatctccgacgagcagcgcgccgagaccggcgtcgactacgacccggacgccgacgaaaactaatctacggagcgtataccgcctttcctcagcgctcgacgcaccttagtgcgccttcggcttcgaacggcggtctccgcatgcgtagattaattttcgaggagtaatgctccggtgctattagccgcaaatggcccttggaataattccaagggccatttgctttttgcgggtggggcccaatgtgccaaatacctgccaaggggtgccaaatactccgcccgatggcacctccgccatgcggcaaacctcgcaccatgcggtgtcccccttggcgtttgccgattatcccccccatggggcggtaactttctcatggggcggtaaacaacccatggggcggtgaaaaccccatggggcggtaggtcaaaatggcttaattccgcggtttcacaatttcttcaaaccgccccatgggcaaattgccgcctcatgggggaattgccgccccatgagaagtaatcgcaactccgtatttgatcaatgttgtgaggctttgttgtgctttgcttgtttccgcctcctgtattcccctttgcgcgcattgatggtaaggctgccgtctattaatacccggcatgaaggttgaggacggccaggaagcggtatttgcatcgcggtggcaacctcttgtgcgaaggcacgttgtttggcggtactccacaggtcatcggcgaacacctcgatgacggtccagcccaattgccgcagacgtcgacgtttttgctggtcccgcacatattgtttgcggaagcgacggtgatgatcgccatcatattcaatagcgactttgtattgtggataagccatgtcaacggtgtaggtgtatccgttctctgaatcggtaatgccatattgtgtttgcggtatgggcaggccgaaaagcataagcgccaagcgtgtacgagtttcctgaacggaatccgatggttttacgagcttcagcgccgcctcacaacgcgcacggccaataacgcggtgaaaggccgttagtcgttgagtgaattgttcaatggcatatccataacgtctgatgagcgcttcagccagcaccactaattcagtgaggttgagatattgggcaaactgtatccacgcatccatgggatgcatgcaggttacgccgtttgagaaagcgatactgttgaactttgcattccatatgcgatagtcgacattgtccaatgaagagcgggtccctttgctcctcaccgtcacataaaagtccttctgtggcaacgtgctgtgcctcggcaactccacgccgcataattccaatgcggtatacagcgagaaacacaacgtgcgtttcgtgcgcactttgcccagcagattccaacaggccgtgttcttggccgtggctttggcgtcaagatctttgcgcagatagttgttgatttcgccattgtgcggcacttcgctgtatccgttcatgcgccgagcgtagcgcattccacggtggcacaggggcaaaaccgaaaaatggggataacttaagcggcgcgaaccggttatccaccggcatatcgtgtgccgcgcccggttatccaccgcgcttcgggagtgtcgtccaccgtataacagcactcatcgtgtgcgaacagctagccacgctcaaaatgcctagtacatttatacgaatacgacatgggaaacggcgagaccagccccacacaatacaaagtgaccgccagccatgcgcccgactgcggcatacacggcagcaacgccaacgacaccaaggccaaacatggaatcagcagataggacaacacgtgcccgctttgccatcgcagcaacgtctcagccaccacgcagcaggcaatcagcgcacagcagacgccgagcgatgcgcgactcagcgagaatgtatgccgatgcccaatgccgccatcacgatgtctgatgcggaaatgagacatcgactgagcaactgtgtggacatactgtgtacacgttggaaacgtcggtgtgttatcctcccactcatgtctgaaacgaacaatgaaacagcagtgcgttcgcgcacgacaagcacaacatcaccaagcaaggccaaattgaccccgctggttcccggcaaagaggacctgaaccgtccgctagtcgaactgacccacgtcgaaaagcacttcggtgctttgcacgtcctgaaggacatcaacctgaccgtcaccaagggtgaggtgctggtggtcgtgggcccgtccggctcaggcaagtccacgatgtgccgcaccatcaatcgcctcgagaccatcgattccggcgacatccgcatcgacggcaagcccctgccacaggaaggcaaggagctcgcgaacctcagggccgaagttggcatggtgttccagtcgttcaacctgttcgccaacaaaaccattcttgaaaacgtgacgttggccctcatcaaggtgcgtcacatggacaagaaggaagccgagcaactggccatggacctgctcgcccgcgtgggcgtcgactcccaagccagcaagatgccctcccagctctccggcggccagcagcagcgtgtggccatcgcccgcgcgctcgccatgcgccccaaggtcatgctgttcgacgagcccacctccgcactcgacccggaaatggtcaacgaagtgctcgacgtgatggtcgaactcgcgcatgaaggcatgacgatgatctgcgtgacccacgagatgggcttcgcgcgcaaggccgccgaccgcatcgtcttcatggcggacggccagattctcgaagagaacacgcccgacgagttcttcgagcatccgcagaccgaccgtgccaaggacttcctctcgaagatcctcacccactgacgaacccactgaaagacgggtacgcaatccaatgacattcaccaatacgttcaaacggaaggtttgccgcgtgatcgccgcgctcgccgccgtggcctgcacaatgtcgctggccgcctgcggcgcggacgaaaccggcaagatccgcatcggcatcaaattcgaccagcccggcctgggcttcaagaagtccggcacctacgtgggcttcgacgtggacgtggccaagtacatcgccaagaaactcggctattccgaagaccagatcatctggaaggaagctccctccaagcagcgtgaggccatgattcagaacggcgacgtggacatgatcctcgccacctactccatcaccgacgagcgcaagaaggccgtctccttcgccggcccgtacttcgtggccggacaggatctgctcgtgcgcaaggacgacaactccatcaacggccccgaagacctgaacggcaagcgcctatgctccgtcaccggttcgacctccgccgccaccgtcaaggagaagttcgcctccgaagtccagcttatggaacagcccggttacgccgaatgcgccactgccctgttctccggcatcgtggacgcggtaaccaccgacgacatcatcctggccggcctggcctccgcctcgcgcggcaagctcaaggtggtcggcaaaccgttcacgcaggaatactacggcgtgggcatcaagaagggcgacacgcagctggccaccaaaatcaacaacgccatcgtggacatgattcaggacggctcgtgggagaacgccatcagcgataacaccaagggcaccaactacacgcccgacgtacgctacaacccgcccaccccggacgaaggagaggaggcctgatgagcggattcctggaactcttcagccagtatgacgtgctcggcgcgtttctggtcaatatcgaactgaccctatggtccgccctgttctccctgatcctcggcgtgatccttgtggtgatgcgcatctcgccgatttcctcgctcagggccgtggccggtgcgtatgtggaactgttcaagaacctgccgctgaccatcatcatggtgttcatggtgctgggtgcctacgcgcagctgaagctcagcttctccgacaccttcaccacgaacttcttctggctcgcggtcaccggcctgagcctgtacacggcggcgttcgtgtgcgaatctctgcgttcgggcatcaacaccgtgccgattggccaggccgaggccgcacgagcgctgggcttgggcttcatgcagtccgccaccgagatcattctgccgcaggccttccgaggctccgtggcaccgctcggcaacacgctgatcgccctgctcaagaactccaccgtggccgccgccgcatccgtggccaccgaaacatcctcgctgatgagcgagatgatcgaattccgtcccgacgtgatcatccaaatcttcctgatcttcgcgctcggctacgtgatcctgatcatccccatcggcatgctcaccacgtacctgtccaacaaactcgccgtaaggaggtgacggatatggccgatacttcgaattccgtgctgttcgacgcgccaggtcccaagggccggcgcaccattcgcatcgtcaactggatcgcgggcattctgttcgcggtggtgctcgtgtttatcctcatgcgcctgcacaacccgccggacggcgagaaccagctcagctgggagctgtggaagcccgccgtcgaacgagaggcgtggaccgacttctacctgcccggactgtggatgaccatcaaggccaccatcgtggccgtggtgggtgccgtggtgttcggcctggtgttcggcgtgggccgactgctgccgaacccgttggtacgtggcgtctccgccgtgatcgtcgagttctgccgtgcggttcccgtgctgctgctcatgatcttcttctggcgatggttcgcgttcgcgggcctgcccagcccgtcctattgggccgtggtgctggccttggtgctgtacaacggttcggtggtcgccgaactcgtgcgctccggcgtcggcaatctgccgggcggccagcgcgaggcctcgctcgctttgggcctgaccgaaacacagtcgttgatggaggtcgaggtgccgcaggccgtctacgccatgctgccggccgccgtcacccagctggtcgtggtgttgaaggataccgctctgggctcgatcatcatgtataccgacctgctgcaggaatcgcgccgactcggctcgatgtacttcaacatcctgcagacgctggtcatggccgcggtgatctacttcgtcgcctgctggctgttgtcgaggctcgccgaatggctgccttcgcgcatgcagcagcgcacggccgcgcccaccgaggccgagcccgtggcgccgatcgccgccggagacccgtccaatgtcaaccagatcgctgtggccaaggaagtcgaagagctgccgtttggtggtgcgccgcgcaaataccatgtgcatcaccgtggcaccaacgcctcgattcgcaactggcggcgcacccgctacgaacagggatatgacgccacccagcccgagtcacaggttgacccggaaaccggcgaattcccggcgttccgcaagtccgaagacgagtcagaggcctgacagtcagctcaatcgccgctaagccggcacgaagaatttactgagtgtttgactgggctccggctacgtagccttcacggaggataggttggaacatatgaagatgttccggcacctatcctccgtttttgctattgcgaccattgcgccgctggcgttggcggccacgctagccgtgacgcctgcaatcgcacaggccgaccagctgcccaacccggattgggtggcattgctctccgactacgaaaagaactattggcaggcccccaccgatgccgaacacggtggcaaggtgctcgacgccgatacaatgaaactcgacgaagatttggccgtggccattaaccacaaagccgccgaaaatctcgataaggatggcctgaacgcccaacgcaagcgtgcgctcgtcgactccgatctgcaagccgaggaagccatgccggacgcgctcggtccggtgcttggcaaatatatgagcgaagggctcaaatccgggaaactcaacgccgtcgccgatatcttctcctttaacgtggcctccacctacgcctcaaaacgtgcggccatgcatccgcgcccctatctgaaccgtgcggaaagcagctacggcggcactaacgatctcgccggactgcccgccacgcttgacatcaagcaatcaccctcatggctcgaacacgtgcccggctactcgaacttgcagaaaaacagttcctacccctccggccacactaccggcgcctattcgtggggtatcgcgctggccggcatgattcccgaactcgcgccgcaaatcatggcccgcacttcggaggccggcaacaaccgcatcgtgctcggcgtgcattatccgcttgacatcatgggcgggcgcattggcgcatccgcccagaacgggcagtactggcataacgaattcgcttcgtccatcgtgcccgcgtcccggcagctgcgggactatctggtgtcccgctgcgccgcggacggccacggcactaccctcgccgcctgcatcgccaacaccaaggcctccggttcgggcggctacaccaacgattttctggacccggtggccaccgagccggtcgcggaccaggcctcggccgtgcgcgtctacaccgcacgcctgacctacaccttcccgcaagacaccgcccagtccggcgctgatttcgtggcaccgcgcggggcggcggacgtgctgcgactggcctatcccgaactgcacgccgatcagcgcaacgcgattttgaaagccactgccttggattccggataccccctatggcaatcgagcgacggctggcagcgtatcaactgggccaaagccctgtgcgcccgcgtcaccttggataagcacggcgatgtggccaaggtcgagaccgccgaccaggtggcgcttgccggcccgagtgtggtcaatgcccagtacgccgacgcgggtaatcatccggcgtctgatggctcggcgggtgaaaacagcgccattgcggccgggccggatctcgccaccctccatgccgcgcaacgaccggcgttgatcagcgtagccatcggtaccgctgtaatcgcgattgtcggcggaatacggacggttcgacgcaaatccaagaactagcttcagcggtaattcagccaaagttcagtttggagatctgccgagtttgccttcatacggtgtcggcttcatttctctctcatactctcggggtgtcatccgccgaagagcatcatgctgcggcggcacaacccgaggaaggaacgggagtaatgttccacaccaacaatttcgtcgcgatgtcgcggcgcgccatcgcgctgctcaccgctgcggtgacactgagcagcatcgccctgatcggcgtgcccgctgcggctgcggacgagcagcaggccactgccgaacagaacacggctgccaaaccatccgtaatcatcaacgaggtctatgccggcaatacgaaagctgccggagacccggatagcaagcgttgcgattgggtcgagctcaagaacaccggctccacagacgttgacgtgaagggctggggcatctacgacagcggcaagaaagccaagaagcactacaccatcggcaccagcgaagtaacgaatacggacaccgtcatcaaagccggcggatatctggtggcatacatcgaccccgacaaggccgagcccggcctgggttccgatgccgacgaagcctatctgaccactaccagcggcgactttaccgatagcgatgtggtggattccacgtcatggaataccgatacaaccggcgtgaagaagatgagcgacagtcagtcgtggtcccgtaaggacgatggcactttcgcgctttccgatacgcccacgcccggtgcacagaacgtgttcgatgacccgactccgactccgcccgccggcgagaccatgaccgtggacgcatggtcgggattggccgatgtgaccacagtggatgccgaaggcgaatttggcgccaaaggacaaggcggcgaccacactgacggcaatctgtctggtctggtgtatgaagccggtaaagacggcaagcaaggcgtgctgtgggcggccgacaacgatctgaaccccacgctcggcaacaccgctgataagggccctggctccatcaacaagttcgtctaccagaacggcacatggcagcaggatcccactgatggctggaccttcaccaacaacggtcagaccaagggcggcaagcagctgcacttcaaggacggcaagggcggtgtggactccgaaggcatcacgctgatcaacggagattcatccaagggcatattcatcggcgccgagcgcgacaacgaaaacaagaatgtgccgcggccttccatcctgcagtatgacgtgaccgcgaaaaccaccgacgccaacggcgacggagcgcaagagctgaccgctacgcacgagtggaatctcaccgcagcactcacacagttcggcgtgacgctgggccacggagcggacgccaatcttggggtggaaggcatagcctttattcccgactcggtcctgaccgccaacggattccagtccaaccttgacccgaagaacgtagtgacctacgacccggacggtttcggcaatgatttcggcggtctgttcttcgccgcactggagaaaaccggtcatatctacgccttcgcgctgcaaaccgtgaatgatgaggacctggtgcatccggtggccgacatcgacctgccgcagtccgcggtgaacgccggctatgatggcccgcgcgatctgacttgggacgccgagcacaaccagctgctcgcccaaagcgacaatgacgcgaacaccggtgccaaaatcggcacctacgaattcaagaacggcgtgctgcagctgaccaagctgaccgacactccggatgaaatccgtacgcagaacaccgaaggctttgccatcacccctgataccgaagccaccaaggtggtaaatggcaaggtgtacaagccggtgttctgggcagacgacggcgtgaccaatggccattcattgcgtatgggctatatggcaatcaatcagccggttcccgccagcaccaccatcaacctgctgaacttcaacgatttccacggccgtatcgacaagaacctcaccgtgccgttcgccgccaccatcgagcagctcaagggcgaataccctgactcatcactgctgctgtccgccggcgataatatcggtgcttcgctgttcaactcttcggtgcagcaggaccagccgaccatcgatgtgctcaatgctttgggcgtcaaggcttcggcggtgggcaaccacgagttcgaccaaggctatgccgaccttaccgatcgtgtgatcggcaaggagggcgcgcgcaacgcccaatgggattacctcggtgccaacgtgtacaagaagggcaccacaaccccggctctgcccgagtacagcattcaggaggtgaacggcgtgaaggtcggcatcatcggtgcggtcactcaggaaaccggcacattggtggctcccggtggtgtcaaggacatcgaattcggcgatccggtggaagccgtgaaccgtgtggccaagcaactcaccgacggcgacgaatccaacggcgaggctgacgtgattgtggccgaataccatgagggtgcagcctccaatgaagatgacgccacggccaagcccacgcttgacgagcagaaggccgccagccccgtattccagaagattgtggacgataccgatgcggcagtgaacgtgatcttcactgcacacacccacatgaagtactcgtacaccgatcccgcgcacaacaaccggccgatcatccagaccggtagctatgccgccaacatcggccaagtggtgctcacctacaacacggccaccggtgcggtgtcttacgacaagtccggcaacacggccgtgcaggtggcttcgcagcccgccgacaaaaatgatccgcactacaacgattacgccgaatacaacgatggcctgctcgccgccgcgaacccgactgtcgccaaggtgagggacatcgtgtaccaggctcttaaggtggccgatgaaaagggcggcgagaaggtcggcaaggtgtctgcggatatcaccaccgcattcaaggacggcaagcgtgacgaccgcgcctccgaatcgaccatgggcaatctggtggctgatgcgctgctcgattcgctcaaaggcgaggaccgcggcgcggccgaaatcggtgtggtcaaccccggcggtctgcgtgccgaattctgcaagtccggcaccaatgacgcctgcacgctcgatgccgacggcaatatcacctacgcccaggccaacgctgtactgccgttcctgaacaacctgtggaccaccacgcttaccggcgcgcagttcaaggaagcgctggaacagcagtggcagacgaacgcggacggcagcacgccatcgcgcgcgtatctgcaactcggactgtcccacaacgtgagctacacgtatgatccggatgccgcgcaaggccatcacatcacctcggtgaccgtcaacggtgagcctctggacctgaaacgcaactaccgtatcggttcgttcagcttcctgttggagggcggcgataacttccgcgccttcgcccaaggcacgaacaccaaggacaccggtctggtggaccgcgacgcctggatcgactatctcaaggacaacaatccggttgccccgcgctacgaccgccgtgcagtggccgtcaccggtatcccgaccggtgcggtcaaggccggtggctcgttcaccctgcacttctcgaagctcacgctcacctcgctgggcgtgcctgacgagacgaagctgaccgccaccatcggcgagcaggtggtcggcgaagcgcaggttgcgaatggcgataccgccgagctcaaggtcacgattcccgccggaaccaagaccggtgatataagcctgacagtgaccggtgcgaccaataagaccacggtcgctctgcccgttgccgttaccggagtgtccaccgggacggacgacaaggataacggcaaccatgacggtagcgtcaatgccaatggcagcaccaagccacagcagaccgaacgtacggccgataccggtgcctcggttgcgttggttgtggttctggcgacgctgttcgctgcgggtggcgtcaccatcgtggtcaagcgtcatgatgcggcgcgcaagtagcgcttgaagccgcgtgcgctggtcggatgcttcagcatgatgccgacgatttgccggtcggtgatgatctctttctcgtagcagatcgtgccgtcttcctgatggctcaggtatgtttcgggccgtttgccgcttctttatgtactgcaaacggacgggggattggccgatagggacgagagagaacggagagggtatgaagtgctaggtttgcggaacggagatgccggagggaagccgattctgcacggaatgcggtgcgccgatggcacagtctgcgccaagcccaagtcctcagtcgatggatggcccgacgctggtaccggctgctccccagcaggtgccagcgggttcgatgccgttgcccccaagtttcaacacggcgactgcacctacttcgacattgtcgacggcgccaggcaacggtggcgctgcgcagccgcgttccggtgggtctgccggaaagaagatattgctgggggtcgtctgatccaggcgtgataagcggcagcaacgttacggatgacgaagccgaaaataatgcaagcaaggcattggattggcaggtcgagcacgacaaggactccgcagagctgttctattccacgtataccgcacagctgtccagcaagcgtaagggtatggaggctgaaggcaagacctggaactaccgcgatattcttgcgcaattcatcacgatgcacaacaagaattcaaacgtactgcttatctggtcgggtgactggcccgcctacagcagcaattccgacaaatactatgtgattcttgccggtgagggcttcgactcgacagatgaggcttggaattggtgcaaagccaacaattacggtccgaacgactgcatgcctatagatttgcagtaacaggcgaaatgtgaatgtcgctacgttgctaggtctcctgagttacaagacgtacaatcgggagcatggccaaggacgacgacagaaccaacgagcctgaagaggccggcaagtggggtacggccggaaaatcctcaggaaagaacaacaagaacggcaagggaaaggaatccaaaaccgatcgacggatcgacaaggtattacagctcgcggtggatcgcatagacaccatcgactccagtgccagcgtgcctgaacgactggcgcgtgcggcgaaatccagtgaactgctcagcgccgtatggtcgttgccgcccgctcaacgtcttatgttccaccacggcatgcaggtcactgatgtcgaaggcgattccactcccggattcgacggcaataaagaggacgccgagaagttcatttcgatcagctcctccgaaatcgcccgataccagcggctcatgtacgcgaatggcgtcaaaggctcggcacggcggctgctcatcgtgctgcaaggcatggatgcctccggcaagggcggcattgtgcgccacgtgttcagccaaggagacccgatgggcatccattaccatggcttcggcaagcctacggccgaggagctcgaccacgacttcctctggcgtgtgaagcgtgaattgcccaagccggggtggattgccgtattcgaccgctcccattatgaagatgtggtcatgccgcacgtctatggcacctatcccgaagacgtatggcgtgcccgctacgaccagatcaacgatttcgaacgtgaactggccgccagcggatgcgccatcctcaagatcttcctcgtggtaagccaggaagaacagaaaaaacactttcttgggaggctggatgatcccaccaagttctggaaattcgatatctccgacctcgaggcccgcgaccgatgggatgagtacatgttcgcttggcaggaagtgttcgagaaaaccagcacggccgccgcaccgtggtacctcgttccggccgataaccgctggtattcgcgagccgtggtctccgaactgctgcgcaccaccttgaagaacatgaacatgacctggcctcccctcgaacccgaggtggaccccgacgaggtgcgccgccggttggcgtgagcgatcctcccattggcggagccaagcgcatggcacagctcttcgcatggctccgcccgctggcgggaggcgtcgcatagcgacggagggcggctcgtgccgtcggaataggccactaggtagactgagcattatgactgacgagaaggaatacggatccctggggcggctggcccccgaatgggacggcgacggacgcgaacggaatcttacggccgacgacatctacgaacggttcttcggctgggtggaagacgtcaagggcatcgagccgtggccgcatcaggaagaggccattatggacctcttggccggcgaccatgtgattttgaataccccgaccggttcgggcaaatcgctggtggcgctcggcatgcacttcgccgccctatgcactggccgccgctcctattacaccgctccgatcaaggcgctggtgtcggagaaattcttcgacttggtcgaagtgttcggccgcgacaatgtcggcatgatcaccggcgacagccacatcaacgcggacgcgccgatcatctgctgcaccgccgaaatcctcgccaatcaggctttgcgcgaaggcacccatgccgatgtgggcctcgtggcgatggacgaattccattattacggtgatccggagcgcggctgggcgtggcaggtgccactgctcacgctgccgcagacccagttcctgctgatgagcgccacactcggcaatgtggacgccatcgccgacaagctctccgatctgaacgacaccccggacgtggatgtaatcgccgacgcgccgcgaccggtgccgttgagctacgaatacacgctcgacccgatggaaaaaaccgtggaactcgccttccgcaacggcgaaaccccgatttacgtggtccacttttcgcaggacgccgcattggagaccgcgcaagcgctcgcctccaccggtgtatccagcaaggaacagcgccaagccatcgcagaagccatcaaaggcgtcaagttcaccacagccttcggcaagattctgcagcgactgctgcgcaccggtgtcggcatccatcatgccggcatgctgcctcgctaccgccgtctggtcgaacagctcgcccagcagggtctgctgccggtgatttgcggcaccgatacattgggcgtcggcatcaatgtgccgattcactccgtggtgctcacggccctgaccaagttcgacggcaccaagatgcgccgcctgcgcgcccgcgaattccaccagattgccggacgagctggccgtatgggattcgataccgagggactggtgatcgccgaggctcccgaatatgaaatcgaaaaccagaaagccatcgccaaggccgggggagatccgaagaaactcaagaaggtcaagcgcaagaaggcgccggaaggttttgtgacctggaaccagagcacgtttgataagctcatcgacgctgaaccggagaccctggtcccgcacctgaaaatcacgcattcgatggtgctcaatgaagtggcgcagggcggtgacgcccgtgcccgtatcgacgatctcatcgacgattccgcgcagacccccgaccagaaggagcatctgcgccagcgggccgacgagatcttccaaaccctgttcgataccgaagtcatcgaaaccgaggaccgcaaggacggtggcaaggactactacatgacccttgatatgccggacgacttcgccctcgaccagccgctctccccgttcctgctggccgcgctcgaactgctcgaccccgagtccgacacctatgcgctggacgtgatctccatggccgaggccacgctcgaagaccccaagcaggtgctgcgtgcccaggagcgtcaggcccgagacaaggcgatggccgatatgaaggccgacggactcgactatgacgagcgtatggataagctgcaggagattacgtatccgaagccactggaagacatgctcgaagccgcgttcgatcagtaccgccacgatgtgccgtgggccaacgactactggctgtcgccgaaatccgtggtgcgcgacatggtggaaaccgcctccgacttcaccggatacatcacccgatacaacatcgcccgctccgaaggcaccctgttgcgctacctctcggacgcctaccgcacgctggcgcgcaccgtgccgcccgaaaagcgtgacgagcaactcgaagacatcatctcgtggctgcgcgtgctcgtgcgctccatcgactcctcgctggtggacgaatgggagaacgccggtgactcggctgaccaatccgaggctgcggcatccttggccgcgcccggcgcaaaaagcgcggtggtcgaggaccgtcgtggtcttaccgtgctggtgcgcaatgccttgttccgccgtgtgcggcttatggaccttgaccagccggacaagctcggcgcgctcgacaaggactggggctacggcgtgcacgaatgggaagatgtgctcgacgactactacgacgagcacgagtacgtgggcatcggcgccgaagcgcgctcgcccgaactgttcatgttggatgacaagcacgagaacgacgagcatacgtggaaggtgcgtcagattatcgatgattccgatggcgaccacgactgggccatcgaaggcatcgtggaccttgacgccacccaagacaccggcgaagtagtcttccacgactacaaggtgagtaactgattcctggctcccctctctgagggaagccaaggtgcagctcgaacgtctgttcgaacactggggtactataggacgttatgagtgagaacgatttgtttggggcggctgatgcgccggagtcgatgacacggccgttggcggtgcgcatgcgtccacgcactttggacgaggtgattggccaaacgcaggtgttgggccagggctcgccgctgcgccgcctcgccaatccggccagcaaaggcagtctcaccgcgccgagctccgtaatcctgttcggccctccaggcgtcggcaagaccacgctcgccaccatcgtggccggccaatccggccgcgtgtttgaggaactctccgccgtgacctccggcgtcaaagacgtgcgcgacgtactcacccgcgctcacgaacggctcgtgtcacgcggccgggaaaccgtactgttcatcgacgaggtgcatcgcttctccaaatcccagcaggatgcgctgcttcccgccgtcgaaaaccgcgacgtgacctttgtcggcgccaccaccgagaacccgagcttttccatcatcaaaccgttgctctcccgttcggtggtcgtcaagcttgagtcattggagcctgatcagctcaccgaactggtgcagcgcgcgctgactgatgaccgcggtctcagggacgaggtcaaagccacggacgaagccatcgccgatatcgtgcgcatggccggtggcgacgcacgcaagagtctcacgattctggaggccgcggctggcgcggtcaccggcgacgaagcccgcaaaaagggcgcacgccgacccatcatcacctccgaaatcgtggctacggtaatggacaccgccaccgtgcgctacgacaaagacggcgatgaccattacgacgtgatttccgcattcatcaaatccatgcggggctccgatccggatgccgccatccattatctggcgcgcatgctgaaagcgggtgaagatccgcgcttcatcgcccgtcgcatcatgattgccgccagcgaggaagtcggcatggccgccccgcagattttgcaggtcaccgtggccgcggcgcaggccgtggcgttggtcggcatgcccgaggcacgtattattttggccgaagccacgattgccgtggccaccgcgcccaaatcaaatgccagctataacgccattaaccaggcgctcgcggacgtggataccggcaagatcggcgctgttccgctgtatttgaggaacgcccccaccaagcttatgaaagagtggggcaaccacgagggctacaagtatgcgcacgattggcccggtgccgtggcgccacaggaatatatgcccgaagagctgcgtggcaccgagtactaccatcccaacgatcgcggctatgaacacgaagtcagccagcgtcttgccaagattcgcccgatactgcatggtggggaacccgaacagaaatgaacataggggagtaaagtgtaacgcaacaatagcagtggaaaaaggggaggcaaacaccatggcgaccatcttcatcgtggacgatgatcaggccatcggcgaaatgcttagtcttgttttggaaaacgagggattccagactgtgacctgcctggacgggctgagggctgtggaaatgttccccatcgtcaagcccgatttgattctgcttgacgttatgctccccgggctggacggcacggaggtggcccgccgcatcagagctacctctaatgtgccgattatcatgctcaccgccaaatcagacacacttgacgtcgtggccggcttggaagccggtgccgacgactacgtgcccaagcccttcaaagtagccgaactgctggcgcgtatccgtgcacgcttccgcatcgccaagccggccgccgaagacggtgccaccggtggcgcaagcggtggcaatgcaaacgtcaaccatctggaacgcggacccatcgtcatcgaccgtttggaacacaccgccaccaaggatggcaaggacctgaatctcactccgatggaattcgagctgctgttcatgcttgcggccgccgccggcgaggccatcagtcgttccagcctgctcaagaatgtctggggatacgagaattccggcgatacgcgcctggtcaatgtgcatgttcaacgccttagggccaaagtggaggacgaccccgagaacccgcaaatcgtgcagaccgtacgcggtatcggctacaagttcgtcactcctgaacaatgaacctgcgccctcgattcagcctcaaacgcttgctgcgccacggacgcgctgaagttcgtcgctcactgcaggcccgcaccgtggccctcaccgtgattcttacgctggccgtggccatcgtcttctctggcgtatcgatggtatcagtgcgcgcctcgctgcttacccaaatcacttcgcagtcgcgtgccgactattcaaacatggtgcagcaggcccaaaccagtctggacgcggccgatgtctccgccgtagtgcagatccaacagctggtcaatgacttggcgtcctcgttgcaatccgaggggtcctccaacctgataggtgtgtatttgtggagtcgtgataccaactcgcgtgccatcatccccgtatccaccgaacccagctatcaaagtctgatttctgacgacatccgttcgtccgtggcttccgacttggatgacagcgtgttctatcagccggtcgaaattcccggtgattccggcatgccgggcagcgggacgcccgcagcggtgctcggcaccgtattggactttggcgtggccggcaacctcgaattcttcgccatttattcgtacacgttccagcagcagtccttgacacagattcagctcagtctggtggtcatctgtgcgttgctgtccatcgtggtgggcgtagtaatctggctggtgattcgtggcatcgtgcgcccgattggacgagtggcagcggcctcggaaacactggcctccggcaatctcgatatgcgcgttaccgtggatcgtaaggatgagcttggtgtgctgcagcaatccttcaatacgatggctgatgcgctcaaccagaagatcgatgagctggaggaagcaagcgttttccagaaacgatttgtgtccgacgtcagtcatgaattgcgtaccccggtgaccaccatgcgtatggcttccgacctgctcgaaatgaaaaaagacggcttcgacccctccaccaagcgtacggtcgaactgttggccggccagatcagtcgattccaagacatgctcgccgatctgttggaaatctcccgctacgatgccggttatgcggcactcgaccttgtggaaaccgatttatgcgaaccaattgaaacggcagtggaccaagttgacggcatcgcccaagccaaacgggtgccgattcacacgtatctgcccaatgtgcaggttttgactcgtatcgattcgcgtcgagtgattcgcatcgtcagaaatctgttggccaatgccgtcgatttcgctgaggaccggccgatcgaagtgcgcgtcgcggccaaccgcaaagccgtggccatcagcgttcgcgactatggcgttggtatcgacgaagacaaagtcgctcatgtattcgatcgattctggagaggcgacctttcacgttcacgcgttaccggcggcaccggattgggcctggccatcgccatgactgatgccttgctgcaccacggtagtatccgtgtacgttcggcagtgggggagggcacctggttcttggtattgctgccgcgtgaccccgaccaaggtgaggtggcggacgctgaactgccggtgaattttgcttctgaaacgccggatgacctgcgtgttaccggtgggtttggtgtggccaccagccaagtcacacatgattatcatgaggttcgccgcgacacgatgatggggaggccactatgagacgagtgaccagaacgattgccgccgcaggcgcggccatagcctgttgcatcacgatgacggcatgctcaagtccgttcggtttgccgattagcggctcggtgcagactctggcaccggtggaacagcagacccagcgtgtttacaccaatcctcgggggcctgcggacgatgcacagccggaaaccattgtcaaagggttctatgacgctatgcctgctggcgtgcagtccgatggctatcgcgtggctcgcgaattcctgactggctcggcttctgccgggtggaatggagattctgcggcactggtatacagcggcacccctgatttccgccgacgcgccaacaccataagcgcgccacaaggtgcggaaagctcactgattgtggaagtggaacttcaggtggtgggttccttggattcgcatggcgtatacacgccgtcaaacagcacccaaacgcgcaggcttccctatacgctgatgaagaaaagcggccaatggcgcatctcgtcattggaaagcggcgtggtgatttccaccgcagattttgaacaggtgttccgccaagtatccgtgtatcaggtgagtacttccggcaagcaacttatcccggatattcgttggttgagctggcgcaactggcgcacccaggcagtcggtgaagtgctctcggatgcaccctcctggttggaaggagtgctgcgaggcgccggcttgtctaccatcaaactcgcggtcgacagcgtgccggtgaagaacaatgtggtggagatacacctcaacagcggtatcaatgcgttgaacgaggaagaacgaggcctgctggtacatcgcatccgtctgactatgggcgacggcaatgccgaatacgcgctgaggattaccggcgatggagtggactattccgatgccgacgcaaatgtgaaacttactaccgagcagccgacagcgggcgtatacacgttgaccggtggtcatatcgtttccctggccagctccagtccgttgcgtgtaggggaggcccccggatatgacgatgctcggggcttcgttttttcctcatccggcggcgcggtgttgcgtgcggacggcgtggtcgaatgcctgaaatctgatggtgcgtcctgtggggtgatgttctccggcgagccgatgcgatcgattaccgaaggtctggatggcgaagtatgggctgtatccgagaacgggcgcgaattgcatgtgtcagatgggggcaaggaaaccgatctgaagcttgattggcttggtgctgccgacagcattgtggcattggcggtttctccggaagggtgccgattggcgttggcagtcgggggcgaggacacgaacggcgtgatgatgaccggtgtggcgcgcaacggtgataaaacactgagcggtctgagcaaagcggccacccaagtgagtgtgctcaggcacgtcaccatgctcacgttctacaatgatctgaatctggtgtacgccaccacacctcctgagggaaacagcgaacaacaagaggcatggcgtcaaatggcaccaggcccggccaatgcgcagcgtttacccaatggaatcataacgtcgatggcatcggggcagatcagcctgtctcgtcgcctggccattgtggacgatttgggtattgtgcgctccgtttccggctcactcgacggttcctggaccatcgccgatagccaggtcactgccctcggtgcgcagtagatggtataagaaaaacggtgttcataataacttttcttgtgttgtgatgcggcggctttgtcgctcggctgacgagcggcattgccgccgtgcaaccacctcttattatggcttaataacaaggcaaaacggcgctgtgaagccgttttttgaactactgttatcaaactgttataaacctgttatcaaactgttatcgcatgcgattgaacatttggcctgtgagcgtcacactagagattgtcgatgacgaacagtcaccaaacaggatggaagatcatccaaaaaataaacactgctcgaggaggagtatttatgaagaattggaagaaggccattgccctcgttgcttctgctgctgcgcttgtcagcgttgccgcatgcggttccagcaacgcaggtggcagctcggactccggcaagaagacggttggcttcgttgctgtgggccctgagggcggcttccgtaccgccaacgagaaggacattcagcaggcattcgaggatgccggctttgacctgacctactctccgacccagaacaacgatcagcagaagcagattcaggcgttcaacaagttcgttaacgacgaagtcgacgccatcatcctgtcctccaccgaggattccggttgggatgactccctgaagaaggccgctgaggctgagattccggtcttcaccgttgaccgtaacgtggacgtcaaggacgccgaggccaagaaggccatcgttgctcacatcggaccgtccaacgtctggtgcggcgagcaggctgccgagttcgtgaacaagaacttcccggatggcgccaacggcttcatcctcgaaggccctgccggcctgtccgtggtgaaggatcgtggcactggttgggacaacaaggttgcctccaacgtcaaggttcttgagtcccagtccgctaactggtccactgatgaggccaagaccgtgaccgctggtctgctcgacaagtacaagtccgacaacccgcagttcatcttcgctcagaacgacgagatgggcctcggtgccgctcaggctgttgacgccgccggcctcaagggcaaggtcaagatcatcaccatcgacggtaccaagaacgctctgcaggctcttgttgatggcgacctctcctacgtgatcgagtacaacccgatcttcggtaaggaaaccgctcaggccgtcaaggactatctggatggcaagaccgttgagaaggacatcgagatcgagtccaagaccttcgacgccgcctccgccaaggaagccctggacaacaacacccgcgcctactgataagtctgctgcgactcattgataactggaccaaataattgatgtgatggtgtgagaaggatgttccttccacaccatcactcatgtgtggctcaaatatcacaaaacgataacatctcattctcgtttaaggcaaagacatgacagataaaaaccccatcgtcgtaatgaaaggcattacgattgaattcccgggcgtcaaggccttggatggtgttgatttgactctctacccgggtgaagttcacgccctgatgggtgagaacggtgcaggcaagtccaccatgattaaggctctgaccggtgtgtacaagatcaacgccggctccattatggtggacggcaagcctcagcagttcaacggcaccctcgacgcacaaaacgccggtatcgccaccgtgtatcaggaagtgaacctgtgcaccaacctttccgtcggtgagaacgtgatgctgggccacgaaaagcgcggccccttcggcatcgactggaagaagacccacgaggccgccaagaagtatttggcacagatgggcctcgaatccattgacccgcacactccgctgagctccatctccatcgctatgcagcagctggtcgccatcgcccgcgctatggttatcaacgccaaggtgctgattctcgatgagccgacctcttcgctggatgccaacgaggtcagggacctgttcgcgatcatgcgcaaggtgcgtgactcgggcgtggccatcctcttcgtctcccacttcctcgatcagatttatgagattaccgatcgtctgaccattctgcgtaacggccagttcatcaaggaggtcatgaccaaggacaccccgcgcgacgaactcatcggcatgatgattggtaagtccgccgccgagctgtcccagattggtgccaagaaggctcgccgtgaaatcacccctggcgagaagccgatcgtcgatgtcaagggcctcggcaagaagggcaccatcaacccggttgatgttgacatctacaagggtgaggtcgttggcttcgctggcctgctgggctccggtcgtaccgagcttggtcgactcctgtatggtgccgacaagccggattcgggtacctacacgctcaacggcaagaaggtcaacatctccgatccgtacacggctttgaagaacaaaatcgcgtactccaccgaaaaccgtcgtgatgagggcatcatcggcgacctgaccgtccgccagaacatccttatcgccctgcaggcaacgcgcggtatgttcaagccgattcccaagaaggaagcggacgccatcgttgacaagtacatgaaggaactcaacgttcgtcccgccgacccggatcgcccggtcaagaatctctccggcggcaaccagcagaaggtgctcattggccgttggctggccacgcaccccgagctgctgattctggacgagccgacccgtggcatcgatatcggtgccaaggctgaaattcagcaggtcgtgcttgacctggcttctcagggcatgggcgttgtcttcatctcctccgagcttgaagaggtcgtgcgtctgtccgacgacatcgaggttctcaaggaccgccacaagatcgcagaaatcgaaaacgacgacaccgtctctcaggcgaccatcgtcgaaaccatcgctaacaccaacgtaaacaccggaaaggaggcatgagatggctgaaaaggcaaaagccgagggcaacaactttgtcaagaagctgctgagcagcaacctgacctggtcgatcgtcgcattcattcttctggtcatcatctgcaccatcttccagcatgacttcctggctctgagctggaacagcaacaccggtggtctggccggcccgctgatcaccatgctccaggaatctgcccgatacctgatgattgcaaccggtatgaccttggttatctccaccgccggtatcgacctttcggtcggttccgttatggcagtggcaggtgccgccgccatgcagaccctgtccaatggcatgaacgtgtggctctccatcctcatcgccttggctgttggtctggccattggctgcgtcaacggcgctctggtttccttcctgggcctacagccgttcatcaccaccctgattatgatgctcgccggccgtggtatggccaaggtcatcacctccggtgagaacaccgacgcctccgcagttgctggcaacgaaccgctgaagtggttcgccaacggcttcattctgggcattcccgccaacttcgtcatcgccgttatcattgtgattctcgttggcctgctgtgccgcaagaccgctatgggcatgatgattgaggccgtgggcatcaaccaggaagcctcccgtatgaccggtatcaagccgaagaagatcctcttcctcgtctacgcgatttccggcttcctcgcggccatcgctggtctgttcgccaccgcatccgtgatgcgtgtcgacgtggttaagaccggtcaggacctcgaaatgtacgccattctggcagtcgtcatcggcggtacttcactgctgggtggtaagttctccctcgccggctctgctgtcggtgctgtaattatcgccatgatccgcaagaccatcatcaccctgggcgtcaacgccgaggcaactccggccttcttcgccgtcgttgtgattgtgatctgcgtgatgcaggctccgaagattcacaacctgagcgcgaatatgaaacgcaagcgcgcgctcaaggctcaagctaaggcggtggcagcatgacaacagctacggcaaacaaagtgaaggctcccaagaagggcttcaagctcgatcgtcagatgatcccgaccctcgcggccgtggtgatcttcatcctgatgatcatcatgggtcaggcgttgttcggcacctacattcgactgggcttcatctcctccctgttcattgaccacgcctacctgattattctggctgtggccatgaccctgccgattctgaccggtggtatcgatttgtctgtcggtgctatcgtggccatcaccgcagtcgtcggcctgaagctggcgaacgccggcgtgcccgccttcctggtcatgatcatcatgctgctcatcggcgctgtgttcggcctgctggccggcaccttgatcgaggaattcaacatgcagccgttcatcgcgaccctgtcgacgatgttcctggcccgtggtcttgcctccatcatctccaccgactcgctgaccttcccgcagggcaatgacttctcgttcatctccaacgagatcaagatcatcgacaatccgaagatctccaacgatctgtccttcaacgtcggcgtgatcatcgcactggtggttgtggtcttcggctacgtcttcctgcaccatacccgcaccggacgcaccatctacgccatcggcggctcccgttcctccgcggaacttatgggtctgccggtcaagcgcacgcagtacatcatctacttgacctctgcgactctcgccgccctggcctcgatcgtgtacaccgcaaacatcggctctgccaagaacactgtgggtattggctgggagctcgacgccgttgcctccgtggtcatcggcggtacgatcatcaccggtggcttcggctacgtgctcggctccgtgctcggctctctggtccgctccatcctcgatccgctcacctctgacttcggtgtgccggccgaatggaccaccatcgttatcggtctcatgatcctcgtcttcgttgtgcttcagcgcgcggtgatggcggtcggcggagataaaaaatagcgggcttgcccgctcggtctccgcaccgaatacgacacacaccataactgaataggcgggatcagcccggctgctgtgatggcaaggtcacagcagccggcactgcccgccaaagctttctttctccttttcttcctttcattagcgtgtggggcgtggccccggggtgtgccggggcacgccccccac

SEQ ID NO: 2329 - DNA, 40588 bp, Unknown
  R119_18m  MAG No. k141_48003
ccacggaccgcatcttgcggttcaggcggacgggccttatgggagggatgggaacgggagatcagttcttaataactgcctgcgcctcatcaccggcggcctcgacggcctccacgggctgcgcctcatcgtcgacgatctcgccggaagcgagcttggcttcaagctcgtcaacgatctgcgcgtgcatcttctcggtgatcttgaccttggagacgaacaccagcaggctgagcacgatcaggatgagcggggcatagaacgcgcagatcttgaagacgtggatattcgtcggggtcatatcggcggcggttgcgtcacccgtcatgccggccgcaagggcgatgaagccgacgatgccgttcgacagagcgccgccgatcttatcaagcatcgggcggatggaaagcgtaacggcctcgttgcgcttgccgttcttcagctggccgtactcgatggagtcggtcagggagaggatgaccgtcatcatgatgagcgtgccgggaacgtagaagagcaccagcgcgatgaagaccaggacgatgttgctggagaacagggcgagcatcacataagccacgatcatggagaccatgccgccgatgtacaggtagcggcgcggaatgtacctgttcagaatcgggtacagcggggacatgaccaggcccgcgatcatggcgatgacaccggtcgcggagaaagcggcctgattgtcaaggacgaacttgaacaggaagagaagcacaccggtggtggtcacgttcgcgatggcgtacagcaggtaggacagggcgacccacagcagctggtcgttctggaacacggccttgaacgcctgcaacggaccaccgttgtcttcggcgttggcgcgaagggcgctttggttttccctggtgccgaaggcgacggtccaggcggtcatgatgccgagcaccgcgacgatgatgccgaaagcggtccaacccgactggtgctcggcgttctcgccggtgaacacccagctgaaataggtgacgaccggaatcacgaggatggtgatggcgttgccgccgatggagccggtgaaggagccgagggcggtgtaggtggaacgttcgtgggagtcggaggacaatgccgggatcatgccccagtaggagatgtcacgcagggagtagaacacgtcaagcacgatgaacgtgatgacgaacacgacgatgaacaatgtggagttaacgttcaccaggccaaacatgccgctgaaaaccacggcaagcagcacggaggagaccagtccgccgaagaactgccacgggcggaaacggccccacttggtggtggtgttgtccacgaggttgcccagcagcggatcgacgaagatctcggcgatgcggatgatcaccacgaggctggtgatgacgccgatcagcttggccgcaagcgccttgtcaacgcccgagaacaggcagctggtgacatacacgatgaagtacgtgctcatcgcgttgtagaaggcggcctgaccgaggttgccgaacgcgtaggcgatgcgctggcctaacccactcttcctgcggacgtcaccgtccgcggcattttcgttgctcattaatcttctccttaagaacccagagcatggaatcactcattgattttgtaaagtaagcatacaagttttatcaccaaaagtaaaaagcattagtaaacaaggagataaacagcgtgtcgcaaggatgggataacatgggctgaaccgagacattgcatggacgcggcgtagcgtcgacggcaagcagtgccagtgatttggaagcggtaaacaggatttgcgttttatataaaaactgtttattcttttcggtaaaggaggccccgacctcctccataatatcattcacaacgaggtaatgacagaaagcaggagagcatgacagacgtcacacatgtcgatcgcgcatcgcaggcttggctgaccgacccgacggtgttcgaggtgaaccggactccggcccattccagccacaagtggtacgcccgcgacccccagagcggacaatggtccgatctcaagcagagccttgacggcgagtggcgggtcgaggtcgttcaggccgccgacatcaacctcgaagaggaacccgcgacggccgagtcgttcgacgactcctcgttcgagcgtatccaggttccgggccacctgcagacggccggtctgatgaaccacaagtacgtgaacgtccagtatccgtgggacggccacgagaacccgttggaaccgaacatcccggagaacaatcacgtcgcgctctaccgcaggaagttcaccgtctccgcccccgtagcaaacgccaagcaggccggcggatcggtgtcgatcgtgttccacggcatggccacggcgatctacgtgtgggtcaacggcgcgttcgtcggctatggcgaggacggcttcacgcccaatgagttcgacatcaccgaactgctgcacgacggggagaacgtcgtggccgtcgcctgctacgaatactccagcgcctcctggcttgaggatcaggacttctggcgtctgcacggcctgttccgctccgtcgaactcgccgcccgcccgcacgtgcacatcgagaacacgcaaatcgaagccgattgggatcccgaggccggcaccgcttccctcgacgccgcgctgaccgtgctcaacgcggccgacgcggccacggtccgcgcgaccctgaaggacgccgacggcaacacggtgtggcagacgacgggcgacgcggaggcgcagaccgcgatctccagcgagccgctgcagggcatcgaaccctggagcgccgaaagcccgacgctgtacgagcttgacgtcgacgtcatcgaccaggcgggcgacgtcatcgaatgcacgtcccagaaggtcggtttccgccgcttccgcatcgaggacggcatcctgaccatcaacggcaagcgcatcgtgttcaagggcgccgaccgccacgagttcgacgccgaacgcggccgcgccatcaccgagcaggacatgatcgatgacgtggtcttctgcaagcgccacaacatcaactccatccgcacctcgcactacccgaaccaggaacgctggtacgaactgtgcgacgagtacggcatctacctgatcgacgaagccaacctcgaagcccacggcagctggtccctgcccggagacgtcctcaccgaggacaccatcgtgccgggcagcaagcgcgaatgggaaggcgcctgcgtcgaccgcgtcaacagcatgatgcgccgtgactacaaccacccgagcgtgctgatctggtcgctgggcaacgaatcctacgtgggcgacgtgttccgcgccatgtacaagcacgtgcacgacatcgacccgaaccgtccggtgcactacgagggcgtgacccacaaccgtgactacgatgacgtcaccgacatcgagacccgtatgtactcgcatgccgacgagatcgagaagtacctgaaggacgacccgaagaagccgtacctctcctgcgaatacatgcacgccatgggcaactccgtgggcaacatggacgaatacacggcgctcgaacgctacacgaagtatcagggcggcttcatctgggacttcatcgaccaagccatctacgccacccagcccgacggcaccaggagcctgcgctacggcggagacttcggcgaccgtccgtccgactacgagttctccggcgacggcctgctgttcgccgaccgcaagccgtcccccaaggcccaggaagtcaagcagctgtactcgaacgtccacatcgacgtgacgaaggactcggtgtccgtcaagaacgacaacctgttcaccgccaccggcgactacgtgttcgtcctgagcgttctcgccgacggcaagccggtctggcagtccacccggcatttcgacgtgcccgccggtgagacccgcacgttcgatgtcgcatggccggtggcggcgtaccgcgccgacgcccgcgaactggtgctgcaggtttcgcagcgtctcgccaaggcgaccgattgggccgagagcggctacgagctcgccttcggacaggccgtggtgcccgcggacgcgatcgcgacgcccgacacgaagccggccgatgggaccatcaccgtgggccgttggaacgccggcgtgcgaggcgccggacgcgaggtcctgctgtcgcgcacccagggcggcatggtctcctacaccttcgccggcaacgagttcgtgctgcgccgtcccgcaatcaccaccttccgtccgctgaccgacaacgatcgcggtgccggtcacggtttcgagcgcgtccagtggctgggcgccggccgctacgcccgttgcgtggacaacgtgctcgagcagatcgatgacagcacgctcaagggcacgtacacgtatgagctcgccaccgcgcagcgcaccaaggtgaccgtctcctacacggcccacaccgatggccgcgtgaacctgcacgtcgaataccctggagagcagggtgacctgcccaccatcccggcgttcggcatcgaatggacgctgcctgtgcagtacacgaacctgaggttcttcggcaccggcccggaggagacgtacctggaccgcaaacacgccaagctcggcgtgtggagcaccaacgctttcacggatcatgcgccgtacctcatgccgcaggagacgggcaaccatgaggatgtgcgttgggccgagattaccgacgatcacggccacggcatgcgcgtcagccgcgccgatggtgccgcgccgttcgcggtaagcctgttgccgtactccagcttcatgcttgaggaggctcagcaccaggacgagctgccgaagccgaagcacatgttcctgcgcgtccttgccgcacagatgggcgttggcggcgatgattcctggatgtcgccggtgcacccccagtaccatatcccggcggacaagccgatcagcctcgatgtcgacctcgagctgatctgatcagaattgatccgatagtccaccgtgcaaacgatgtggcccccgacttcctcgcaggaagtcgggggccacatcgtttgcacggtccttgttagtccagcggatgcgccagatatcgatgcagatccaaacctagtcgttgtagagcatcaatgaataaagatgtcactcataagctatcaagagaatccagaaccttttttgaattcatatgctcgacacgcaatgtatccagcgtcgtttacaatgattcattgtgccttaatggcgcatcgggctatagcgcagtttggtagcgcgcctgctttgggagcaggatgtcgccggttcaaatccggctagcccgaccaaaaaccccggaatctcaacgattccggggtttttccttttatccagttcaaaccgatttatccgattttatccgatgaccgcagaacctacgccgcctcgtccagttcctccgccctggcacggcccacagcatcggccacctcatccagcttctccggccacaaccgcgcatacgtgtcaagcgtgaccatagcgctcgaatgccccaactgggactgcaacgtcttcacgtcgcagccgttggcaatcgcgatgctcgcatacgtgtggcgcaggtcgtggatgcgcacgccggaatcctccatacccgcacgcctgacggccggactccaaatgcgcgacctccacgtgttgacccacagattgccgccacggaccgcacggaacacataatcatcaggatcacgcccatcgcactgacgttccaaaccagccacaagaaattcagggaacgccacccaacgcgccttcccgtttttcggggaaccgagaatcatcttcccgtccttatcctccgcccaggtgcggcggatgcgcgatcgccgacggggaaagtccatgtccttgacctgcagagcgaaggtctcgccgatgcgcggcccgacgtaggcctgccatcgaacgatgagcgtgtcctgcgggtcgttctttactctgccggcctcgatggccagatcctccacctcggaaatcgagagaaataccatgtcgtcgtcatcgtcgacgacgcgcggagtggcgacggactgcatgggattcgcggtgatatatccctgtttcagagcatggccgagcacaccgcccatgaccacgcgcacgatgttgcggatcgaccgtggcttcaacgcgcgagtgttttccgttccgcgttttctgtcggccggatagccgccctccgacagttggttcacccatttctgtatcgcttccgtcttgatgtcccctatgggggtgtcgccccattgggggttgatgtagattctaagttctcgcttgtagcggcgcagggtgccgggtttgatgtcggctttcgttgccgtccactcctcggcgacccgacggaatggcttctgcgcgagcttggggtcgtggtagcggccgcgcctgatgtcgtcctccatggcggctttgaactcctccgcgtccgacaggagccggaacgttttggacttctcggtcttcacgccctgtgcctcggcgtaccagcggcatcgccagcggtcgtactttccgtaggtgctgctgcggtgttcggcgggcaccttggccttcatggggtctttggcgttggcgagactgcgcttcatcgcagcagtcggcggattgccgttctcgtcgtttttgagccaacggtcaacgatgaacactcgtgccataggtatgctccatcttcatctcacgtgctcatagagcagcgccctgtagtcttcgatgatttggacggttatggtgagtacaatggtttgtgtggattgggagtacccggtcggcgaaggtttcggaagtgattccggagcctttcgttttactccggccattccggccagaatccgaccggccctgttgacgttggcgcgttagcagggcttttctttactgcttggcggttttgacggtgatggtggtgccgagcgcggtggtctcccagctcacgccgtcggcttcgctgtaggtgaagtccttggtggcgtcctgcgaggcgagcagggattgagccatggtttcggtgtcgccctggctggtccacttccagtcgccggccttggtcggggcctgataggtgcccttccaatagaggctcttggtgtcggtgccgatccagttgacctcgatggtgtcgccgctgatggtggcctccatgtacgagttcgggtcgttggagttggtttgcttccacgtgccggtcaggtcgtccagctggggtttgggctcttccttattggtctcggtctttgacgtgccatcggatttggccggcgcatcggaagcggcgttgctccctccgcaggcggtcagtccggcgagtaatagtgtggccgcgatcaatgcgactgacttcttcatggttctcttcttctttctcttagagggccacactgtcgtgcagccagtttttgtatgcctggattatccaaggcattacgttgagctcacgcgctatcgcgcattcatcgttgccgtataggatttcggcggtgatgtagtcggcttggcttatgagcattcgagcagcctccgcgtctgcgcgctgctccgtgtaggcgtcggccttgcatccaacgtcgtggtgcttggcgtggctgatctcgtgcgccagcacgcaccgacgctggatggacgagagcctgtcgctgagaatgatctcgttgcgttccacgtcgtatacgccctcaagcccatccggaagcggtcggtcacgtattcgactcgcccactgcagggcgatgtactccaaagcgtcctcgctcatggtatcctccagtatccatatgaacagcccagccgacactcgccgaatgtcgttggtactcaggattgggagcgcccggtcgacaaaggcttgggaacgatcctgagcccttttgtttcattctgtgcgtttctaatttgacttccttgacagtgcatggcagagtaaaaagtactcatccgcctaggtgcgtgaacgagtttcctgggtcgctacggcggcccttgtttattattttattggattatttttcccgcccttttcgcgcggtcgtatctgcgaagctgtccgttatagctgctctcgtaattgagatagtatgccgtgaccagcatgcagtatggcctttccttctccggatgcggctccagtataacgaggtatcgttcggggcgaacgagtatgtgtactcgcgttctgttgcgccaatcctcctcccatatcaacggtttctcgcattgcgtgtaggagcatgaaggacattcctcgcaatagtcgatgctgggacgggggtatctgatgcgctcgcaacggtccatatccgtcatgcgctgtcctgtttcatggtcttcctcggtagtgatatgcacgaaaccggcccatttgccatccgactcttcctcccgtcgtctcacatgcacgggcaatccacggtagtgagggtgggaaactatgaaatcgttctcgaacactgcgtacagtctgttctcgtaatgggagaaggtctcattgacgatttgagacatgagcggcggaacccagtgcggtgtcatgcgtggcctccagtccaggcaaagagattgaatttacgcgcgccaggagtcgtggattgggtgagcttcaacttggatcgattctgtatgcgccagatgatttccctttttgccccagccggtggcttgatgtctgtccgattcgccctgcacacggcaccattgatgacatccacgatttgcatcatctgcacttcatccgatcgtatcggctgtatctttttaatgcacttatgatcgaaatcataatggctgttcgcgcatatctcgttgagcttggcagccctttgcgcggaatgagtgtctttgacatccagatacacgttgtatgtgttcgatgaatcaaacaacctgttgagcatggtgaaatacatcttgtaataccaatcattatgcgattggttataatcttcatgccgcagatgggtcttgtcggcgacaagtaccctgaaccgcatatcgtcatcatcgaagaagtaatccacgagatcggtgtataggccgatttttggttcgctcgcttttgtccatttcacctcgacatgggcggagacgccatgcttcgctttgatgtctacgatcctgtccttgacctcttcttttttgtcctcgggcaggatgagcgcgcccaataccatcacattgctgttgtcccgctccaggtggcagctctcgtcgcaatacaggttgtattcggtcatggtcactcctttgcgattcgctcaatctgtatggaaattccggataactcgctcatggcatctcctcgtaggcttcctgttccgcctcgatgtcgccatgcttcgcggccatcgcatagtaatcacgagcgttcgcgtcatccgaatcggacgacaaattatattcgcccatctcagcaatgagcctccgatatgcggcatctataatgtcccgaggatcaacaccgattaactcgcacgtgttcagcaacgcttccataggcattgatggtttagcgttgagccatcgagagtaaccggacttcgaatgcccaagttttacggccacttcagcctgagaggtttcatgtctcgcaaaacttgctttaagctccagtccgacaagttgcgaaaacctgtggctgcgttcgtcctgaatattactcatgtgagtactttacatctcaaattaagcaattgcaattcacaaaacgcaataacgttgctcaaatgagacacgccgacgttgaccgtggttgtatcgagatatagcattgctcacatgagcaacgttaatgcatgggtcggccatcaagtcgaaacgaaaatacagcaaaaaggactgacgaaaaagttcgtatcagaaaaatctggtatgccatacagcagtcttaacagcaaaatcaagggctatcgaggatttgaccttgatgacatcgtggcaatcgctgaggctatcaacgaatctcccgctgcgttacttcctccccaattcactgctcctgcaatcgctagaggtgcggaatgagttttgaatcgtctttgaatctgaagctcaggctactgctcgacggcctgcgggtcggggaactccaccgcttggacaacgcgatgcttgacccgcaggcgctcgccgacgtgctcggcgcggacgacttcgcccagctggaacaggatatgaaccatgaggcccgactgctccaactcgacgccgtagcccgcttctgcctacaaatccttgactcggccctcatccgtcaaggcgaggatggtctcctgcgccccgtagccgatgaagtgcacggccttggcaagttcccttacctccgcgctctgtgcgctttccttgagccggacggcgatattcgttccggtggcgatgttattcagcgcgttcctgagcaattccctctgggatgcgaccatgatgcttctcctttgaatgcgcgccatgccctttacacggcgcttaccagcattctaggagaaaacgggggcgacagcttctccgccgcccccaccaacactccaacgctcactgctgagaacacccttccggcgctcgccgaaggaggtgcgaaatgagaaaaatgagcaagggcgatgtccgggagtggctgcccggtgagtctcttgaacgggttgacttcggcaacggcgttacgggaatggataaacgctgcccgaaggacgattccgactggggattgaaacaactcatgtggaaatgcgctgcaatcgcggcagacggcgggcctcacgtgaaagtggcattctgcgattattggatcgacggacaaaaggtaccgggacagttccaagtgagctggacgggacatacttcatccaccggcggattcgactcgacatggtcgtatctcaccggactgcagaacggctacctcatggcggatcatcactgttccggcttgtatgccactctccgaagcttcttcagcggcatgttcggctcgtcgtcccaacgccatgagaacaccactggaaccgggccgttggtcacgtactcgatggtctcggacggctcgaacgaatccggaatcttcgttcgcaaccgaagcacatatgaatcatcatcaagcgtcaccgactccacgtacaccctgcgagaaccggtgattgtcacacgtcgtatggatccgcgaacccattccgcctctccgaacggcggcttgtcgaactccgcccgttgcatggcggtctgctcgttcagactgtcggcctggtcgcgcagggcagctatctggcttttcagtaaatcgatgtcatcacgccggtcgttgtcgcgttccttggagcttctgtgctccatgacccatccggcaatcgtcacgaccagggtcagcacgaatccggcaagctcgacgccatgttccgcaatccaattcatgaaccacacactacatcaatccaacatccttgttctcgctggaggtgcgaaatgagtggccagaatctcgtcgacgttctgcagtttgtcttgattgtcataatcgcgggagtacagattatgcatttctcctatatcaggcgtctttcggacgtgctggaatcttgcctctcccatacacggccatctccgattcctccggacgatattcgaactgattgccgatctccttggacaagagatatttacgggaacagcgtggatcgtgccgatacacgggtgagggacgaaacacgacctttacccagcaagtctcccaggacgcaaaagaaggcttcatcgtgaaaacgacatgttccccggccttgatgcatcccgcctcgaatgtctcccaacactcccactccttgcctgtatccggattgacgccattgcatctgatcagcctcacgtcatacgcatcggcatcaccggtgttccacaactcgagattaagcaccatgtctttcttctcgccggcgaagtacgtgggatgcgcttctccgacgaccagccattcgaccgttctgcgatcccatacacgcagaatcaccgtcaccgcgaaagacacgactgcggagaccagcgcggtcacaagaatctgtcccaaatcaatctgtcccaaaaccatgcagaaaagcgtagtcgctttcctgggcgtctggaacatcgtccaataccttgcaaaggaaggtacgaaatgagtggatataaggcaacccctgcggtgcaagcacaggggtgtggtcacggcccgttctcagatctgttcgaagctgatggggcatccgggcgtccagtacgcagttacgtcgttcccggaatccgcgagcttgccgctgaagacgacccctccttgcgtcctggtcgacgtggtgagcttctgggagatcgcctgcgtttcggcgtcgtcgaacggtccgatcagctcgtcgttaaaacggatattccattgcgccatgtaatcacctcccttctttgcgtgggtgccctcattgtctcgctcgaactcgccggcaaggaggtgaagtgatgggaaccgtcagcacccgcattgaagaaggggacggtttcaaagtcctgagatacgggctcggaagcatcgttctcatcatcggctatccccagtcggaaagcgacctgatcgacgcgcgagatgccatcgccaaacagttcgattacgaaatcagcatgaacgggcgacggcacggcggacatcgttccgtccgcgccgccgccatgccggagtcagtcgtcgatctcaaccagcgaccaccacagggcggcacgcggattgagatagataagagacccctcggggacaccgagagcccgacctcgaaccgaaaccacgccacccgacgcggcggcgctctccaattcatcgagaatcttcgacggatactcttctcccgctaaatcgacaaaccgtcgcttatcggcggtcgtctcaaacacgagtcgatacgtcattattcttcacctcctctcattgctggtagttaggcaatgtccagcttaggggaggtgggccaacgcataaaaaggaagaaaaccaatgagcgagaaactcaccatcgcgaaccccgaggacgggaaccgtcccctctcctatcaggctctcagccacggcatcgacgaaatccgtttgggtgacatgggcatcacggacgcggtgtggcgcgggccgcacagcgagctcgtggcgttggcccgtcgaatcctcgacgcggaggccggacgatgaacgcccgggattacggacagcacgcgagcggctaccgcaggcccgagctcgacgaattgcctcgcggcttcatggtccggttgattctctgggccgtggttttcgccttctgcatcggctgggtgatgtcgcacgccggttgcgcgcatcccatcggcaatggtttggcctcccttgtgggattcggttgcgcgccattgcggctcctgtgccttgcgctgagcgaggcgggagtcgaataacaggcttgccggggttcctgttctttccttccccggcaatcgacaaggacagtcgttaacaccatcgcgccgcgctcggagcagcgggtgtggcgcatggggccggcaggttcgcccccgctggagatcacggtgtcatgtacgtggcaaacagcgggaagccgttcgattcggcacggtccaccccccatatccaccgacatcgaaggcccctcatacgggccggaaaggagaaccatggccgacgaaacagaacccgcgatgttcgacgcgttggaaaaggcgctgatgccgttgaacagcgcacgccagctggccgagctcagcggcatcggcgaatccacgctggccgaatggcgcggaacgcacacgggacccgcctacgtgaaatccggccgccgcgtcctctacccgaaggaggccgtgctcggcttcatgcgcgccaacctgcgcgaatgcaagaaggccagcgcatgaccggccagccgaacgactacgagcatcgcgccgagggcgagtccacgttcgaatggccgttggattccgcggggatgcgcatgagcgcgggcgaactattggacagcctgctcgccaccatccagcatctcaaccgcacggacgcatggccactgaccatactgccgccacgctggacggacgtgatggtcgaccgggaacgccgccagatctcggcggtctgcctgtggaaacgaaaaccagccaaaaaccataaggagggatagatgtgcgagaaacccgaaaccgaaaccgaaaccgtgacgccgcgggtggccttcgccaccatattgcagtcgctggtggccgagtcgccgaacaagcccacgctgcccgtgatgctgtccatgcttgaccaggcgatggatcataccgggctgcgactggagcacgccgccgcgccggcggaccatgaggacgatgtggcgaaagccagccgccgcctctcgcgcagggcgtatgacatgacgagcctgctggccgacggcgcggccggcgccggcgactgggagctgttcgacctggccgacgaggcacgttccgccgccgttgccctgctgcgcgcgttggatggtgatgcgtgatggcgggagagaccgttcttaccatcgtcggcaacctgaccgccgaccccgagctgcgtaccacgggcggcggggcgaccgtggcgagcttcacgatcgcttcgacgccgcgcaactggaaccggcaggccaaccagttcgaggacgggcaggcattgttcatgcgctgctccgcgtggggcgacatggccggccattgcgtccagtccctgaagaagggcatgcgagtgatcgcccagggccgactgagacagcactcgtaccaggcgcaggacggctcccagcgcacggtcatcgacatgaccgtcgacgagataggcccctcattgaggtatgcgaccgccgccgtcaaccgtgtccaatccggtcgcggctattccggtggctcgacctatggggacccggccaaacccgccaaccagcaacaaggctggcagaacggctccccgactcccgcgcagaaccccggcatgccggaaggcgacccgtgggctcagccggcacccgcctctcctggcgccacgttcggcgcttccaacgatttttcatcagacagccaagaccccgaattctaaggagattcaatgtcacgaaagaaaaagaccgatggcgtgcaggacgcgctgatacccgacgagatcacgccgctcatgctgctcgccctgacagccaaggcatcacgcatgaaggacgccgcggccgcgttccgcatcgcggccagcaagatgctcgacctggccaccaaggatgaatacatcgaaaaatacaagaacatcgaccccatcaccgacgccttgtacgacgcctgcgatctctcgcagcacatcttcgacgccgccaacgcggtcaacgacctcattaactatccggtcgaggcccgcgagcgcgtggtgaaggcggatatcgagcgcagtttgttggatccgtggcgtgatctgcccacgtctggtgtggatccggataccggtgaaatcaaggaggactgaatcatgagcaaacgcaagcacggacgccagcaactggagcatgagcgccaacgccggcgcaggaagcgcatgccgcacctgcccgtacaccagaatctatcgatcaaggagcagtgacccgattcagtggctatcaacatcatcgatatcaacgtaaagagcctcatcccgaacccgaacaacccccgcaaagacgtgggcgatgtcaccgaactcgccgacagcatcaaggagcagggcctgcagcaggcgcttgtggtaacccccgaccatgaggagcacggcgagcgcctgtttcgtgtggtgattggtcatcgtcgtttggcggcgtgcaagctggctggcattgagcgggtgccgtgtgttgtgcgtgagttggatgcgaagaccgagcgtgagctgatgctggtggagaactgccagcgttccgatttgacgccgttggaggaggctgacgggtatcagggtttgcttgacctgggtgccggtgtgggggagcttgcggcgaagacgggccgttcggagtcgttcgtgcgtggccggttgcggatcgcgcgtatccccgccgatgtgcgttccgggtcggaggcgttcgctcagttgtcgctttcccagttgggtgatcttgcggagttcgaggcttatcccgacatgatggctgagttggcttcgatggcgggcaccaagaactgggattggaagcgtggccagctgcggtcgcgggttcgcgtcgaggcgtggcagcagagcatgagaacagcgcttgaagctctgggcctgactgtggatgtctcggcttcgacgtggacgacgccggagggctaccggttctacgacgtgtggagcggcgagtccgacgagttcgagaaatggtatgggcagtggcgcgagaagaacccgtacggcgggccggtgatccgattctccgagcgcaccgtattgtgcttcccgcaattgtcgcctgaggagatcgccgaacgtgacgccaagagcgagcggagggaacgggagcaggcggcattccaggaggcgctggccgcccgcaaggaattcgacaggctggcgtacacgctgcgcacggactggatcaggaagcacgccaccggattcaacggcggccagttgcgcaaggccaacacccgtctgagcctgctcgcgctgaccggcaccaacctatgcgacggcctgatcgcaggggccgaatggaacaacctcgaccacgtgctcgacgcatacaacctgctcgccgccacgccgctgccatgcgacgacacgagcgataggggactgtggcgcgaaacgaacctcgcggaactgcaccgccgccagcacgtcgagggagccgcgaacagggaactcctgctcatcctgtgcgcccagatcgaagcactcatcaaacccggcacatgggccgacgagtgcgacatcaccatcgcccaagcctactaccacacgctcgcagacctcggataccccaccagcgacgaggaaaacaaggcactcaacgggtgtttcctgcccgaagacgacgaggcgtagtgagccatgacatggacccagatagacgacgggctcaacttcagcccgcagaccatgcccggcacggtatcaaacgccgcgttgggcctatgggtcagactctgcgtgcacaccgcgtaccagctgcgatttcccgcattcgacggcgcattcgacctcacggtcgtgcgctcgctgaaaggcaacgcacggcaggtgacggaactggaggccgcgggaatgctcgaaccggcgctcgccgccggccggtggatggtggtcgaggccgacaccctgatgaaattcggcggcacttccggcagcgaactcaaggagaaaagagccaaggccgggcatgccggcggcgtcgcttcgggcgagtctcggcgaagcaaacgcgaagcaaatgcttcgaagcaaaacgaagcaagtgcttcaagcaaaccgcgaagcaagaccgaagcaaaccatgaagcaaaagacgaagcaaacggtgaagcaaaaccgaagcaaacgtctgaagcaaaacgaagcaattgcttcgaagcaaacgaagcaaccggtcctaacctaaccatacctagccttacctcccctgtagccccctccgcaccgaacgccgagccgagccaagccgtggccgaatccggccacgccaggccggtgccgagcctcgccgaagccgaggccttggccgaggccgacccgttcgcgttcgcctgggaccggtacccgagccataccggcagccgcgaccaagcccaaaacctgtggcaggccgtcaccagcggcagcgacccgaccatgccccaggccgagccgagccagctgctcggcgccgtcatccgctacgcccagaccgtgcgccaggacggcgaccggttcgtgccgtcgatgcgcaaatggctcgaaaaccggcaatacacgcaatggctccaaagcgtgccgaaacgcaccgaatggggcggcgtcacccgccaatggctccaaacccacgccatcagccaagtccccgaaggctcgtggacggacagcgtcgaacagacgttctgggcccacgtcaaaaccggcgaagagccggagaccgtggcgcaacggctcgtgacggaaatcaacgaaaggcatcaagcatgagcgaccaacccacagctgcgaccctgcgcctcgtggaaggccgtgaaaacaaccggtgcatcgtctgcgaccgatacctacgcggcggcgaatggcccggcagcagccaccaccaccggaaacgccgcagccagacatacggcgaccccgaacggcacagcccctcgaacgtcatcgacgtgtgcggcacggacaacagcaccggatgccacggatgggtccaccagcaccccgaacaggcccgagcattgggctacctgctcaaaagctacgaccccgagccaagccaagtgcccgtgtacagctgccggcgcggctggatactgctcgacaccgacggccaatggcattcatgcccgccacccgaagacctccccacccacatcaacatcaagaaaggcaacgaatgaacgcccacacagcaaccccgaaccgccccaaccccgtcatcgaactcatccgacgtctccgaaaggccacccaccgacccgaaccggccaacgatccgaccatctgcgcgatctgcggcgcaccactcaccgacaccacgtcatccatctgccccgactgccaggaactcgaaaaggactggtaagcatgcacaccaccgcatggatcaacgaccccgtcaacagcccgaaccattacacgcgctcacaccccggcatggaatgcatcgaccaagaaagggaccaacaatgaccaaccccaacacctacaacacggcctgcgtcaccggcgtcatcgacaacgtggacttcacgctacgcgacgactccaccagcgtgaccatgctcatcccacccgacaccccggtaggcaccagaaccatcatcatcccccaaggcttcaccctcgccgaacaccggatcatccgcgaagccatcgccgacgcgctcgccgaccacggggaggaactatgagccccgaaaaaccagacgctttgctgtggatggacgtggaaaccaccggcctcaacacgaacagatgttcgatactcgaaatcggcctgcgctgcaccagcatggacgcaacccgcgagcacgcgcgcctcgaagcggtcgtccacatcagccgggagaccatgctctccgcgcaactgcccgccctggacctgcacctgaacaacgggctgctcgcccaatgcgagaccagcgaccccgtccactgctcacccgaggcaatcgcacgggaagccacaaggttcatcggggacatggccggcatgtacaccttgcatcccgcaggcacgaacatccaacacttcgatttgcccatgatcctcagattctgcgccaaggcccgcgtattcgattcatcgcccatcgatagcctgctgtcctaccgggccctcgacgtgaccacactgcgcctcaccgccaagaccctcggccaagacccctacacgcaccgggcgaagcccacgcaccgagtccacgactgcctgaacagggacatcgcggaataccgccactacctcaccctcatgacggggccggcgctcgcagaaaaggaggaccggccatgaagccacgctgcatcctgtgccgcaagcccgtgcccgacaatcacacccgatgcgtcaaacactggctcaacaaccaggaccaatggatgaaggacgaccaaccggcacacgagcactgcacccccccgaaggagacccgcatgagccacacggcacgaatctggacacaagaccaactcaccgaggcattggcgagcgcctgcgtgctggaaggcgtgagcatcctgcacttcggccaatactccgatacggccagccggaacctcaaggcggtggccaagaccatgtacgagaccagtggcgagccgaccatcgtggaggacgacgatgagtgacctcatccaacaagccctcacggcgctcgccgacgcggggctgggcaacgagtcagccgccgaagcgttcgtcgtcggctaccaggccggctgggacaaggcgttcaacctggccatccgcatcgaaaacgaactcaactcggacgagcccacagacgaggagatcgagacctgcgcccgagggttcttcgagggcacacccggccccaccaactgggacgccgtcagcgaagtctccaaacaggcatggctgcacgcggccaaaaaggcgctcgcagccgtcaacgccatgaaaacaaaggaacaacaatgaacgagaacacagccctcaccgacatcatcgacgcggcgctcgccgccggatgccagatcagcgtgaccgtcacacccaaagacttctacgaacaggagacggaagaatgaacgtgagcgaaagcatcgactggcagcactcaacaccgagcgaactgttcctgcaccggttcgtcgccatcacgaagagcggccagacactggacggctacctttcctacttcccccaaaacggctggtggatcctccaggacgcggacaacctcaccaccgtcatcaaaccggacgccaacggcaaccccacactcaacaccgaactcttccgctccatcaacgtgctcaaggagacaagatgaaagaaattacattaatcaccaccgatttttacattagcgtgctcggaggcacgcgatgaagcgcggaagctggtcggtggaatccaccatcgggctcgtcttcaccatcgtcatcgccgtcatcgtcgcgatggtgctggccgtcatcggcctcaccgcctacgcggttacgaccccggcaccggaacagaccatcatccaacgggtcgaaaccacgggcgacgtgaaacgcctctgcatcgaagcccgcaccaataaccgtatcgatgccatgagctgccagctcatcgacccgcatacgggaggtgtgaagtgagcgcgacgaacaaccagcgtgagctgatactcaaatggcatcggagcaaggccgcgacacccgagtacacggcgaagctcctcggactgccgctgaacgaggtcatgtacatcatcgcccatccggaaacgtccgcaccccacaaggacgattccaccccggaattcatcgaaccattgatttgattcaacgcaaataaacgaatcattggaataccgccaatcccatccaatctggaccggcggatacgacgacgaggcaaataaaacgaaaccctccaccaaaggcggagggcatgtcagcaagcaaccagtttagccgatgtggaggggtttcgtgaactgccagaactgcaacaccataatcgaaaacgggtacgcgctgtgcacggcgtgcgagctgcgcttcgccggcacgctgctgcaattggcgcgtgacgtcacgccattgcatgacagcctcgacgccacattgcatccgggcgggcatgcgcccgtgcgcatccagacggccacgccgcccacgcctatcaggctggacgtgctcgacctcatcgacatgctcgacgccaccgcacgcgaactctggcgctgcctcgacggcatcgacgccttggattggcacaaggatccacgcatggaggacctcgaggccacgctcatcgcatgcgccggccaccccaaactcgccacattccacgacgcaggcctctacatgcacatcatcaacaaccttgcccgcaaggtcgacctcgcattggatccgcccgaacaacgcagggagatcggcacatgcgaactatgcgagaccatgctcaccgcaggcgcggcagaccagtgggtcacctgtcccgtgtgcgggagggaacagcgagcacagacggtcaaactgcgtaggctcaagacgttgtgttgggatgattccaggcgcgggtctgcggcggagatagccaaggcgttcaccgacgcgggaatcaccgtgcgcaggggcacgctcaacgtgtgggtcaaccggggcaagctgtgcaacggccctcagggcatcgcctactgcgacgtgtaccggctcgtggtcggaggtgcagcttgacaaaatctcgactgtaaccgatgattgcagtggcagaagtgtcgaaaaacccagctcacgtggctgggttttcgcgtatctgaccgcattgcatggggcgagagtactccgccggcacgtccaaagcgccggtgatgttcgccccgccactctttttcatttgattgtgaggcgatgacgccatgacaatgccaggcatgccgaccatcagcctgcagatcacgtgcaaggggaacgccctcgccgacatcgacgccctcccggtgcccgtgagcgtcaccccggccgggcatattgtggtcgaccccctcgaacccgtcatgcgccgggccgtgcaggcgttcgcggacgcctggcagcagtcgtgcgacaaggccgggtcatgagcggccaccgtggcaacacccgtcatgccaatggctggcgacgccagcaggtcgcggcccgcgtgctggcggcctacgacacatgccacctgtgcggcaggcccgtggacaaatcattgccgccgggattgccgggctcgcccgaggtagacgagatcatcccggtcagcaaaggcggctcgccctacctgttctccaactgccggctcgcgcaccgctggtgcaaccgcatccgctccaaccacagcgtcgcgtgggcgcgcgaacacatcaaacaaacattcgaacaggggtacacggccgacctgaaggccacctcgatgccgttgaccacgagcggcgactggtgacgtggggaggagacccgtccgccccggtcgaagccccctcgggcgcagggccgatatctccccggcatgtcaaaacgtaacgccttggacggccgttacgttatcccgttacgtttttttggaggtgagcgcggtgatctgcgaggaatgcggccagccgttcaccccgtccggccgtggcaagaaagcgaagtactgttcggccaaatgcaagcagcgcgcctaccgcagggccaagcgcatgagccgcgtcaccacccctcccgccccggccggtgacgtggaacatgagccagaggcgatggacgccctcaccgccgccgatttcgaggcgatgatgaacgacgggcccgaggactacgtgagcgtgctcaaacgcacgcaggcccggctcaaggaagccatgttcagcgccggcaccccgccgggcagcctgaccggcatcagcaagcagctgctcgccctgacccgcgaaatcgaacggctcgaaggcaaccccgtacaaggcatgacgacgcaagaagatccggaggacgacgacgatgacggagaattccgacccgaagctatctgaggtcgcacgccacatcgtcatgccctccggcatcgtcaccagcatgttccccaaggtcaacaagcgcgccaaagcatgcggcatccgctacgaccgctggcagcagggactgctgacgctcatcctcggccgaagggccgacggcacgttcgccgcgtccgtcggcggcgtggtgttgagcatctgccgccagaccggcaagaccttcaccgtctccagcctcgtggtcatcctgtgcacgctcatccccgacctgaccgtcatctggaccgcgcaccacaaccgcaccaacagcaacacgttcgaccacgtgcgcaccctggtacgcaaccccgcgctcatcggatacctcgaccactccggccgcaccgacggcgtgcgcggcggcaacggcatgcaggaaatcaccttcgccaacggcagcaagatactgttcggcgcacgagcccagggcttcgcccgaggcaacgacgccgtagacatcatcgtgttcgatgaagcgcagatcctgaccgaacaggccatcagcgacatggtgcccgccaccaacaccagccccaacgcgctcgtcctctacatcggcaccccaccgcgccccgccgaccccggcgaagcgttcacggaacgccgccgccaggcgctcgccggcgaggacgacatgctctacgtggaattctccgccgaccgcgacgccgacagcgacgaccgcgcccaatggaggaaagccaacccgagcttcccgcgccgcaccagcgaaaccagcatgctgcgcatgcaacgccagctcggcaaggacagcttccgccgcgaggcactgggcatctgggacgagaccaccaccagccaggccatcaaccccgaacaatgggccaaagccgccaccggcacacccaacatcaaaggactgatcggatacgcgctcgacatgaaacccgaccgcagctcgctggccatcggcggagccgtcaaccacagggacggcaccgcgcacatcgaactgcgccgcttcgagtccacccaatccaaaggcacccaatgggcggtcgactacatcgccgaccactggccgcgcacagcaagcgtggtcatcgactcgcaatcacccgccatgagcctgctggccgacctcaaagcccggcacgtgaaagtcatcgtcaccaactacagcgacatgggccgcgcctgcggcaaattcctcgacatgctcagagacggcaaactcacccacctgccggacgacaaagcaccggcgctcgccacggccgtggccaacgccaccacacgcagcatcggcaaatccggcgccgtcggatggaacccgatgggcagcgacatcgacataagcccgctcgtggcatgcacgctcgccctctacggcaccaccataaccaaacgagacccggaccgagtacaggaggtcatgatcggatgagcgaacaatccatcagcttcggcaacccctacctgtccacaggctcctcgtccgtgacacacatcgccaacgtgcccgacaacgacatgacggacatcacccgcctactggaactctggcgcaacaaatacccacgcaacctgctacgctccgcgttctacgacgccaaacaacgattcaacaacctcggcatcagcatcccgaacatcgtcgcccagaaagccggcgtcgtggtcggctggccacagaaaagcgtgcgcgcgctcgccgacaagagcgtgttcgagggattcgagaccgccgccggggccgacaaccacggcatcgacgagatcatgcgcatgaacgagctcgaaaccgacatgagcgaggccgtcatcagctgctacaagcactcctgcagcttcctgaccatcgactacgacccggacgacaacgagcgcatcctcatcaccccgcgctcggccgactggtccgccgcactatgggacaacgaacgccgacgcatcaaagccgcgctgaccatcaccgacagcgacaaatggggcaacatcaccgcattcaacgcatggctgcccggccgcaactacgcctgcatgaaaaccggatacgggtgggaagcggaaccccaatacaaccggctcgaccgcgtggccgtggtgcccatcgtctacgacaagcagatggaccgccccttcggccgctcacgcatcaaccgcgccctcatgaacctgaccgacatggccatgcgcactatggtccgcatggaagcgtccgccgaattctactcggtcccaaaaatatggttcctcggcctgagccgcgaatccttccaacaggacacgtggagcgcgctcgtcagcagcatcaacgcgatcagccgcgacatcaacggcgacatccccgaactcaaacaggtctcccaggcatcgatgcaaccccacggcgacatgctcgaaaccatagccatgctcgcctcggccgaaaccgacatcccacccgaacaactcggcatacgactggccaaccccaccagcgccgaagcgctcgccgccgccgagaaccagctgacgcgcaccgcgaaccggcagaaccgcatgttctcccgccagctcctcaacgccatgggcatggccgtgcaattgcgcgacaacagcccgcagccgccagacctgaccggcatccgccccctgtgggcgccgacccgcgaagtaagcgacgcggcgcgcgccgactactacacgaaggtcgccggcgtgaacggcgactgggcggattccgacgtgggactggccaagctcggactcacggccggcgagctccaatcgttccgcgcctaccagcagcggatgaaggcgcagaggaacatcgagcagctcagacagcagcggatgaacccgcaggacacggaggcggctgatggcagcgaatccgaaggccccgccggaactgcagccgctgttggacagggcgtacagggactaccagaccgaccttgacaacctcagggagagcgcggccgacgtcatcgagaacatggtcgaccgcgaccctttgaacgtcaaggacgcgatccgcgacttctcccgagacgcctcccagctggcgaacgaatactacgacaccgtgcgcggcctgtggagcgaatacgcgggcgtccggctcgacgacttcgaccacacgcggctcatcgaccccgaccgcgccctctggcaggtgcagggcggcttcaacaacaccgactacaacggcctgacctacacgcaggtcaagaacgggcagtcgcgcgcgggactcacgatcgacgacctgtggcccgatctgggcaacccggatgacgcgatgcagttcgtcgccgacatggtcaacgccgccgcacgcctgaccacccaacgcaacatgcgcatcgacccgtcgaaaccacgatgggcgagagtgccgcgtggagcaaggacatgcgcgttctgcaccatgctcgcatcacggggcttcacctacctgagcgaggactcggcaggcttggagatgcaataccaccgggactgcgactgccagatcgtccccagctggggccgccagacactcgccggatacaaccccgaacggctcaccgccatgtggcaggaagccagcaagggaggtggcgactaccgggagaagctcaagcgcatgcgccgggacaatcccatggcgttcacggacggcgtctacccgacgccgaccatgccgtgggagcagtccgtcagactcctgtcaatgaagggagagccaaaaggcactgcggaatcctggtaccggcgccagctcgccgtcggcgtcgacccgagcagggaaatcctcgaacggcacgagatcgtgttcctcgagaagttccagaagctgggcgaggaatacgagtggataccgaaaagccatgatggcaagcccagcaacgacttccactggctgagccacgaatgcgacgccgaactgaaatcaccggcaagcctgaaatacaggaacgtggcccaacgcatcaacgacgccgtcgtcggcggcgtcgaacagggcgttgtcaaggacgtgtttgtactggacttcggaagcacgaaactgcccgacaagttcgtcaaccaactgtcgctgtacaacgcccgtcatgaatcccacatcaaagagctgtgggtgttcgactcggaaggattccaccaaatcgtattgaaatagaagaacggggataaccccccggattatgtgccggtctcaagagccggttacgtgggatccccgttacctcgattctaccatacggcgggttgccagagaggccgatcggggccgactgtaaatcggctgcatcacgccacgcaggttcgaatcctgcacccgccactccacatcacccgcacgggtggttttttatgcccggaacgggcccatcaaccacaaaggagaaccatcatgcacgacatgccgcactggcaccgattccgcaacaaccttcgtctcatcgattccggcgcgggcgaaggcggctccggcgaccccgcaacgggagacccggccggcaccggcgaggacatcgactggaaggcgaagttcgaggagcagcgcgcccactcgcgcaaatgggagcagcgcgccaaggacaacagcaaggccgccgaggaactgcaacagttcaaggactcgcagctgtccgaagccgagaaggccgccaaacgcatcaaggaactcgaagccgccaacgccgcctacgaggcggagaaacaacgaaacgagtggaaggcgcaggtctccaaggagaccggagtgccagcctcgctgctgcacggcgacacgctcgaggccatgaccgcgaacgcgaaggccatcgaccagtacgcgcaccccaagcccaagggcatgcccaaccagggcaagacccccgacggcaaggccgcaggagccgacgaacgcgcatgggccgacgacctgttctccaacctctaaacgcaatcatcccccagaaaggaacaacatcatggcaatggacaccagcaaactccacctgcccaagaccgtcgccacggccgtcgtcaacaaggtcaaggagacatcgaccatcgcggccctgtccccgagcagcccgcagatcttcaccgacaaggagtacatgatcttcaacggcgccgccgaggccgacgtgaccgccgaaggccagaccaagagctcctacgagcaagacctgaactacgtgagcggcaagacgttcaaggtgcagaccacaacccgagtcaccagcgaactcaaatgggccgacgaggacaaccgcttccagatcatccagtccatccaggccgaccaggccgaggccatcggacgcgccctcgactacgtcgtctaccacgccgtcaaccccaagaccggcgggcccctcaccggattcgacgcgctcacggcccgagccatgcaggtcaccgccggagacgacgacatcaccaacgtcgacaacctggccgaccagctcaacgagacctacgacatcaacggcatcgccatcagccgcacgtgggcctcccgcctgcgcaagatccgcgtgcccgccaccggcatgcgctactacccggagatcccgctcaacctgcaggtcggcaccctcgacggcatcaaggccgccaccagcgccaccgtcaacggggccaaggccaagacacccaccaacgtgctcgccatcatgggcgatttcagcctcatcaaatggggcatggtgcgagacatcacgtccgagatcatcccctacggcgaccccgaccagaccggcgtggacctcaaggcccacaaccagatcgcctaccgcaccgaggccatgttctcctacgcggtcgtcgattccaaggcgttcgccgtgctcaagacctccacggaagaaggtgcctgatgggcgcgttcacccaggacttcatcgtccagaagacgaacaggaagaagcacaagccggccgccatggacgtgccggcgcgcctgtggaacccggatggcaccccgttcgctggcggctcatcaacgcctgcggacggcagtgtgacgaacgcgatgctggcgggaggcatcaccgcggacaagctcgccgcgggcgtgatcccgaccgtcccgaaggccgcgtatgtggccgacccggccggcgatacgccgacgaaggccgaatacgtggccttgcgcgacgctctcgtcacggcgggtctcatgcgcccaaaagcgtgaccaccgtcgacggggacatcacgcccgtgctcaccagaatcggataaaggaggaccatatggacccgtccgtttcgttcgccacgcattccgacctggaagaccggtggcacaagctgcttccggaggagcgggcgcaggcggacatcctgctcgcggacgcgagcgagatcatccgcaaccgcgtccgcccctaccccgagacacatgacccggcgtggtggctcgcgcatgagcgcgggctcgagctcgtgtgctgccagatggtgcgcacggccatggaggcgcaggtgtccggtggacagaccggcgtcacccaatccacggagacgaccggcccgttctccagcacctactcgtggctgagccccgacgggtatctgaggttcacggacgacatgctgcgcaacctcggattgtccggccaacgcatgtggtcgatagacatggcggaaggatcgcatcatggagcgtgttgacgtgtaccggggcgcggccgaggtggatgccgacgggaacccggtgcagggtgagatgcggcatgtggacacgctcatgggtttcgttgccccggtggaggcctcgcagtctcctggcgcggattcgcagggcgtggcccgtcgtttcaccctgtatttccgcggggagcccacgggcatccttgatacggattgcctcgtggtgcgcggcaagccgttgatggtggacggtccgccgctcgaatggtggaggcacgggcgtcatatcggcgacgtggtcaacgcgttcgtcagggagggatgaatcatggccaagaaagtcagggtcgtattgaaccggaaggctttcggcacggaggtgctgcacaaggccgtcaagccggtcatggacgacgtgcaggagcaggtggagggcatggcggcggtggatccggcgatcaaggtgtaccgcaacgaggacactgaccgcaccaacgtggtcgccaccgctccggccgcgttcgaacaggcccacggagtgctgagccagatgctgggcatggtggtcgtatgagcgtcatccggccacccgtccgtccccggcgcgtggaacccgtgctgctcgaacgtctgcgcgaccggttccatgacgttgagttcggcaccgtccgcaaccggggcaatccgaccagggaatgcgtgctggtcgccgtgccgggccagaaggccacccccgtcagccagcaggcgcgtttgcgcatctccgtgtgggtgcgccgcgacgacgggaccggcgacatcgacgccgcgcagaacctcgccgccgacatcgaactgtatctgaccggcctgtatccgccacggccggtcgtcaccatcgaccacgagtcggggccgatccgcatgagcgacgagaacggctgcctcatggcgtacctcacgctcctgctcaccgtcgaaaccaaccaagcataatcatcgaaaggcgtatggcaaatggtcacagacacttcgtacatcaccagcggcaaccgcgccgacctggtcaaactcatcaaggactacgcgctcttcctgtggaatctcgacgattcgaacatccccgagatgccggactccgagaactggacgccgccggagggcaagaagccggtcggctacaactcggaggacggcgcggtactgcaccccgagccgggcgacgagaccgagatcaagggtcacaacggcgacatcgtggtctccgaacaggagcccggctactggacgctgcagatacccggcatcgaatgccgtcaggacatcgccgaagcctacttcggcgtcaaggccgacaccgacggcaacttccatgtcagggacgcggccacgaacatcgaatacatggccgtgctcgcatgcctcgaccagtacggcaaccccatcgtgctgcccatcggcaaatgcaaggtctccgaccgcgacgatatgaccctcgtgagcacggaggtcgtgaccttcaacgtcacgttcaagatgttcaaggcctcggacggctacatgttccacgtctatggtctgctcgcggccgagaaggccggactggccaccaaggtcgactcgctggccgccaccccgaacacgctgaccgtcgccgccggcaggaccgcgacgttcaacgtgaccgtctccccggcgaacgcctcaggctggaccatcaccgccacaagcggcgacaccgcgaaggccaccgtcaccgtcaacggcaacaccgtcaccgtgaccggcaaggccgccaccgaaaccggcaaacccgtcaccatcaccgccaccgccggcggcaagaacgtgaccgtgcccgtcaccgtcaccgcctgaccctgacattcttccccgtccgcaccgatggcggtccctgcggacggggaaccccacccaccagaccgccgcacacactttttcaggagaccgccatgagcgcagaaaacaagaccatcgaaatcgaacccgacatcaacaccgacgccgaacagcagcccgacgtatgcctcagcctcaagggactcgacaccgaagtcacactccccaacctcaactccgccgacctgcccatcgaactggtcaacgtcgtgctcatcgtcaaaagcaaggtcgtcctgagcgaggaggagacgttccacgccaccgccgtgttcctcgcctacctgcaggaaatgcagccgaccctgtggaacaagctgcggaaggccggcaacccgctcggctggatcagcgccatcgtcaaaggctgggccgaaggctcgggcctcgacccaaaatcgtttacctcctcatcctccatcaacagcatcactcggcgctgaccgccgactggctgacccgctaccggcgcgtctggaagccatgccacctcaacgcatggctcgacgcgccagccggccgcaaaccatccggcaacctcgactatgagagcgcatgggcgctcacccgcgaaatcctgcgcgaccacacctccaacagcttcgccgcactcgccggatggtcatacacgcccaccggagcggaaatcgcgctctgggaccagatggaactcgaaggccgactcaaacgcaaaggctaccggccatgggccgaccggagaaccgacccgttccgccgaccggccacggaaacccacgccgattatgaggcgcgcatggcccgccgcaaacgcctcaacgaccactaccacatcgaatgaccccgaccgccatcggggcctcccaaccacacaggagaagccccgatggcagaaagcagcatcggcgtcgtctacatcgaagtcgcccccagcggcaaagacttcggcaagaaactcgaaggcgacatcacccaagccgccgacaacgccgccaagaccggcggcaccagcatcctcggcaaattcggcggcgcattcggcaaaatcggcaaaatcggactcggagccatcggcaccatcaccggaggcatcaccgcactcgccgccaaaggcggcttccaacgcgccctcgccatcgaaaacgcgcaggccaaactcaagggcctcggccacgactccaaaagcatcgccgaaatcatgaacaacgcgctcgccagcgtcaaaggcaccgcgttcggcctgggcgacgcggccaccgtggccgcgaccctgagcgccgccggcatcaaatccggcgaccagatgaccaacgtcctcaaaaccgtcgccgacaccgcacagatatcaggccgcagcctcaccgacatcggcaccatcttcagcagcgtcgccgcccgaggcaaactgcagggcgacgacatgctccaactcatgagctccggcgtacccgtcctccaactgctcgccaaacacctcggcaaaacctcggaagaggtctccgacatggtatccaaaggccagatcgacttccaaacattcgccgactccatgcaggaaggcctcggcggagccgcattggccgccggcgacaccttccaaggcgcgctcgccaacgtgaaggccgcgctcggccgactgggcgaaggccccggcaagctcgcgctcgaatcgttgcgcaaggcgttcaacgccgccatccccgccatcgacgcgttgagcggccagctcaccccgttcctcgacaagctcaacggccagctcgacccctacatcgacaaagcgataggcctgatcgaacggttcgcgaacggactgcaggacggcagcatcaccatccaggacatcgtcggacaggtcggccaactcgccggcgcgttcgccctgttcgccggcgtcggcggcaacgtggacaagatcaccaacgtgttcgacacgctcggcaaaatcggtgacggtgggttcggccagctcaccgggaaactcaagcagatgcccggccagctccagtcgagcctgacgggcctgcaccagttcaaatcgtatttcaacaaggacctgcgcgacgccctcgccgtcgacggcgacccgttcgccaacgccctcaaccgcatcacccaaggcactgacaggctcacaggcccgttcaaatcgttcggctcgaaaatcgccggcaccgacatcggccaatccgtcaccgcatgggggtcaaaactcaccagcggattcacggcgctcgccggcaaagtcaagacggcggccacgccagccctatccggtctgggcgacatattcggcggtctgggcgacatcgtgggaccgaaggtgcaggcaggcctcggcaagatcggcggcatgttcggcagcttcttcagcccgggcaacttcctgaagttcctcggcatcggcgccatcatcgccgccctggtcgcgggactgggcatgctcgaccagagcatgggcgggcaattgttcgtgcagatcagcaacctgttcgcggaactgcccaccatgatcacggacggcatggcgaagatttccgccgtgctgccgggcatgatccagactgggtcgaacatcctgcttgccctgatcaacggcgtgaccgggagcctgccgcagctcgtctcggccgccgcgcagatcgtgagcatgctcgtacaggggctcgcccaggcgttgccgaccctcctgccggcagcggtgcagatgattaccacgctgatcacggcgctcatcgaacaggcccccatgctcatacagtccggcatgcagctcctgcaggggctcgtgcagggcatcatgaactcgctgcccacgctcatcgccgcgataccgcagattctgcaggcgctgctggatgcgttcacgaccgctctgcccacggtcctcaacatcggcgtggacatcatcctcaacatcgtcaacggcctggtctcagccatgccgcagctcgtcgcgatgctccccaccgtcatccagacgctgatatccacgctcaccagcaacctgccgggcatcgtccaggtcggcgtcaacgcgctggtcaagctcatcgacggcctgtctcaggccatcccgcagctcgtgggctacatcccgcagatcatcgcgtcgatcgtcaacacgctcgcctcgaaccttccacagattctgcaggccggcgcgcagatcatcatcaccctcgccgggggccttgccaaggccatcccgcagctcatcagccagatccccgccatcgtgcgctccatctggaacgggttcacaagcgtgaactggggcgaggtcggcctgaacatcatcaccggcatcgcctccggcatcgccggggccgccggcaagctcgtcgacgcggcggtcaacgccgccaaggacgctctgaactgggtcaaggacaagctcggcatccactcgccgagccgcgtgttccgcgaccaggtcggcgtgatgatcggccgcggcatggccgtgggcatcgaccgcagccaggacgtcgtcaaccggagcctcggacagctcgccgatgggctcacgttggacggctacacgttcggcatgcccacccccgtgatgagcctgccggccaacgcctgccagatggtcaacggcatgcagtcgaaccagcagggcatgcaatcccagttggacgagctgctggccgaggtgcaggcgttccacgaggatatgccgttcattctgcaacagttgggcatcaacatcgacgggcgggaattcggaagggcggtgcgacgctatgcaacggcttgagtacgtgtgttccaccggcgacgagatctcgttcgaaggccctatctacggggagacgatgccatcgttgagaggacgcgcgtggacgtacacgctcggcgcgcgcacccttaccggggtggcatggcaggcccgtgaactcacgcttacggtgaaggccgtggacggcgaaacccaattggaccggctgcgcatgctcaccgaccatgacgtgctcgcgcactccagggactccacgatatcgggcctgctgcgcgtggacgacgtgtgggagtgcagggcgctcatcaccaaaagcgaaccgcaatccatcacgccgcgcatcatcgaaacccaattgaccgtgacccaattgggcatgtggcgacgcagcctgccgaccgtcacctatgcgcccagcgaccccgacgcctaccagtatctcgatcacccgtatgacatggactacgattacgggccgccatccgccccgccggtgatagccgtggacgggttggacccgatgccgttccgcatgaccatatacgggccctgctcgaatccgaccgtcacgatcggcggaaaccggtaccggatcaccggtgacatccccggcggcgctcgcgtcgaggtggatgcggtggagggcgagcgttcggtggcgttcgtcaacgcggccggtgaccggatcaactggttcgcgaacgcggaacgcggtgccggccttgattccggcagctacgtcttccaaccgttgcccgccgggcgcgccgaagtgagctggccgggaggctacacgttcgaactcacgcccgtcgaggagaggagcgaaccaccgtggtcagcctcatagtcaccgacgcgaagcacaagccgttgcgcgcggtggacgactacacgctcgatctcgcctacggcggcgatgagaattcgttcaaactcacctgcctgccgcagccggagtccagcgcgctgatcatgatcgacggcaccgaatacggcgggttggtgaccgtgcgcaacacggacggcagcgtggagggccccacctggcatggcctgctctcacgccgcatcctccaacccgatacgggtcgggattacctcaccgtatccggcgctgccggcgatgtgctcaatatgttgttcaaacgcatcggattggatgcgctgttcaccgcgtccgcacggcacgcggtcaccatcggctcctattcgttcgaccggtatacggacgcgtacacgggcatccggaagatgctcgccgccaacaatgcgaaactccgtcttatctgggcggatgggcgtgtgaacgcgtatgcgctgcccgtcgaacactacggcgacagcatcgacagtgatctgctcgaattcaaggcctcgctcgatagccagccggtgaaccatctcatcggattgggcaccggggaactcaaagaccgtgcggtcgtccactggtacgcggatgtcaacggcaacgtgagccaaacccaatcattgaccggattggcggaacgtcaggccgtctacgactattccaacgcgaaacccgacgagctgaacaccgagaccaggaagaagctcatcgaactgcaatcacagggcggcgtcgaggtcaccataacggacaacacgttgagcatggacgttggcgacacggtcaccggccgtgacaaccggctcggcatcacgctcaccgtgcccgtggccaagaagatcgtgaaatcatcgggcggcatcctgtccgtggactacgagtgcggcactgcgtcaggcgatacgacgagcctcagcggctccgcggaatccaacggctccaccggttcgggcggctccggcacgtactatgcggacggggtcaccatcaccatgcgcaacaacacgttcagcgcggtcgtcaccccttcgcgcgtggacgacgtggagaaaacagccaaggacgcctacacgctcgcctcgaactattcggccgaaattggcaaggcacagcaggattccgtcgccgccatcgccgcggcagccatgaacgtggcttcgataaccacggccatgccattgtccgcgagcaggaacggccaggccgtgcacatcacggcaacggaggccacggccgaaggatccgggctcatgagcgccgcggacaagcggaaactcgacggattggagaactacgcgcttccggccgccaccattgccacgttgggtggagtcagacctgacggcagcaccatcaccgtcaatgaggatggcgtcatcaccgcgcacgccacatcgaccggcaacggaatcctgttcccggtcggctacgtggtcatgaacaccaccggctcggatccggcgaatgatttcggcggcgtctgggaggaacggccctccctgggcgcgcacatgtgggaaaggacgggatgacacatgaagacactgggccgtacatgcctgctcgaggcgaacctcatcctcgtggccggcgtcaccaacacctatcgcctcagatggctgcgcagggtcaccgacaaaaacggggtcacggtcgtcagacccatggacctgaccgggtggacgccccacatgcaggtccgccgcgacgggctcaccgtcatcgacctcgccccctacacgctcctggacacggacgggaccatcaccatccgcgtcccggacgaggccacgcaaggcctgcccgcgggcgcgggcgcgtgggacctgctcctcgaagacccctcgggcgacgtgacccgcctggccgccgggcccgcgcttgtcgaaaccaccgtgagcgacaccgaaaggagtccgcattgatccgcgcattggacggctgctcgtgtgacgaggggccggtaatcatcctcgaggacgcgatcatcggcgacgtgagcatcgtctacgccaccgacgcggacatcgacaacctgttcccaacaccaaccacagataaggaggaacacgatggctaacaccagcaaggtcatcgacctggaccggctcgcccggttcaaagcaaagcaggacgcggccaacgacgccaagttcgccctcaagggcgaaggcggctcgatcgccacggccgacaaggcgggcatcgtcaagcccggcggcgatttcgacatcaccgaggacggcaccatcagcctgtacaaggcgatgggcattaactcgttcaccgtttccccatcgcaggcggaacgcggctcgacggtcgcggacgtgaccgtcgcatggagcctgtccaagacgccgaaatcactcaccctggacgacaaggcgcaggacacggcatccaagggcacgacactctccggcgtgaacctcaaaacgagcaagacgtacacgctcaaggccaccgacgcgcgaaacgccgtcgccacccgcaccgctgacgtcgctttccgcgacaagcgccactggtgggtcgccaccagcctcgacgcggcgggagtgaccgaccagatcatcaaccaggcaaccggcgaactcgccgcagggtacaccaaaacgttcaccctgaacgctgcggccggacagcacatctactacgcgttccccgcgccgtggggcacgccccgattcttcgtcggcggcttcgaaggcggcttcgcgttgttgaagacgttcgaccacaagaacgcgagcggcgcgaccatcagctacgcggtctggaaatccacgaacgcgggtctcggcaacaccaccgtcgaagtgaagtaaaggagaaccctgatggccatcgaactgatcgacacgctcgcgccgaagaacaacggcacgttccccatggtcaaagccaaggatgtggacgtcgacggcaaacgactccccgagaaactcaaggagctcgaaacggctgccggaaacatcgagaccgccaccgacgcggacatcaacaacctgttcaaccccagcagcaagtaaccaacgaaaggaaaccatcatggccacgaaattcatcaacctgaacaacctcgccacattcctcgccaaactcaagaccctgttcgtcgccaaggaactcaagaccggcagccccaacacctacaaggtgctctccgacaacaacctcaccgacgaactcgtcaccaagatcaagaacgccggcgactccacgttctccggcgcatacgcggacctgaccggcaagccttccatcggcggcaaggagatcgccagcggtaaccagaccgcggccagcctcggcctcgccacccccacggacgtgaccgccgccgccaacaacgcgcgcgccggcgccgtcaacgacgtcaagaatctcggctaccagaccacctcccaggtcgagaccgccatcagcgcgaaaggctaccagaacgccgcccaggtcaacaccatcgtcaccggcaaaggctaccagaccgccgccaacgtggacgccaaggtcaacgccgcgaagaccgaactgcagaactcgctcggctccgcattccgcgccaagggatccacgatgttcgccagcctgcccgcccccgcatccgccaccaagggcgacgtgtggaacatcacagaccagttcaccaccaccgaccagttcgtcgacggctcaggcaagaccctgcccgccggcaccaacgtcgtcgccgtggccgtcaccaccggcgacaccaccgtcatgaaatgggacgcgctcacaggcatgatcgacctgagcggctacatgcgcaaaaccgacatcaccccggccagcgacgccgaaatcgacgccctgttcgcctaagggaccccggccatggcggaaacatacgtcaccctccacggcctcgcacgggcggtcacgaacctgctgcaacgcaccaacacacgcactatgttcacggccgcccaccccatcggcgagatcatcgaaaccacccccaacctcgaccccaacacaatcggcggcacatggac

SEQ ID NO: 2330 - DNA, 22027 bp, Unknown
  R119_18m  MAG No. k141_48005
cagcgacgggtctctttcatatcaatcgaggatgagctgcgtcagctgatgacacgcatgcgaacggtgccctcgatgttgcgtagtgcttcaagcgtggcggcgctgggcttctgagccacgtcggtgaccacatagccaagttcgccttcggtggccaacgactggaaggaaacgttgatgttctcttcgccgagcacgcgattgacatgagccagcacaccaggaagattgtcgtgcagatgggcgatacggcacacgcccttgcgttcacctaggttgatctgcggtaggttcacggacaatgaggtagaacccttgaaccagtaatcctcaagacgctgagagacgaaatggccgatggattcctgagcctccaaggtggagccgccaatatgaggagtcagaatcatattgtcttcgttggccagtgaggtctcgaacggatctccgctcttcttcggctcaacggggaacacgtcgaccgccgcgccagacagatggccggaatcgaggtgctgcttcagagctcccagatcggcgacgaaaccgcgcgaaaggttaatgaaaatcgcgtcctgcttcatgtgggcgaattggtcttcgccgaagaagccggtgttcgacttgcggccatccacgtgcagggtcacggcatcggactgttccagcagttcgttgagggtatcgcaacggtgggcgttgcccagtgccagtttctcctcgatgtcgtagaacaccacgcgcatgccgagggcctcggccagtaccgacagctgggagccgatgttgccgtagccgatgatgccaagggtcttgccgcgcacttcatgcgagccggaagcggacttgtcccacaggccatgcttgatgtgatgcgtgtgtgcgggaatgcggcgcatcaagcagatgatgtcgcaaatcaccaattccaccacggaacgggtgttggagtagggggcgttgaacacggcgatgccacgcttgccggcatgtgccagatcgacctgattggtgccgatgcagaagcagccgatggcgcttagcgtaggacgcgcatccagcacgcgggctgtgacgttggtcttggagcgtacgcccaccaagtccacgccatccagcgcgtcgatgagttcgtcctcgctcagggctcccttcatggtctcgacttcgaaaccgtgatcacgcagcgatttggccgcgtcggggtgaatgttttccaataacagtgctttgggcatgcttcataccttagatgttcagggacttttcgtccgttcttgtccgaactataaccagtttctgggtcggcctggtcattgccacgtacaggtccgaagcggcgaccaggcggctcggcgcgtcatcctcgatgagaccgggctcgaccaccacgacggcatcgaactccagacccttgaccgtttcggtgccgcagacgctgatttgctcatcccattcgggctgctcgatgagccttgcgtattcggccgggtcaagaacggcggccagtttgcggcgcacggcgtcgcgcaccggggcgatgagatcatccggacagatgacggcgatgcggccggtgccgtctgccgaaacgaattgttcggcaagctgcgccgcctgctcggccgtcgtttccagcaaggacgacatgtcgggcaccacattgcgggacaccgaatcggggatggtgcgcaccgcattgaccgtggagatgtagaggccttccttctcggcgaatcgtgaggcgagttcggaaacttcctgcggattacggtagttgatggtcaactcgttcagatcccagtggctttcgccgaacaggcggttcatcgatttgctccagcgtcgggtgccacccagcgccgaggtctgcgccacatcgcccacgatggtgaacgagcgggaggggcaacggcggatcaacatacgccagtccatggcggtcagttcctgcgcttcgtcgaccacgatgtgcccgtaggtccattcacggtcggccgcggcccgctgcgcggtcagctcggcgtcgtccccgttcatctggtcgagcagcatctgactggagacgatgcctccacccagaccggtcgcggccagcgtgtctttggcatactgctcttcggcggcacgacgtgcgtcggcggcggactggcgggccaccgtcttgggatcggggcccagcatatccatcgcttcgtcgagcagcggaatatcggagcgggtcagcggggagcccttggggcgggcaagtgccgcgatgtcgttgtcggtcagccaaccagccagagacttcagacgttcgggatgggcgaacagctgatcgatgagccatggggcggtcatcggcagccagcacaggttcagggtcttgcgcacctgctcgttcatacgcagcaacgacatcgcgcggttcagctccgcctgatccggcgtgtaatcaagctgttcggcataacggttctgcatgctggtcagcatcgaacggataaaggtctcgcgggccttgttatgaggttgccgggtgcgcttcgcgtccgcctgcgcctgctcgatatcagtggccagcattggtacctgaatgccgctaatggttactgtcggcagaacagcgggaacacgcacgcgcgcggcgatggcattggccactacggaggtcatgcgtcgatcgcccttgagcttggctgcataaggggagtcgaccgccgtggcggtgatgccgggaatcagatcgctgatggtgcgtgagaccacgccggtctcgcccaaggagggcagcacctgatcgatgtagtgcaggaacgccgagctggggccaacaaccagcacgccggaacgttccagcgtgcgccggtgcgtgtacagcaggtaggcggcgcgatggagcgccacggccgtcttgccggtgccgggaccgccctgcaccaccacggcacgattcatgtcggagcggatgatgcggtcctgctcggcctgaatggtggccacgatatcggtcatcttgccggtgcggcgtgagctcagcgaagccagcagcgcaccctcgccggtcaacgtgccggcggaagacgcctggccgacttggtcggaatgcacgtcgagcacctcatcctcaacgcccacgacttcgcggaaactcaaggtgatatgcctgcgcatcacgatgtcgccgtgattggagggggtcgcctcatagaaaggacgtgcggcttcggcacgccagtcggtcagaatcggctcatggtccgggctcgacaggccgatgcggccgatgtaatgacggtcgccgttcttggcgtcgagacgaccaaacaccagccgatcctcaacgctgcgcaattgcgtgaggcggttttcgtacattgtggcaaaggagtctcgttcgctgcgttgcgtgggggatccgtgggagccggcggcgcgtacggtgtccaggcgttgccacatttcggctcgcagatcatccaatcgtccataggcgcgatcgacggcctgctgctcctcatgcagctgggaggcgtaactcgacatgctgttctcttcgttccatttccgtggggcagaaaaaacttaaggcattcaaatttaccgcacaccccctacgtcagtgatgcggacaacccggaataggtgaattcagcgtgaattcgccatgctgttcggtcggtggagtgcgcaacgtggattggatgtgcggagcgcccattcgtgcgacagtcgtggccgacacgcgcaatccatcggtaattgccctaaaagggtgagcaaatcgtgcatgagtggggagaaatggggaatcgtggggtagagtggtgaaccagttggccgaagtgtatcccacgtaacgatgaaggaggtggagccatggttgccgatcagacgattcgcgacgctgatgccaacgcacaaggctccaccactatggctgatctcatggctggtctgccgccgctgcttctcggcacatatacgccgaagatcgacgccaaaggccgtatggcgctcccggccaaattccgctcccagctggggcagggcctggtcatggcccgaggccaggaacggtgcgtgtacctgctgccgttcgatgaatttcgccgtatcgcctcgcagattcagcgtgtgtcggtgggaaacaaagccgcccgcgaatacctgcgtgtgttcctttccggtgccgtcgatcagcagccggacaagcagggccgcgtgctggtgccgcagatgctgcgcgattacgccaatctgggttccgacgtcgtggtgatcggcgttggcacccgtgccgaactgtggaataaggacacgtgggagtcctacctcgccgagaaggaagagggatattccgatattgctgacgatgtgttgccggaggtggaattctgatggttgatgtggcgaatattcatctgccggtattgctggacgattgcgtgaacctgatggcgcctgccctggaacatgagaacgccatcgcagcggattgcaccctgggccttgccggccattccatcgccttcctcaaagccgcgccgcaggctcggctcatcggcattgaccgtgacagtgaagcgctggggctggccaccgaacgcatggaacgggaggggctcgccgatcgattcatcccggtgcatgccgccttcgatcagctcgatcaggtgttgacggaccgaggcatagaacgtgtggacgccgtattcatggatctgggattatccagcctgcagatcgacgaaaccgatcgtggcttctcctattcgcatgatgcgccgctggatatgcgcatggacgtcagccagccgttgacggccgaacggattcttgccacctatgatgcggcggaactggtccgtatattcaaggaatacggtgaagagcgtttctcgcgtcagatcgcccgcgccatcgtggcacgtcgagacaaggagccgtttaccaccaccgcacagctcaaccgtctggtcgatgaagtggtgccgcaagcccaccgcccggcgggcaatcccgccaaacgcgtcttccaggcgttgcgcattgaagtcaacggcgaattggacaagctcgcctccacattgccgcaagccgcgaaccgactgcatgtcgggggacgactggtggtggagtcctatcattcgctcgaagacaaaaccgtcaaatcgttcatggcacaagggctgcgagtggatgttccggctggtctgcctgtcataccgccggatgcccaaccgtttttcacggatctcacgcgaggtgccatcaaggccggcgaacatgaaatcgcagccaacccgagatcggcttcggtgcggttgcgggcggtggaagtcagccgtgagattccgtcacgatggaggaaacgctttacgcaaaccgcgcagggcctgaatgacgtcaagatacaaggctccgcgtctccgggcagagccaaaaacacagcgcgaattcgtacaaggaggggataacggcatatggcaaccgcacgtaacattcgatcgaacgcggctccggcctcgaaccggccgcacaccaagcatcagtcctcctcccgacctgagctgcgggtggtctccaacccgcgtggagacgagcggggcaatgtcgtcggacgggtcatcgaatggaccagaacaagaagcgcaccgctggtgcacgtggccatcgcagtgatcttcctcgtcggcaccttgttcggtgcgctgatgttgcgtacccagatggtgcagaactcgtttgaggcggcacagatcgaaaccaatatcaacagacttacccaagatgtcgaagacgatcaggccaaactcgatcaattagtcgcgaacctgcccgacaaggccagcgacatgggcatggtcccgcagcaaggatcagtgtccatcgacttaagcggataccagtccaacaaaggcggaacccagtgaacaccattcgtcgcatcgtagagttcgccaaggtcaagaccttcgcgttcaaatgcattgccatcggcgccgcattggcgttggtggcgtcggcatgcgtgattcagctggcctccacccagctcatcggcggccgtcaaaccgcacaagcggccacggctaaccgcaccctgaccgtgacgttgagcgccaagcgtgggcgtatcctcgacgccaacggctccgtgctcgctcaaagcgtggagcgttatactatcgtcgccaatccggaggctgcacaggagttcgagccgattacttgcaatgacagcacccgtgattactgccacgaaattgacggcaaacccgtgggtgctaccggagcggcggccgtgggccgactgctggccaaagtcctggatatgaacgccatggaactgggcgctgatctgtccggtaccgggcagtatgtgattctgaagaaagacgtgaccccacaggtcaagcgcagcatcgaggcgttgcacctgggcggtattgtctggggtgagctgagcagtgaaagactgtatgcggatggcgatctcatgggcgcgctgcttggcggcgtgaacgacaacggcgatggcgtcgccggcatcgagcaggtcgagaacaagacgcttaccggaaccgatggccatgaaacctaccagcgtggtaatggcggcgaagagattcccggcaccatgaccgaatcggtggcggccaaaaatggcgacgatgtcaccctgaccattgaccgtgatgtgcaatggtatgtcaaaaaggtcttgaaggaggccgaatccaagtatggtgcagcgtgggcgatcgccgtggtgcaggatgtccagagcggggagattctcgcactggccgatagcgatgaagtacaggctggtaccgatgcggcgaagatgagcccgtctcgggccgtgtccgaaaccttcgagcctggttcggtgggcaaggtcatctccatgtccggctatctgcagacgggactgcataagatgagcgatcaattgtcggtcccggaccacatcacacagaagggccagacctacaaggactcattcgaccatggcactgagcgctggacgctcgccggtattctgcagaactcatcgaacgtcggcatgattatggccggggagaactatccggatgagcaacgctacgagtacctgaccaaattcggcatcggacaaccgaccggactgaacctgcccggtgaatcgagcggtctgctcaccagcccttcggcatgggatctgcgtacgcgcaacaccatcctgtttggtcagggctacaccgtcaacgccctgcagctcaacaacgtggtggccaccatcgcgaacaagggtgtcaagcagcagcagtcgatcatcagatcaaccaccgatgccaatggcaagaccactgagaccaagaagggcgaagccacccgcgtggtggatgaaaaggtcgcatcggacatgatgaatgcgatggaatcagtggcggagagctacaacaagttcgtcaaggtcgatggttaccgcatggccgccaagtccagtaccgcagaggtgcagggctcggatggcacgctctcgtccattatctccgattattccgtggtgattcccgcggacaacccgcgctatgcggtcaccgtggtgctgaaggatccgaatggtgtgttcggcggtctgacggccggccctgtttccgcacagatttgtgagttccttatgcagaaatacgaggtgcctgtctccagtccacgcaaaaatgctattccagtcacgtggtaaggatcaggggagaaaggcgctagcccatgagtgcagtgagcgaatccatcgcccagcgggtgaccttgggaatgctggtcgaacggtacggttttgaagtcgatccacccttcgccaccaatgtcaccattacctcactcagcgatgccgtggataccgtgattcccggctcgctgttcatctgcacgcatgagcaggaacccgatgtgctgcatgccgcacaggccggtgcctatgcggcgttgctgccacgcgcgtccaaaggacagatcgccaatgccgatataccgttgctctacggcgattgcgacgatcgcgtactcggcgatctggccagcggcctggccggcggaccatccaacgccatggcggtgttcgcggtgaccggtgcggatgagcaggccgttgacgcaggcgtgtcccagctctccgaattcctgcacatgctgggcaatccggtggcggtaatcaccgcatccgggtccacgtcgatgacacgtaccatgaacctgaactatcctctgggcatcctcgatatgcagcgcgcgctgtccgtgtgcgccgaagacggtgtggcggccgtgatcatcgccatggatgaccgcacgttggccgagcatgcgttggaatcggtgaacgtggatgtactgggcacggaggatgtcaacgcaagcgcaagcttgaacgaattgaagacacgctacgcattcgttgcggaacatgacatgtccatgacctcgtcgacacccgaatcggatgaaatggctgcggattcaccggcaatgtacgaccgcgtccgactcgggcacatgtccttggccatcgccatggtactggccgccggcgtgaggaaaaacaacatacgcagtgccctgcatgtggccaacaatctcaattaagtccgtggatgcgggacgaagcgtaatcgtaaaggagtttgaaacaccatggttccgatgagtgtggaggagatcgccaaggccgtcgatggtcgattgatcggagacgccgattccgagtctcgagccaccaatacggtcagcgactcgcggcaggccggccccggatcggtgtttgtggccatccgaggcgagcgtgtcgatgggcatgactttgtggcgaaaaccgctgaacagggagccacggtggccatcgtcgaccatgaggtggagtccgatggcctgccgcagatcgtagtgaaagacacggtcgacgcccttggcgagctcgcccgacacaacatcgttcgccgccgcgagctggacggcgacttcgacatcatcggattgaccggttcggtgggcaagaccaccaccaaggatctgctctcctccctgcttgccaccgtaggcccgaccgtggctccggtgggatcgttcaacaatgagatcggcctgccgctcactgcgttgcgggtcgatgagcacacccggttcttcgtggctgagatgggtgccagccatatcggcgaaatcgcgcgactgacccgtatcgcaccgccgaacacggcaatcgtattgaaggtcggcgtcgctcaccttggagaattcggctcccgcgaacgcatcgcacaggcgaaaagcgaaatcgtgcagggactgcttcccggaggcaccgcggtactgaacgccgatgacgaacacgtggttcccatggccggcctggccagcggcgatgtgctgtggttcggcttgggatcgtcgcaggagcccgaggtgcgggccattgatgtcactgccgaccggtccgatcatgctgaattcacgttggtcgatgcggacggcaaccatacgccggtgcatctgggcattcctggacgtcacaacgtgatgaacgcgttggccgccgcaaccgtggcgatgcgttacggtatggcacccgaaacggtggcgcggattctggcctcgcagcacaccatcagccctcatcgcatggcattgtccacggtgaatcgcgaggggacttccttcacactgatcgatgattcctttaatgccaatcccgactccatgaaagccggcctgaacgggttgaaggcttggaactcaaatgacggcaaggatccgttccgcgtggcgctgctgggtgccatgctggaactcggcgccgatgagacggcattgcacacctctatcggcacgtatgcggccgaattgggcattgacgcgatcatcgcggtcggttccgcccaagaccaacatctcgatgcactggcacaggctctggcggacggtgcccgtcagagccaatccgcgtcggtggattgcgtacacgacatcgatgcggccgaacagctggtcatcgacttggcgcgcaaccattccgacgctgtggtactgctcaagggatcgcacgcgtcaggcctgagcgctttggctgaacgctgggcaaagaactgacccgataaccaccccaagaaaccgacaagaaagagaagctgcacgtgattgctctgatcattggaatgctggtgtcgctcatcgtcaccttagtcggcaccccgctgctgattcggctggtccacaagctgcactatggccagtacatccgccaggatgggccgcagtcgcatctggtcaagcgcggcacccccacgttgggcggcgtggtcatcaacttcgcgattctgctcggttgggcatcctccgcactgtaccgatacctgcgttcgggcgacgtgccctcctggtccgcggtgctcgtactgttcgccatgctgtcgatgggtctgctgggctttatcgacgacttcgccaaggtgcgtaagaagcagaacgaaggcctatcggtgggcggcaagttcatcggccagttcatcttcgccaccatctacgcggtacttgcgctgctgattcccaccaaatcgggattccccagtgcgcaggcgggcatcagcttcatcgaacggccgttcttcaacttcgacttcgccggccgtgccgtaaccatcatcctgttcgtcatctgggtgaacttcctgatgaccgcatggaccaacgcagtgaatctgacggatgggcttgacggtctggcggcaggttcgtcgatgatcgccttcaccggttttggcatcatcgcattctgggaaagctaccacatcaagggcggcagccatggcggctattcctatgctgtgtccgatcctctcgatctgaccgtcatcgccgtatgtgcggccgtcgcctgcttcggcttcctgtggtacaactcgaaccccgcatcgattttcatgggtgataccgggtccctggccttgggcggcctgttcgcagccctgtccatcgccacgcacaccgaattcctggcggtggttctgggtggactgtacgtcatggaagccatgagcgacgtcatccaggtcgggtacttcaagatgacccacaaacgtgtattcaagatggcaccgatccaccatcatttcgaactgaagggttggaccgaaaccaaggtggtggtgcggttctggatgatcgaactcatcttcgtgctgctcgccctgacgattttctacggcgactgggtcacccgctccggcctgctgttcagctagcggaaatctgggtgggattatgctcacccacggaattcctatatcaggaggaacaatgcaagtagcggataagacagtggtgatcgctggactgggtgtgtccggcacctcgttggcggaggtattgagggaatgcggcgcccacgtgattggcgtcgacgagaggaagcccgaggccggtctccgctcctttgatgacgtggactgggaccatgtggactacgtcatgtcgtccccggtgttcaacccccgcaccccgttcgtgctggaagcccaacgccgtggcatccccgtgatgagcgaggtggaattcgcatggcagctgcgtgtgaataacgagcgcaccggtactccggctccatggatcggcatcaccggcaccaacggcaaaacctccaccaccgagatgacctcggaaatgctcaccgcctgcggactcgacgcgccgaccgccggtaatatcgcctccggagacatgagcatgagcctgtctcgttgcgccaccaatcctcagcacgacgtactgtgcgtggaactgagctccttccaattgcacttcaccgattcgctggcacttgactgcgcggcgatcaccaatatcgccgacgatcacctcgactggcatggcgggcgcgagaattacgccgccgacaaatccaaggtgttccacaacgccaaacgcgccatcgtctacaatgcgcaggacgccaaagtcagcgaactggcggccgaggcccaaaccgccgaaggatgccgcaaggtgggattcacgctcgaggccccccaggccggtcagatcggcattgaagatggctggatcgtggacaggagcggcgtggccggcggcgcagtgggggagccggtcagactggccgccatcaccgatttcacgcatctggcagagccggacggctcactgtacccgcatctggtggccgatgcattgacggcattggcgttggtgctgggacttggcgctgatcgagataccgcgttgaaggcgcttacctcgttcaagccgggcggccatcgcatcgaaaccgtggctgaggccgcagtcgagggcggctccgttcgtttcgtggacgattccaaagccaccaacggtcatgcggcacgcgcctcgctgtccagcttcccggccaagtctgtgatctggattgccggaggtctggccaagggcagtcgattcgaggacctggtcaaggaccaggcacataccatcaaagcggccgtcatcatcggcaaagaccagcagccgatggtcgaagcgtttgccagccgagctccggacatcccggtgaccatcatcgatcccgaagacaacgataccgtcatggatcgtgccgtcgaagcctgcggcacgtatgccgccgccggcgacatcgtgcttatggctccggcctgcgcctccatggaccagttcaagtcctatgcggatcgaggcaatcgattcgccgccgcagccaagacgtggagcgaggtgcatggcctccactgatacccataagcgtaaggcatacagagcccctgacaggcccgcactcgagatcaccgactacacgggttggcgaagcttgctcaacccgctatggtgctaccacggattccgcatggccgtggtggggctgacatgcttcggcctgatcatggtgttctccagctccacggtcaccatggccgcactgggcaagtcgccgttccttcagcttctgaaccagggcgcgttttgcctgatcggcttggtgctgggcttcgtggcattgacgatgccggtgacgttctggaaacggaccggcgtgttctttgtggtgggtgcctgcctgttgcaggcgctgacctttactccgctgggtatcgacgtctacggcaacaaaggttggctgaacctcggcttcaccactatccagccggccgaattcatgaagttcgcgatgtgcatatggctgccctcgtcgttgcatgcctgcagcaagatgtaccacaagaagggaatcaaagcatatgccgcgccgttggtgttgtatgcgataggcgtggcgctggtgatgggcggcaaggacctcggcacggccatgattctggtctccatcggaggcgtggccttcctgatcgtcggattccccggcaaatggatgggaatcggcgtattgggcgcggtggttatgatcggtgcattggcggtttccagcccgaaccgcatgcgtcgtattctggccacatatggtgattgctcggccgctgacgcgcagagcgtatgctaccagtccattcacgccaagtacgccatcgcctccggaggctttctgggattgggcatcggcaattcgcgtgagaaatggaattacctgccggccgcccataacgatttcattttcgcgatcatcggcgaggagaccggattcgtcggttgcgccatcgtattgctgttcttcgcgattctcgcctggtgcatgatcgtcatcgcattgcaggtcaccgatcgttatgttgccatggtgctgatgtgcgtcaccatttggatcgtgggccaggccatggtcaacatcggcgtggtcgtgggtgtgttcccggtattgggcgtgcctatgccgttcgtctccgcaggtggctcatcaatgatcatgtgcttgacggcggccggactggttgtgggacttatgcgttctcaaccgcagataaaacagtcgcgtcagagcgcgtaagtagactcggtaatcatgaatcaaggcacaccacatatcgttcttgctggcggcggtaccgccggacatgtcaatccgctgctcgcggtcgccggagcgattcgcgacatcgaacccacggcacaggtcaccgtcatcggcactgcggtgggtttggagaaggatttggtgcctgaggccggctacgagctcgacaccatcgaaaaagtgccgttcccgcgtcgccctgacctgtacatgcttcgcttcccggcaaaatggaagcgagaaaccgccaaggtgcgctccattcttgaaacgcggcatgcggatgtcgtagccggattcggcgggtatgcttccgcccccgtctacgccaccgcacacaagatgggcattccgattgccatccatgagcagaatgcgcgtgccggcatggccaataaactgggcgctcgttgggccgatttcatcggtaccgtgtacgaaggcaccggtctcaaaccgcgtgccggagccgacgtcgagcgtgtcggtctgccgttgcgcccgaccatcgcctccctgaccaaacgcatcggtgacgatcgtgccgccgtacgccgtgaatcggccgcgcagcttggcgtcgatccgaaccgtccgctggtgctggtcactggcggatcgctgggagcgcaaagcctgaaccgcgccatcgcctcctccgccgcagacctgttggcccacgcacaaatcatccacttgaccgggcgaggcaaaatcagcgaagtacgcgaactggtcacggcctcggccggcgcggacgtgcttaccggcatcggccccgaatcggccggacaaggtgactaccataccgccgaatatctggaacgaatcgatctggccttcgcctgtgccgacttggtgatttgccgcgccggagccggatcggtatccgagctggctgcactgggtctgccggccatttacgtgccgctgccaatcggcaacggcgagcagcgtttcaatgccgagccagtggtgaacgccggcggcggccttctggtcgcagacaaggacctgaccccgcagtgggtgcatgagcatgtgcccgatctgctcgccgatcacgaacgacttgccgaattcggccgcaaggcatgggaatacggcatcagaaacgctgccgaaatcatggcccggcacgttctgcaattagccgaaccatccaaatagtattcagatatcatcccgtgcgcgatacagaccaatcccgtcccgcaacacgagatacggtcataatatagggtgctggaatccccaaaggagttttgaattgtctcaagatcagcccatcgtgcttgaccccacgtatgcctcgttcgatgctgcggcccgccccgcggatctcggcgccacccatttcatcggtatcggcggcgccggtatgagcgttctggccgaaatgctgcacgccgaaggagtcgcggtggacggctccgatcgcgcacacagcgccaaaaccgaccgacttgaaacgctgggcatcaccgttgaattcgggcagcgagccgaaaatgtcgcccaggccgagaccgtggtctactccagcgccatcaaaccggacaatccggaaatcgtcgcagcacacgcggcgggcaagcgcattgtgcatcgcagtgacatcctcgccctgctcatgaacggcaaacgagccgtcaccgtggccggagcgcatggcaaaaccaccaccagctccatgctgtcccacattctggtgaacgccggtgctgatccaagctacgccatcggcggctttatccaaggcccggacggcaccacgctggacggtggacacgcgggcaaaggcgatattctggtggccgaagccgacgaatcggacggcagcttcgccaaataccatccgaccatcgccattatcaccaactgtgaagccgatcatctcgaccattacggcgacgaagcccactaccgtgccgcgttcgttgcccacgccggccgggccaccggtcacgtgatcatcagtatcgacgaccccgacggacttgccgtgctggaggccatgcccgccgacgtgaaatcccataccgttgcctacggcactaccgcgcgtgaatccctgcccgatttgggcggtgccgcgtatgtctggatcgcttcggaaagcgagaccgcaggcagcggcgtcgaacagctcaccctgcatctgccggccgcggtgacggcgggggagccggtgtctcagagcgttgccctgaaggttcctggcgtgcacaatgcgcgcaatgcggccgccgccatcagcgctgccgtgctgctgggcgtgagccccgcagacgcggccaaggcggccggcacattcctcggtgcggcacgccgcttccaggtgcgcggcacggtcaagcaggtcactgtagtggacgattacgcccaccatcccaccgaaatcgcggccctgctggatgcggcccgacgccggtaccccgattcgaccattcgtgtgatcttccagccacacctgttctcccgcaccaagttcttcgcgcaccagttcgccgaatccttggccaaagccgatgacgtcattatcaccggcatcttcccggcccgtgaaaagcaggccgatttcccggacatcagcccctcccccatcgtggacgcggctgagggactcaaggacgcttccgcaggcacgtggattcagccggtcgaggatatgtgcctggccgccaagatgatggccatgcgcgcccaccacggcgacgtgatcttcaccgtgggcgcgggcgacatcaccgacatggatcaggtgctgctcaccgcacttgaggcccatcgggaaagctgcgagtgatgtccgggcgcacggtcagatccgggggcaatgacaacggctcacgtcgttcgtccggaagtccccgcaagccgcgcaccatcggttcacgcggaaacacgggtcactcgtcgaagtctcgcgctccccggtccgtgtcttccgggcatgagatcaacgagccggagatcatcgacgatgtgacggtagccaagggccaggccggtgccttcgtcgatgcacgacggctgcacagcgaggattacgttgccgaaacgctgcaccagaccaccggctccctaggagtcgtatcacgcccgaaagtggtgaatttcaccgaacgcgccaaagaacgcaagcgtgcgaacgtacgtgtcgtcgcgttacgcgtgttgattgctgtcgtcagcgtggctgtagtgacggggctaacgtggctgctgctcttctcgtcggtgtttcgtctggaaaccagcgagatcggcgtatccggtgccaacgaatgggtgagcgcgcagaccatccatgccatcgccgataagcaggctggaaagtcgttgttcctggtctccacccatgaggtcacagagcaactcaagtccattcccggcgtcagcgaggccaaggtctccaaacagttccccaagtcgatgagcgtggaagtcaaggcgcaacggcctgcggccatgctgaaaagaggcgataccctgaccgcggtggattcccaggcgcgcgtgttgaactcggtgaagaacgccaacgtggatggcatcccggtgatcgaggtcaaggatatagacgccagtctcaagaaccgttcggtgaaggaggcgctggcgattctgggcgcattgccggaatcgatgcgtaagtccattaccaaggtcaccgctgagacgcaggattcggtgaccaccacgcttaacgacggtgaccgcgtaatcatttggggagactcctcgcaactgaagctgaagctggcggaagtcgaggaaatcgacaagaacatcaccgctggcacggctggctttgccggcaaacatcagattgatgtttccgcatcccagaagcccatcatcaagtgacggcgattcagttggttccgttggttccggggcggcgttcgctccgttggtcctgctgacaacgttggtcccgtcaatgccggggcgatgttcgctgccggcgatttgcgcgagtagcgccatagggtgtatgctgaaaagtccggctgaaaagccggaagcttgataactcaagattgggggcgatcggtttcgacggtgacctgttcgctgcagggaagcgtgccgagaacgccgggtccgctcgtggatgaccccggcaatagaataagtgctaaatctaaccgcactgagttcgctctcgctgcctgatttttagtcaggattaaccagtgagcagccgctccgttcactcctcctcgtctttgggaggatgctgagcgtcgtttagaagacttgctgatgcagttgagcctcagggctgcatcgggactttaactgcggatatgctcgccatcagttgtctgcgacatcgatgggggcagaaaaatcgccaacttggccagcagactacgcacgtagaagactgtgggctcggtcatcggaccggggttcaattccccgcgcctccaccaatccgcctcggcggaaacaagccgcttggctttacgaaagtaaggctgagcggcttttcttattcccgtcgattccctcgtattctctcggtttcacgggataatgtgggcaaaatgtgggcaaaaatcgagcccgcgaagccctctgccacaacgcgagaacggccccgaccggcaagtaggccgactcgggttgagtcgtctgcgatgccggacggggccgaactgtgcgtggtggtcatgcggcgaggtcgaggcgctgtttgatggcgctgacgccgatgagcgcgccggcgaggatgccgagcgcgttgagcgtggtcactatcgcgtccacgtgagtccagccccatgcggggccgaccgtactgacgaacagggcgagtgcgggcaggacgatgaggcccaaccatttgaggatgtcgtagacgcggctggggattgcgcggttggcttcgatccgacgacctgcggttttggagaccgccgctctaccagctgagctacgcgcataggcggtcatgccggttgattgccatggcacatgaccattgggtggatatgagtaaagcccctgaaccggttgattcagaggctttcacactaatcctgatacggagtatgccacggggtggattcaccctactcccgcttgtgttttgttttttcaggcggcttggatggtgaggcgtccgccgagggcgtggattaccttggcgatggtctggaagctggggttgccgtccttgctgaggctcttgtagaggctttcgcgccccacgcccgcgtccttggcgatttgggtcatgccccgggccttggcgacgttgccgagcgcggcctgcatgagtgcggggtcgtcgtattcggctatggcgttgaggtaggcgatgatgtcctgttcgttttcgaggtattcgctggtgtcgtagtcggtgaattcggtgctcattgtcgttgttccttgtagtcgttgaggatgtcgtgggcttgtctgatgtcggtctgctgggtgcttttgtcgccgcctgcgagcagcagcatgagcacgttgccctgcatggcgaagtagacgcggtatccggccccggtgtggaaccgcatctcgctgaccgggcctcccacgggtttgatgtcgccgaatggcctgcctgcgagcttgcagacatcgagccgggcttggatggcggccttcgctttgtggtccctgagtttcttgaaccacttgcggtattcggcggattgcttgatttccatacctctactgtatcctacagactacatcatgtcaagccgaacggccgctggagcccatagccaacgcaagaatctcccgtatgttgaactcccggtagccgtcatcgacgggtctcgagctggggagtttgccccggttgagccagttgctgatccgcttgcggctgacctcgtacccgtagtttcccttgagccattggctcatgcctgccggggttttggtcaggtggattgattcggcctcggcttggctttgctcgcgcagctcctgcacgttgatgggattgccgcacctgcacaggcgcagcgcctcgcccttcgcggccatcacttcgcgtccgcattcggggcagacgccgattatcctgtgggtgcgcggcctgcggtcaaccttggcagagcgtccatggtgcctcgacctgctggctgccgcagtattggcatggttcggtggtgatgactgcacacgttgtactgtagggaaccatgaaagtcgtattgcaacgagtgtccgaagcgtccgtggacgtggtcaatgaattgggcacgctggatcccacgttcgagccgcagcagattggcccgggattcatgattctggtgggcgtcaccgatgaggacggcgacaagcagatcgcctggctggcccataagattctgaatctcagggtgttcgaggatgcgcagggcaagatgaaccgttcgatccaggatatcggcggggagattctctccatctcgcagttcacgctgttcgccgacgtgcacaagggcaatcgcccgagcttcatcaaggccggcaagcccgagcatgccgatttcatgtggatcaagttcgacgaggcgttgcgctccgggggagtgccggtgaaggaaggtcgtttcggtgcgcatatgcgggtcggactggtcaatgacgggccggtgaccatcgtcatcgacaccgagcatgacatgcctgacggaacacgctgaattgcgatagtgatttgacatcatatcccgttccctccaatatgttactaaagcgctttagtcttctgcgggcgagggcgcatgtcgatatgtttcccatgaacgggcagcacaatgatgtggccgcacaagcggcagagataaggggagtgaacagcagatgttcctgaaacctgaacagcaactggagcggtgcaagcgcatagtgcgccagcgcgtggaccctcatatccacccatcgatcgcacagcttgcggtggagtcctttgacattcccggagagccgatgcccgctgacgagttcttcgagaagctcaatcgaggtgacatcgacttcaagccgtttacgctcggcggtgaatggggcaccacatggggcacagtctggttccgcctgaccggtaccgtgccggccggctacccgaaaggcaagccgctggagctcatcctcgacctcggctggtacccgcactcctgcggcggccatatcgagggcctcgtctaccgtgccgacggcaccgccatcaaagccgtacacccgctcaactattgggtgccgttcatggatgctgagggcaacgcgcaagtgccggtcgccgaagacggcagcttcaccctgtacctcgaagccgccagcaacccgctgctgctcggcgtgcctccgttcattgagaccgaactgggcgaccatgccaccggcaagccggacgagccgtacgtattcaagtccgccgatctggccgaattcgatgaacgctacgagaactactccgtcgatctcgacgtggtgagctccctgatggaattcgccgacaaacagtcgccgcgctactggcaactcgccaaagcattgcagcgttcgctgaacgcctacgacgagcgcaaccccgaatccgtggaagccgcgcgcgcagcactcgccggcgtactggccaagccggccaacgcctcggccatgaacgtcagcgccatcggccacgcacatatcgactccgcatggctgtggccggtgcgcgagacacgccgcaaggtggcccgcaccgtatccaacgcattggctctgatggacgccgaccccgacttcaaatacgcgatgagctccgcccagcagtacgcctggctggaagaggatcatccggacatcttcaagcgcatgaaacagcgcatcgaagaaggtcggttcatcccggtcggcggcatgtgggtggaagccgatggcatgctgcccgccggcgaatcgctgattcgccagattgcatatggccgcaaatacttcaaggaacatctcggtgtggagcccaagggcgtatggctgccggacagcttcggctacaccggcgcatgg

SEQ ID NO: 2331 - DNA, 3341 bp, Unknown
  R119_18m  MAG No. k141_49414
attattggggttaatgagcaccagtgctcggatacgttcgccttcttcactttcgagtgcttcgcgaagctcggacacgtcgatataccaggatccgtcgaatcgctgctggtattcgatcatgtcgatgcattcgagtcgtgcaatcgattcgatgagcggatagccgggtttcggcgcgagcacggcatcgccggcgtcgcacaggagtttgatcagccacgagtaagcttcggacggtgagctcagtatgtacaggtcttcgacggcaacatcattgccttgcccttgaaggaatgcggccagcgcttcgcgtgcatactgttggccgcgtggctcggcgccgtatatgtctggcagaaattccggcgcgagcgcatgcttggttggattggagtcgttgagtttgccgagcgtgatgccatttgttttggcttccgcttccgctttggcgatgggattgggctcgctgatatcgactctggaggaaaaacgcatggtctccaccatactccttgggttgcgcaagttgctgcgtcaggcaagatggcatgccttcgctgcacaaatgttgacggaataagcgagagccgtccgacgatgaaatcggacggctctcgcttatacgaaggttaggaaccttaatggttcacggcatcacttctgcttggtgcttgcgtagtacgcggcaccgatgatgccagcctcattgtgcaacttggctgcaacgatcggggtcttgatgtcgatgtacggcaggaacttctcagacacacgagacacgccgccgccgacgacgaacagctgcggatccaagtagaactccatcagggaatagtacttggtcagtcgcttggcccacttcttgtagcccatatcaagcttttcacggatggaggatgccgcatattttcggcgtcgcccttgcccttgagcagttccagatggccaagctcggtgttcgggatgagttcgccgttgaagatcagcgccgtgccgataccggtacccagcgtggttgccacgaccagaccatcctgacccttggccgcgccgaactgctgttctgcaaggcctgccgcgtcagcgtcgttcaccacggtgacggggcgtccgcaagcttcggagaacacttcggtgacgtccacgccgacccaggactggtccagattagccatgtagccgagcttctcgcccacgtggattggcgctgggaaagcgatgccgaccggagcggattcgggaacctcgaaatgctcgagctgctggcgaacgatttcaccaacggccttcggagtggaaacttccggagtaaggatcttcagacgcggttcggcaaactcgcccttttcgaggttaaccggggctgccttaatgccggagccgccaatgtcaacgccaaacgcctgtgcagtttcaatcatcttcgacctctcctatcaaggtacataatgggtgttatcgaaccggtaagcgccatagtaactcgccccatgccccaaaacgcgccgaaaaagaataaatggtgaatacgattgcataatttttcgcaatgaaatgatttattctgcaacttttttctgcaaacgattcgccccatgtcagctcaacgcatcggcatggggcgaatcatagaaaataaccgtctgaaaacgatgtagccacattacttgagcggcggcatcggcttccaatccggatcatgcagcagcttgcgagaatcccaccaacccttggcgatctgcaccaagccggtcttcacatgctctcggtccaccatcaccaagcggatgacttccttggcggcggtcagcagcgtgcccagaccgaacatcaacggacggtagtcgccgaacgccatgaaatagcgcgccatgtagcctcggttccgcatgatgtggtaacggttcatgtcagaggtggagttaagttggcgcacgccggcgatatcccaattgccgatttcacgagtgcggcgcagaatcacgtcgggcaccacgatcgggttggtgactttgctggcgcggtagccgtacatcgtgtcgtcccagtagatgaagaaacgcgggtccggcaagccgatctgttcgacgatgttgcggcggaacagacccccctcgaaacacagagtgtccatcacgcggtagccggggcgtccgaatgcggccggagcgatcggattggggatgccgaggggaatgatgaaatcgtattgccagtagaacgggccgccgtcatagtcgtatcggctgccttggatcacatcatggcttccggtccacttggcaagtcgttcgatggcttcgggcatcacggccacatcgtcgtccatcacccagaaccattcggatcccagctcatatgctttctttacacctgcggagaagccgcctgcgccgccgaggttgtcggattgcggcgcgtacactacgcggctttcgttgcccgactggtcggcgatggtattgccccactgcgcggtgaccgcttcacggaaatcgtcgaccatgccttgggtcgcctcgctgtgctcgttgtccacgacgatgatacgccatggcgccacagtgagtttttcgatggattcgaacagggtggcgagcagctgctgacgtttgtacgtcaccacgacgatagccagcttttcgatggtgttcttcgcaacttgcttttcagtcatacgctccattcttgcactcgccctcaaccgaacatcgcctgtgttcacatcatgcggcacgattccattcgacggacgggctcttgcacatttcggacggctttgccataatgtacggcgtaatgcaggggaacccgtgtttgtcgggttgagatgggccaagtgaggcctgaaccctttgaacctgatggttaacaccagcgtagggaggcatgtctagtgactgctgtgacatcaacaaccaatttcgattatgagttcgacgccgccaaaggcatccaacgcaacaatcttccgccgttcgcgcaacgcatgcgcaaggctgccgacctggtttgggaggagggataccagcagccgttcatccgtgaacttggcgaaggcacactgcaacgcgagcgtttcgccttctatctgctgcaggattttcgttatgtaaatgattacgccagagtgcacgccttgggattggctaagaccaccgaccctgaaatcatggcgttcatgctcaaggtgcagaacggcgccctgcaggtggagaccgaagtgcaccgctcctacttggccagctatggcatcaccgaagagcagatgaacaatgtacgccagtcggccttcgcgcgcgcctatacgtcgaatatcctttccatcgcctatggca

SEQ ID NO: 2332 - DNA, 51396 bp, Unknown
  R119_18m  MAG No. k141_50159
actggcggcgggacaggaccacgttgttgcggttcttgtcgagctccaggatcttggccttgatcttctggccgatgtacggggagaggtcgcgaacgcgacgcatctcgacgagggaggcaggcaggaagccacgcagaccgatgtcgacgatgaggccgcccttgacggcttcgatgacggtgccctcgacgacgccgtcagcttccttgatcttttcgatgtcgccccaggcgcgctcgtactgggcacgcttcttggacagaatcagacggccttccttgtcttccttggtgacgacaagggcctcgatggtgtcgccgacctcgacgacttcgtcaggatcaacgtccttcttgatggaaagctcgcgggaggggatgacaccctcggtcttgtagccgatgtccaggaggacttcgtcgtgatcgatcttgacgacggtgccctcaaccagatcaccatcatcgaagttcttgatggtggaatcgactgccttgatgaagtcctcttcggtgccgatgtcgttgatggcgaccttggtgacttcagtgttgttctctgccatgtaaatatatggtttctaatagtggatggataatttctcgatattcagttatacgcacacccttacaggcatacggatattcacaatacaagcaactctgcccaaatttcctaggaaactctaggcgtgtcgttcggccatttccacgacgttggccaggagcatggctcgggtcatggggcccacgcctccggggttgggggtgtaggcggaggccttgtcgtagcaggccttgtccacgtcgcccttgatgcggtagcgaccggcttcttcgtcgtagacgcggctgacgcccacgtcgaccagcacggcgccgtccttgatcttgtcgggcgtcacgaatccggccgaacccattgcggcgacgatcacgtcggcgcggcgcatgtggtcggccacatcccgggtaccggtgtggcacagggtgacggtggcgttgacggcgttgcgcgtgagcatcaggccaatcgtgcggccaatggtgatgccgcggccaagcacgcacacttccttgccgttcagatcaatgtcataggcgtcgagcagctcgagcaccccgcgcggagtgcaaggcagcggtgtcgaaatgtcgccgcgcacatgcagcaccagttcgccgaggttgtacgggtgcatgccgtcggcatccttggccgggtcgatcatgtcgatgatcgcgttctcgttgatgcccttgggcaacggcaactggacgatgaacccggtgcaggccggatcttcgttgagttcgcgtacggcagcggcgatgtcgtcgaagctggcgtccgccggcagttccttcttgactgaggtaatgcccacttcctggcaatcggcgtgcttgccggccacgtacttcatcgacccgggatccgaccccaccagcaacgtgccaagccccggctggatgccccgggccttgagcctgctcacccgttcggcaaggtcggtcttgatcccggccgcgattcgtttgccgtcgattattgtggacatcaacgccctcccctgtggtttcgatgctttctatcgaaacgataggctatcgttggaacaagtcaggattatatatcgttcgctctcacgaagaaggcgtgccatggggactcaaatcacacgacttacgcgactcgccgcagccggcctgagcgccgtcctgttgttcgcgaccgccgcatgcgcagccaccccccccactgaaaccgagccggacaacaagaccagcgttcccgcaccgaccgggccgatcaatgtggtcgcctccctcaatcaatggggctcgctggccgccgagctgggcggcgatgacgtggaagtcacgtccatcgtgaactccaccaatgtggatgcccacgatttcgagccaaagacctcggacgtcgccaagctgtccaaggcccagatcatcgtggccaacggtgcgggctacgattcctgggccaccaaatcgatgaccaagaccacgaatatcgtatccgccgcttccgtcatgggtgccatggaaggcgataacccgcatctgtggttctccaaagacgctcgatccagcatggccacggccatcaccgatgcatatgtaaaggcactccccagcaagaagaaggccttccagaagcggctcaaggcatggcaggcggatgagaaatcgctggaaacatgggcgtccgagttcaccagatcccactccgacctcacctatgcagccaccgaacccgtggtctattatctgatggccgatctcgggttcaagaatcagacgcccaaggggtatacgcaatcgaccgcttccggcggcgaaccggcccccgcggacctgcagtctttccagaaactcatcgaagacaagggcgtggatgtgctggttaacaacacgcaggaagccagtgacgcgaccaatatgatcactggcgctgccggtcgtgccgatgtgccggtagtcgacgtctctgaacaaatgcccaaggataccgacacgctgaacgcctggatcaatcagctcatcaacaccatcatcgacgcggtggatccgagctatggctgcgaagacgccacggacggcaacgcgaattccgatgattccagcgccgacggcgccgccgcggatgaagccaatgcgcaagattccaaggccagcaccggttccagcacggagcccaagtacatccgtcagtgcaaggcggccacatccagtgattcgtctcaggattcggcaaaggccgatgcctccaatggcgattccggcgatgcctccggcaacgaccagaccgactccggcaaatagttagaagcaaaggacaacggcatcggattcatgcaatgccgatagacgccttgcacgagaagggttgtgcgaccattgtcgagatggccgcacaacccttttctttggttgtcaccatccgtacacgatattgagaacgattgtcagcatcgtttgccacaatcgggcgttatgagtgaaacttccgattgcatcgtgttcagcgatgccgccatcaagcgtggtgaccatatcatctggcagcatggcacctttgccattcccaccggttcggtcacggccatcgtcggcaccaacggcaccggcaaaaccacgatgatgagggccgagctgggacttttgccgctttgccatggcagcctgaccgtactgggcaagcccgcaggcgagatgaacaaacgcatcggatatgtgccgcagagctatgtggcgaatgtcgattccaatctcaccgccgaacaatccgtgttgctgggcctgaccggcacccgattcggcatccaccccatcaccaaggcccagaaagccaaagcgctcgaggcgatggagttcaccggcatcgccgacaaggcgcagtaccgtctgtccgaactgtccggcggtttgcgccagcgtgtggccatcgcccaggcgttggtgtgcgatccacaactgctgatgcttgacgagccgttggccaacctcgatctggccagtcaacgcgccaccgtacacgtgctggccaagctgaaccgtgaactgaacatgaccatccaagtggttgcgcacgatctcaatatgctcttgccgattctgaccggtgccgtctacttgctcgacgggcacccgcactacgccgatatgcacaaagtgctcgactccgacctactcacccacctctacggcacacaggtgcaggtggtcaccactccgcagggtgacatgttcgtgaccccgacgccggatgagccccaggaccagccgcaggatatgcacacggcagccgaagtggcgcaattgcaccatcatgagcacggcaacgccaccaatggcagtgccgccaacagcgccgagaatcgataacatcaagctagccgatccacagcccgtcaacgggctgcagctcaggcatggagaaaatacaaggacatgagcaccatcaacttttcgtacgatcccgaatggctggacacactgtccgctccattcatgaccaacgccttcatcgccggcctgtgcattgccctggccgccggtgtcatgggatacttcaccatcgcccgtcgttccaccttcgcggcccatgcgctggcccatatcggtctgccgggcgcgaccggcgcggtgttgctcggcctgcccgtatcactgggcatgggcgtgttcgcactgggcggcgcactggtgatcggtgctttgggcaagcgcgtttccgagcgtgaaatcgcaaccggcaccgtactggccttcgccaccggcttgggtctgttcttcgcgcgattgtcgagttccgcctcccagcagatgcagtcgatcctcttcggctcgatcctgaccatcaccaccggccagatcatcggcttcgccgtgttcgacgtattgctgctggcattgttggccatcatctaccgcccgctgctgttcagctcgttggatgagcaggtggcacaggccaagggtgtgccgatcgggctgatgaacgtggcgtttatggcgattatggccggtgtaatcaccattgccgtgccggcagtgggcaccttgctgattttcgcgctggtgatcacgcctgcggccaccgccaatattctggccggctccccattcaaggcgatggtgatcgccagcgtgctgtgcctggtgtcgatttgggccggactcgtgctgtcggcgatgttccccgcccccccgagcttcattatcgtgacgctttccaccctgttctgggctatcgccaaggccgtggagacagtgcggaagtaatctcattcatttttcttgcccccgctggcaaattcacagcgggggctttgttatatcttctccaccaaggcattggcgatggcggcgatgccttcgccgcggccagtgaatcccatatggtcggtggtggtggcggtaaccgataccgggcaaccaaccgccgcagacagggcggcttcggcttcagcacggcgtgtgccgattttcgggcggttgccgatgatcgccaccgaggccgatgccggcgtatacccgttggatgccagatgcgccacaacttcttgcagcatatcgatgccatgccttccggcaccatgcgcgtccgcaccgacaccgaacagtgaaccaatgtctcccaatcgggcggcggcaagcaacgcgtcaatcagggcgtgcgcggccacatcgccatcggaatcgccttcgataccctcgtatttggcggcatcggcctcgctgcatgaatcagacgccggccagtaaagcccggcaatccacagttcacggcctgagccggcaggcgcaaaacggtgagcgtcaaaaccctgccctatcaacactcctgcagaccccatgcagtccccttcgatggcgctgcccagacgaacggcagcaaacgattatgaatcacgaagccccggcgtatcgcataaggacacgaccggggcctcaacaatcaaatcacttcttcttggacttcttctcggcttcgacacgagccaaagtatcggccgcggcctcttcgggctcggcggtgtgatgcttgtcgtcaccgggttgagcgggctcgtagcccaggttcacgtcgagcagacgctgggcttccgcctcgtcgatcttctcggacaaggcgatctcagaagtcagaatggcgcgggccttggtgagcatacgcttctcccccgcggacaggccgtgctcgtcgacatcgcgctgggcgagatcgcgaaccacttcggcgatcttgttgacgtcaccggtggcgatcttttcgacgttcagcttgtaacggcgagaccagttcatctctttctcgatgatcggggtccgcaggatgccgaacaccttggccacttcggatgcggagacgatgtcacgcacgccgaccttcctggcattgtccacgggaacgttgatgaccaaaccatcggaagagagtacggacagctgcagatattcgcgcgtcactcccttgaccgtccgctcggtaatggcctccaccttcgctgcaccatgacgcggatagacgaccatatcgccgactttgtaagacatgtaccctccgagaactgacggcttacacacaaaaactcgaataattatgccatgcggtctggaccgcccctatgagagcgctcacaaccacggagacacaccgaaaagggcaagaattcgccattttcgacgcgccaatgtagcgttttcgactccaacgcacgtagactttgggtcatggctaaagaaacgaagatcaaggaagataccgtcaccgtgcctgtcgcccaaggcgacctcgatgcggtgagcaatgctgaattctacaacccccacggagttctcggcgggcatctcggcatcggcaagcatgccgacaccgccacaatccgtgtgctgcgtccgcttgccaagtccgtgaccatcctcacccaggatggcgaatacccgatgacccacgaatacaacggcgtgttcgtggctaccgtgccggcctccggcaccaagaagcagcccacgattcccgactaccgcgtcaggaccgagtgggaaagcggcgcagtgctcattgaggacgacccataccgttatatgcccacagtcggcgacatggacacctatctgttcggcgagggccgtcacgagaagctctgggaggcgcttggcgcgcacgtgctgcgctatgacgatccgatgggcggcgcagacggcacgcccggcgagcaggtggtaggcaccgcgttctccgtgtgggccccgaacgcccatgccgtgcgcgtggtcggtaacttcaacgcctgggatggccgtcgtcatgccatgcgcgagctcggctcctccggcgtgtgggagatcttcatccccggcatcggcgcgggcgagacctacaagttccagatcctgaacgccaattacacgtgggagatgaaggctgacccgatggagcgtcagcacgaggttccgccgcacaccgcctccatcgtcaccgaatccacctacgagtggaacgatgacgcctggatgcagcaccgccgcaccaccaacccgcatgatggcccggtctccatctatgaggtgcacgccggcagctggaagcagggactgacctaccgcgacctggccaagcagctcgtggactatgtcaagcaggaaggcttcacccacgtggagttcatgccactggcacagcacccgttctccggctcctggggctatcaggtcaccggctactatgcggtggattcccgcctcggctcccccgacgacttccgttacctggtcgatcagttccatcaggccggcatcggcgtgatcatggactgggtgcccgcccacttcccgaaggatgccttcgcactcggccgcttcgacggcaccccgctgtacgaggacccggacccgctgcgcggcgaacaccccgaatggggcacctatgtgttcaacttcggacgccgcgaagtacgcaacttcctggtggccaacgccctgttctggctcgaggacctgcatgtcgatgcgctgcgcgtggatgccgtcagctccatgctctacctcgactacagccgcgaacccggccattggcgtccgaacatctacggcggacgcgaaaacctggaggccatcgacttcctcaaggaagccaccgccaccgcgtacaagaacaaccccggcgtcatgatgatcgccgaggagtccaccgcatggccgggcatcaccgcccccacctccgccggcggcatcggcttcggtatgaagtggaacatgggatggatgcacgacaccctcgagtatctgcacgaggagcccatcaaccgcaagtggcaccacaacgaaatcaccttctccatggtgtacgcctactccgaacactacgtattgcccatcagccacgacgaagtcgtgtacggcaagggctccctgtacggcaagatgccgggcgatggctggcagaagctagccggcgtgcgttcgatgttcgcctatcagtgggctcacccgggcaagaagctctccttcatgggcaacgagctggcccagtggggcgagtgggatcacgacgcctccatcgattgggattgcctgaactggcaggagcaccgtcaggtccagaccatggtcgccgacctcaacgccttctacaaggcgcatccggcactatggagccaggacttcgatccggccggcttccagtggctgaccagcgacgatgccgaccacaacacgctgagcttcctgcgcatcggcaccaagggcgagaccttggccgtggtggtcaacttctccggtgaagcctggcccgattaccaggtggcgctgcccaccggcggcaagtggaccgaagtgttcaccaccgatgacgccaagtacggcggctccgacatccacaacggcaccttcgaagcggtcgagggcgaatatcattcgcgtccgttctcggcgaagatcaccgttccggctctgggagttgtattcttgaagccggaagactgaactggtcaacaggctgaaaggtaaccggtttatttatgctcaataccacagcgcgtcagaatacgacaccgcgcatggtgctggtggtcgaggacgagcccacactcgccacggccatcgcccagcgcatcaccgctgaaggatggaccgctcgcgtggccggggacggcgcttccgccgtccaggccgcgtcccagctacgccccgatctggtaatcatggacatcatgctgccggtcatggatggtcttgaggccaccaaacgcatcgtcgccgaacgtccggtgccggtgctgatcctcaccgcacgtgatgacgaggccgacaaggtcatcggtctgggagcgggcgccgatgattacatgaccaaaccgttctccatgcgcgagctcatcgcccgctgcaaggcgctgctacgccgcgtggagcgtgcgaaggtcatcgccaagaattcggagaacgagaagctgctcgacttcggttcgatggtcatagacccggcccagcgcatcgtcaccgtgaacggcgagcaggtgcatctgacccccaccgagttcgatctgctggccacgctggcccgccgcccgaagtcggtgctcacccgcgaaaagctgctcgaagaggtctgggactgggtcgacgcatccggcacccgcaccgtcgacagccacgtcaaggcgctgcgccataagctcggcgccgataccatccgcaccgtgcacggcgtaggctacgctttcgagccgccgaccgcgtgatggcatccaaaaaacaacagcaatcccggcttgatgcgatgaaacctcgcgtcaagccggttgatttgttctcctctctgaagctggaactcagcgtactgatcgttatcgccactgccatcgcgtttgccatgtgctggttcctcctgaaattcggctggtccggttggatcgccatgccgctgactttggtggtggccttgggcatcacctatttcttctcccgcggcatcaccgctcccttacgccagatgcgcgatgtggccgaagccatggcggatggcgattacacggtccgcgtggatatcgatcaggatcgtcatgacgaggtcggccagctggctcgctcgttcaacgagatggccggcgaactcgaacatgccgataaaatgcgccgcgacatgatagccaatgtgagccatgagctgcgtacgcccgtttccgctttgcaggcgatggtcgagaacatggccgacggcgtcaccgagcccactcccgccaatctggagagcatcctcacccaaacgcagcgtctctccgacctcatcgccttcctgttggatttgagccgtatggaggccggtgcggcgagtctgaatatcgaaaagttcaacttcgccgactttcttgacgagaccatcgagccgttggaaatcgccgatggcggccacgcccacgacatccgcgtcaccgtgccggccgacatctcgatggaaggcgatcaggaccgcctgcgccagctgttcaccaacatcatcgccaacgcactgaagcattcggccgacggcaccaccgtgctggtcgatgcccatgaggatgacagccaaggcaccatcgtgaccaatgtggtgaatttcggctcccagattgcaccgtccgaccgttcggatatcttccgacgctttgtcaaaggcaagacgggtcccggcaccgagtcgggcggcaccggccttggcctgtccatcgcacgttgggcggcccaattgcacggcggcaccgtcaaagtggtcgatgacacgcgaggcgccgatttcgaaatcatcctgcctaaatatcacgtcgccgaacgctgatattgtccgccgtcctaccgtatactgtattcgaacagatgttcgaatacagggtgggaggcacagcatgacacagcaatccaagtcacgaaccatgccgcacgacaccacgctgtttgtcatgcagatggccggcgattccatgatcaatgccggtattcataacggcgatctgctgattgtcgatcgttcgttggcaccagtccccggagatgtggttgcggctgtcatggacgatgaaatcgccatcaaacggctggtttcacgggccggcatcaccatattgcacgccgagaatcctcgatatcccgattacatgccgagcaacggcgcttcgcctgctatctggggcatcgtcaccgatgtcattcacccgttgatatcgtcatcggaccgtcgcgccacggcatccgccaataccagcacgcccaccaccttggtgccggcctgctgaaacacctgaacgcattgccgcacggtggcacctgtggtgacgatgtcatcaatgagaagcaccgcgtcgccatggcctatgagatcacgcttcaccctgacatgaccggtgatacgacgggcacgctgtaccgaagaggtctgctgcacggagcgtgccttggtggaggagctcagggcattgcatggtcgcgcattgacaccgtacccacgcaatgcccctgccaccgatttggccaacggtgccgtatgggcacgccctcttcggcgcattgacgcccgcgatgacggcaccggaaccaccaatacgcgatgccccaagcatgatgatgatattggcgtcttgttcagcagcgacaccatgatgcggccgaaagggccgtcaagctcggtatcgtcgtggtccttccagtcgagaatggcacgacgcgccgctccctggtaaatcgatgcggaccatatacgggctccgccaccaccgtctgtatcccgctcccggcattgtgcgaacaaggcccgacatgccgcacacaatacctcatccggcgcgtcacacccagcgcagccgcgtggaaacagcagattgcaggcctgtgcccacatcgcatgccaccacttgtatacgctcggcccgtccataacgcgtcaccatcaagctggagtatcgaatcgcgcaagcagtgcatccagcagttgtaccgtgtcttgcggattctccacacgaacaccgatcgcaccggcctcaaccgcaggatagtcattacccgtaggcgtcatgcgatcgcccacgaacaccacttcatcggcccgtatgccaagtgtctgcgtcagcttgcgcacggcataggccttatcgatgccgcattcgctgacatccacactggtgtagccgccggccctgacccgcatgtgcggcagatcggccttgaccgcttcgaccagcgcctgtttcttcgtgttatcgcgatcccatgcctgtttggccgctacgggtgcgaactgtcccagagcggagaaggtgatctggctgcccctgttctcgattcgaggcccccatacctgctgttcccacaatcccagttcccgggcatgtcgctcaagactttccgagacagcggccacggtggcttcggacagatcatgcgcatacaccaaggcccattgcgtgccatcccaccggtaataccgggagccggaggcaggcatgacatgcagattgccgcgcctggcattcggggtgagtacatccagcacctgtgaggtgaccaccgccatgccgccccctgagatcagggccaccaccgtatggtcgagcagcgcacagaaccgttcgatcatcgcgggcctcatcggctgttttgagctggccagcgtgttgtccaaatcgaaaccgaacaccttggcgttggagcagacattatcgaaatcaagttcggaccacgaacgtaccaccatttgtcgcgcctccctcgttgacgaatgttcacagccaatgaaccaatcctaacgcatgttgcctccgccatgtcctatggtgggaaccatgcttcagccaccttggaacgcacgaatctaccgcaaccgccacggtcgcggcacacgaaccccgatgttcggcacccgtctgccccgttaccgcactcgcaccggcatgttcgacgatatggtggcggcccaggttcgcaggctcggccaagcgtggccggaactgatacgtccgctccagttcgcggtggaggatgtgccgccttcggatccgacgccttggcagaccgagccgaatatgacgtcccagtgcttccccgccagccacggcattcccgcacgagtcgtgctctaccgtatgccgttgcagaccgaggcacctaccaagctcgaattgcagttggccgtcagggatgagctggtggcccgcatagcggaattgtatgggcgcaggcccgaggaaatcgaccccgattggggcctgtgacagtattgcgggggccgtgccacttcaagtaagacagtggcacggcccccgcagctatatcggcgccgaaacatcatcagaccgatgcttcggcgagcgcgctctacttgacgatggaggaatcgttccgagcccagacatggaccgtggcgggcatcagcgttgaagcgtcgatggcggacaatccggcgatgtccttgtcttgcaacgaatcgtgactgaaacgcgctccccagctcactttcttggatgagtcctccaacatcagcacgaccgcggtgccatgatcgccggaaagtttgccggtctcaatcgtttgcgccgcgttcgcatccagcgtgatttcctcggaggtcaccgaagcaccggcatcatcgtaggcgtgcaaggtgaccgtcctgcgcgcattggatgtgttggccagcgtgatggaggcctttactccgtcgggaagggccaaccccgagaattcggatggctcgccggcattgaccaatgcgaaatcggcttggccggagtcaccggagcgtgtggccttgacggagaacgacacggcatcctctgcggtggacatcacgcccaacgccccatcaggagcctctcccaagtcgatcgccgtcaccttatcggcagtgacggtggcatctttggcgggaaccaatcctttgtcggtaatccatgacagcccggtgctggtgtctgccttggcgaacagataagcggtgaccgcatcgccggcagtgatggacggcgccaccgacgcattggaggcggtcggcagcggcagcgcgaaatcagaacccttcggtgtcagaccatccatggtcaccgtacgtaccacggacgcgataggagtctccttgctggaaacggtcacgaacagaccatgctgcccatcgaccgcggcggacagttccatcgaggactccccctcggccggcacagacagcgtggattgtgtggacaatgccattttcccggctgtctcggaaccccagacggcaatgtcgacggtggtcggcttggtggagggattcgagacgatgagctgctgtgtggtaccggtcgtgccgccggagagcaggaacgactggctgagcgaggtcgatacgcaggatgccgccgatacgcctctcacatcgccgtcatcggcccatgatgcgatggtgccgacggcgccggtgccagctgcggcctgcaacatacgggtattgatcaggcgagctccctgatcgatcttctgagcaccggttttcaccgaggaatcgtcggtcggatcggcgtctttcaaagtcacgtcatctgaactggacttttgcccgatcgccgagacagtggcgctgtagacggagccgaacgccgcatagcgcgcctgtgtgctcagattgccgacagtggcctggaaggcgctgtcgccgtacgtgccggtatcggccaatcctataggtgccgggcagtaggtttcggactgggtcggactaactgtctggtcgatggcattatcggaagcggccaccttgtctacccagatattggggatgggggccatgacgagaacgacgaacagcgcaatcaacaccagcatggtgatcacaccgagcacgatgccgatcgcacgtttgaaaccagaagttttgttgctcatgcctgctcctccaatccgtaggacggtcgtctgcgaggcatggcgaccaagcagtacaacgccgtgatcacacctaggcatatcagccagacgtgtctccagacactatgctgtgcacgttgctgccatgaggtatccacctgctgtgaggtgctgctacgcagcgtcagacgatagtagctgccgctatccgtggagaccagggactgggtgccgttcgatgcggcgatattcgcgctcaactgttcatacggcatgtcgttcgaggaatcgccggtctcgggaaccacgtagatgccgccgaatccaagcgcgctgatggccgcgatggcctcttcgtcgggattggacagcagcgaggcacaggcctgggccagttgttcgtcaaccgcatcatgcttgccggacagcaggcgcgcccgctggaccggggaactgtcgatcagatcgccgcgcgaggtgcgcatcaccgcatagttgacgatgttgcgggtctccgcgctcacggcaagcacacgatgatcggcactggcttccagataatcggtggtgaccatgggcaggccgttttcggacacgcccagtcccgcatccttatgacgttcgatgccatacatgcattggatgccaatgcagcacaccagtatcagagcaagcaccacacggccagacacgatgagcacatgcagacggtcccttttcggtgcgggatcgctgccggacgcatgcaacggttggaatcgcttcaccgccccaccggcgacgaggcacacgcaggcaaggaagcccaatatcatcatcgcgatgccaggctgcgcggaaccggccacgacaccatcagcatccacggctatggccacacggctggaaatcagggcgagcgcgcctccgcaaacgattaccacccacatcagccgcgaggtccgcaacgcgaacggcagcaccagcgaagcaagagcgagcagcgtgatgacgccgaacagcacagtgaccgccaaatcggcataatcggtcgatcccattcgccatcccagcgcacgctgtacggcctcaagcaggctcagcgacgccggcgacccgttggcggatgacgttggcactgtgatgtcgccgaacagttgacgccacatgcccaaatcggcgtaacgcaccgcattgacgagcgtaggggccaccgcaaaggcggcaggaaccggaataagcaacagcatggcgcgcttgcggcgcacgaacagcaggaacatcaggaacacgacgatcagcgcgaacagcagctgcggttcggcggccaccacagggatgaagcacagtgcggcgatggccgcggcctgaacggatgtgcgcggcttgagcgggtcttcggtatggtacatgcccacggcacggaacacgaatgcgaacgcggccggcaggaacaccattacggtgagcatcggcatattggcctgcgcataccagccgaacataatgccggtggatgcccacaacagtcctcccagcacacgaaccacgtccgagcgggtgaatacgcccgccagcgcccagaacgacaatgcgctcagcggcgcggccacaaacagtatcatcgccagagcggcggtcacatggccgagcgtgaccagcgaggccagcatcagcaccagcagccacggcgtgggcggcgcaggaatgccggtgccgctgccaaacacccatggcgtggtggcggactgcaccagttgagtgaagctggcaccggtggaaagcaacacatcggaatacaacgatccaccggagaatatcgaacggaacaccggccaatacatcaccacgatggccgcaaagcacaccagcgccatcaccacggctgcgctccagcgatatatggtgcgtgtccgcagatgggcacgttccagcggactgagcagcactctgccctgctgggattggaatgcatcccgacgatcatggaactgcttgatctgccgactgtcggcgaacaaaacctgcagggacgatgcggcgaccttcgactgtctggccaccagcctgcgcgatttcatgtttcccgcgatatcggccaaagccaaccatggcaggcacaattgcacccatgcttcatacggcttcttgccgaacatcatggctatggccatgccaaaactgcgaatcagcctccacagccagacgataatccaggacgacatggccaggtcagtgtacagatagcgctgttgggagcgatgcaccgtcatcgcatgattgaccgtgtgatcttccttaagcggctccccgcctcgcgtacgaatgccctcataccgtgcgcgacgatgtgatatctccgcttgcgggactaccaccacgcgtccgccgctcaggcagacacggcggcagaaatcgaccgattcgctgtaggtggtcagccaggcattgatgccccgcagtcgcgtgaattgcgacatggacaccagcgcgcccgccagcgacaccgcgaacacatcctgtcgcccgtcatactgctcctgatcgggttctccatcgaccaccagggaatgcacggcgtgtcggcctgcatacataccgacatcatgcaggtgggatccttcccaatcacactgtttgcacccgagcacgctggcacccggcgtattgcgccacgcctcaagcaatcgttcaaggcatgaggcatccgaggggcgggaatcatcatggagcaaccacaatgcgcggggagcgtcatccaaatcggcccgatccaacgcccggctgaccgcatcgccgaaggaacgcgcgcccttggccgaaacgatgtgaatggtcacatgcttggactgcggcacctccattaccggccccgatggcgagggaatgacctcgaacgaagtggttatcctcgaaccggcgcgcccggtcgcgtcggcgatgatgacgactcccggaagaacattctgcgtcaataccgaacgcaatgtagaccggaggaaacgcatatcctcctcaacggtgatcacagccgtaatgccggtatccacatcctgcctatgcgtatacggtcgagaagacatggcgtcggccaacgcctcatgaatatcgctattacctgtcggactcataaactcccagtgtacgcaccagacttgaagggggtgtgtgtggaactacgcctgctcccggtgctctcgcttatatcgacggcgttcgcgctcgctcatgccgccccaaataccgaatcgctcatcatggtcgatggcccatttcaggcattgttcacgcacttcgcatttggcgcacacacgcttggcatcacgggtcgagcctcccttttccgggaagaacgcctccggatcggtttgcgcgcacaacgccttgtgctgccaagatacatcgccatcaggtcggaatagtccccacaattcatgccatggctcttcggctgaatcgtcgaccacaccccacatgcgattctccttgcctattgagcttttcatacggactaaattacacacatgcaatttcgtttttgtcaaattctttctcgtgtcattacatcatttttatggaactgtgtgctatggcgcggacacgatgccctgatgccgttgcacatgatattgtgccgttcctgcgcaggaacaccatagtgcaggaacacccggcggatgctgtgtcaaagtgtcattcagacaatcgacagtttcaggaggggttatgacgcaggaatcaggtggggcggatccgcatatcaacccgccaagcttcattcctgcgggaaatcgacgcacccgaccttccgggcaggtgccacgctccttcgcccctgcccgcgcctcacgtcagtcaggtcaggctccatcggcccgtccgtccgtcacgggaaatgacatcgaagagcctcaaccgaacgccaacgccacggcgaacgccaacgccacggcaagcgccaacgtcacggacaacggcaggcggactccgcccagtttttctccgaaaaccggacgtgccacccgcagcacggctccggatgccgccgcaccgcgcagcattccgccgtcgcgagcgcggatgtcttccggcttatcccgcaacgccgtgcgcaatccgtcggatatgtcggtttcccggccctcatcgccagcagcaaacgtgtccacgaagttcagccatcttggccggccggcggcggcaacggcgaaaacggtaacggcacaccggccgcgcgccttgcgcatcatcttatgcgcgattgcggtactggtggcggcgttgattctttctgttttcggtgcctggcaatgggtggacagcaaactgaaccggagcgactggctgaccgacacccccaacacgccggcctcgacctggctgattcttggctccgacgagcgagacggttccaccgattacggcggcgtggacaatatctcaggcttcagaaccgatacgattctggtgctgatcaagcccaaaagcgggccgagttcgctgatttccattccccgcgattcgcttatgaacgtcgatgaccagtacatgaaaatcaatgcggtggcgcagattgccggcaagaaagccttggtaagcaacgtcgagcaaatcaccggccagaaaatcgaccatgtggcgcagatcaagttcggcggtctgcagaacgtggtgaacgccttgggcggtatcgaactgtgctatgacgaggatgttcaggattcctattccggactgaactggaaggcgggatgccatacgacggatggttccactgcattgtccttctctcgtatgcgatacgccgacgcgcgaggagacttcggacgcaacgaacgccagcggcaggtcatctcggccatcgtcaaaaaggcttccagcagtgggaccctgaccaatccgtccaaagtcgtggcagtgtccaatgccgcgatgagcgcactcaccgtggatgaaaaaaccaacccttacacgttgctcaccatggcgttggcgttcaaaagcgccaccggctcgaatggcatctccggcagcgtgtactggtccgacccagattattacgttgatggcgttggctcctcggtgctgctcgatgacgccaggaacaccgaactgttcaatcagcttgccgacggcacgcataaggccggcgccgtgggcaatctggcggaaggctgaccgacgctttcccggagcccatcggcttcatcgtcggcgcatgatcgccgccgttgcccacgcagccaatcatgcacgggcaaaatgtcatgtggataactcggcaagctagaaccacataccttgattcggcttgcgctttcggcatgcgttcccccacgctggaagcatggcatcacagcagaacgattcgaagcgacattccgcccatacggcatccgccgtatcccgggcgaagcaccgtttgggcgagccgccattgcgcgcccgcctgaccatgcttgccgcggcgtgcccgatgatcgcgcaggcattgatgatggtcatactgctgttgcacgggcaatggctgttcgccgccatgatcgcaccgggcatattcgcctgtctcgtgtccctgctgctgacgctccccccacctccgggcccggagaagacccccgccccgcaacaggcaacgatcgatatcggtatcacggacgatgccgatgcccgcgccgcagacctccgtcatgcgccgtcgcagccgatagaatcgctgctgcacttcgcacgcctgccatggcgcaccattgtgggccattggcttgaaccccttgaccttgcggtgccgatcggcatgaccggaagcgagccgctgaggctcgatctgaaccgtcaggggccgcatgctctggtggccggcaccactggttccggcaaatccgtgttgctacaaagctggtgtctggcgctcgcttcgatgaacgggcctgagcatctgaatttcgtgtttttggatttcaaaggcggttccgcgttccgcaaactcgaacggttgccgcataccgtgggcagcgtatgcgatctggatctggcgcatgccgtacgcgcgttgcgtgcgctggaagccgaactgacacgccgtgaacagctgtccgccgctgtccatgcttccgatatccgtgatatggtcaatccgccaccgcgcctgatcgtggtcattgacgaattccatgccctgaaggaccagctcccggattatgtgaatcgtctggtgcgtattgcctcgctcggcaggtcactgggcatgtatctgatcgcctgtacgcagaatccgatgggtcaggtcagtgccgatatgaaggcgaatatgtccgtcagcatttgtttacgggttcgggaccgtctgcaatcatgcgagctgcttggtgatggtcgtgccgccgacctcagtccggcaatgcccggtgcggcgttctgcaacgattccgaacaggtgacggcattccgctgtgcaacggcgcgcgatatcgatgcggtatgccgccagatcgcgttcgcatcgcggttcgtcgggagcccgccgcagccgtccctgtttaccgcgccacttccccggcacgtaaaagaccggactgtggccaatcacgcaccgcaacgcattcgatttggacttgccgacgatggcatcaacctgcgagaagcgacggtatccctcaccggtggcaatatcggtgtcatcggcccgcaggggcgcggcaaaaccacgttgctgaaaacattggctcgacacgccagcatggctgatggcttggcggtacgtgtcagttccccgcatcgccgggtatggggatcgcaatggcttcgcaacggccgctgcacgccgtatgccagctcggatgcaccatcgcctccgcatatcgtgtggttcgtcgacgacgccgatgagttgttcgacccattccgcaccgacgagcaggcgctgtctttcacacatgcgttggccgatgagtccgtcagcgtggtattcgccgtcagcacgattcgcccgatacgtataccagagcattgcaataccagaatcgtgttcccgtgcggggaacgaacgtctgaccttatggccggagtccccgctcgcctattggatacgatgagtcatatcgatgccgacaacgcgggccgggccgtgctcatcgagggcacatcggcatgtctggtgcagtgcgcttcgtgaaaacttcggttttttctcggcgaaacctcttgaaaatcaccacggttcgtggttaccttggtactggacttaaggaacaacaccagccacggggcttttaagggaggcaagcaatgagcagcgcttttgattggcgagccaaggccgcatgtcgtgacaaggatccggaactcttcttcccggtgggcaacaccggtgcagcctatcagcagattgaggaggccaaggccgtgtgccgcacctgcaaggtgattgatgcatgcctgaagtgcgctctggacaccaatcaggattacggcgtgtggggcggcttgagcgaagatgagcgtcgtgcgctgaagcgccgcgccatgcgcgcccgccgttctcaggccatgcagatgcaaatctgatgttttgattatcgcttcgtcatactaggaaaccctcccacttgggagggtttccttatttttgggcttcgcatcactcatcctgagcggccctgagcttcatatcaagcaccacgcgggtgccgcctccgcggcgcggctcccaatgcacggaaccaccgaaatcattggtcacaaaggtgttgatgatctgcgtgcccaaaccagaaccggaagaacgagccaatcctccctgttcttcggagccgagaccggaaccgtcatcctcgaccaccacattgaggttcgggccggagcggcccacggaaatcgtgatatggccatccttgcggccttcgaacccatgctccaccgaattggtgatgagctcggtcagcacgagggacagcggcgtggcatcctgagcgggcatcatgccgaacttgcccatgtagttgatatcgatgtgctggtctttcatcgtggctaggtccacggccatgcgcagcaggttggcaatcaccttgtcgaagtcgacgacctcgtcggcggtctggctcaatccctcatgcaccatggcaatggtctgcacgcggcgttgcgcctcctgcaattccttcttgacctcatccgacttggtcttacgagcctgaagcctcagcaatgcggagacggcctgcaggttgttcttgacacgatggtgaatctcggaaatcgtagcgtccttggtctgcagctcctgctcacgacggcgcagctcggtgacgtcacggcatagcagaatcgctccgatacgaccgttgttgtcatataagggcagcgagcgtatcgagacggcggaacggttggcgttgagttcggagtcgaccgcggctttgcccgccagcaccaacggcagggtttccggaacggggtcgttctccttcaacagctgtgtgccgagttcgctgaggtaatggccaggcatggtggtcagcaggccgagacgcctaaagcagctgatggcgttcggggctgcgtatcgaaccacgccgtccatggtcaggatgatgaagccgtccgccacgcgagcgatatggcgctggctcatcaccgaatccttgtaggggaactggcctcgcggaatcatctcgtacagctgtttgcccgcgttaatgctttccgactcatatcgaccgttggattctcgtgtggccatattggtctcacgcacgaccaagcccaaggtcttgccattgtgccgaaccggcgcgtacacgttgcagacggtcgccttgcccacggttctcaataccgtggagcggaacaccacgctggagagcatggcggcgtccaattcgccgaccatgtcatccggcatgacgtttcccaccacgtcttccgcccgtagcgtcatcacggtggatgggcggcattgttcggccaccacgtatttgccgtcaccgttctgtaccagcagcagcaggtcggcaaagctcagatcggcgatcacctgccaatcggcaacgagatgatgcagccactcgcggtcctcgtcgtcgaagtcggggcgcgttgcaaggatgtgtgaaaaatcagccatgcccctatcatacgcagacacgtcgccgccattgcggcaagccacacgggcaagtatgacgactattacgacatcgcatcttcaataccgcaccaatcgcgttgcacggctgcccgccgttcaggcggtcatcgcctcatacacctgagaggacaatgcggcgatctgctgctgcgcggttcccgagaccactcccgaggtcataaccaccatcacataatcccgttctgttccgtccgcggccttgccccacaccacggcggcatcattttccacgccggccagttcaccggttttattggccacctgaatgccagacggtactccggcgggtattttggcgcgtcgcgtctgcccgagcaatacgtcaagcatggagcggctggcttcggcggaaaccagtttgcctcggtacaatgcagcgaggaatctgccgcaatcggaagccgacgtccagttctcggtgccggtcccgtctgtgccggcatcggacaacacccgcaactgcttggatgagctgaagccgtatcgggcggccgtaccagtcacccgttgcatgcctgtggccatgtcgccatcgccgaccatcaataccagctgattggtggcagcgttcgagctgacggtgatcatctggttgatcagcgaggtggtatcttgcccgcccgcggccaaggtgccggcatgttgcttatcgtacacggcaagcatcacgtacagtttgatatccgaagccgccaccatgggctggccgccgacgctcacggttttgcccgtggccagatcctcgacatacaccgaccaggtgcctccattgccggccacagctgccgtgaccgccgaggacacatctgacatccgcttctcttccgccaccgtggtcaggtcgggagcaggtgccgccttgcgctccaaggtgtcatgcacagggcgttgttcgtgtttcgatgacgccgttgacgacgatgccgacgctgttgccggtgagtccgatgccgaggcgacgggcgatgttttggcgtgcgatgcgccgagaccgttatgcgcgtacatccatccaccgacgccgattaccaaagcggcgatcagggcggcgatcaggatcaatcccacgacgctgcctgttgcacgcgtgtcgctactatgcttggtatgccgagccaccgtcactgccccaatgtcttgtcaacactggccagcacccggctcatcaggtccgcggccaccgactgcccctgatattgggtgacaacggccacggcggccttatgaccattggcttcgacgatggcgaagtaattccaggtgtcctggatgccttggcctcggtgggcatgcacgatcatgtcggacggaatggttacgccttcggaagcaatgtccgcgttcatcaatgacgcgcctcccttggcgtccactgcggcgagcatgcgggccgcatcgcgggaggaaccgtaattctcataaccggcattgctggccgccacatcgccgaaatcgcggttgaacgaggtgcccttatacccatgcgaagatgcccacgaattgacgccgctccagccacctaccgccgcggccgccatattgccggcattgttgtccatggaacccatcatcgcgtttgcctgcgctttggcgttgtcatcgccattgtcctgggccgcaagatagaccggcagatagagaccggcagccacgaattgcttgccggactgcgacgtggtcgcgatggtggcgtcctctgaggaatcggcgtatgttccatcgatgaccatggcggagacggccacatcggaggacgagtatgaatccgcgatgtcagacaactggctggatgtgatcaccggagtggaaggcttcgacttctccgtcgagcttttcttggacgaatcgtcgctgttcttgtctttggcgctatcagacgtgttcttcttggccttggacttggcgtcagaggaatccgtcgtgccatcatcggcggaatccgacgcatcggacccggtcgactgtaccgatgtttgcgcctgcggctgagctccccacaatcccatgctatgggtgacgaacaagccgatgaccaacgccacgacgcaaatcagcgcgatgagcacaatcaccaccgctttggtgtgatcgccgccaggacgcccggcgggaggttcaggagaagcaggtgccgcagggccagcggtcatgggtcccggtgccataggccccggcaccgcggaacccggcgccgttggcggcgcgacggcgggcaacggcgccgccggctgcttcaccagcgtcagcgcgttatcgtcataggcaggggccgccggattggcctcgggctgctccaatgggcttccgcactgcgaacagaaggcatttccttgctcgttggcaaacccacactccgtgcaatacaccatcaccgaaccccttattgctgtgacgttctcatcttcggattccatagtatcgccaccattgggtaatagtgttcgtgtgagtcggtattgacaagcataaaagttacgctaacgtaggttacggcagcgtaagaagcgtatcgtcaactcgtgaaacgggggcatcaccatggcatcaacaaccgacgacgtggaaaagacgatgcatcacgacgctcataacagcgcgacgattgcagaggatgccaccatcgcatccaagcgtcaggcggctatcgaggcgcgcgaacaggcgttgcaggccaaggctgatgccgtacgggccaaggcccagttcaaggccgaggccattcgagccaaagccgaggagaaggcccggcacaagctcgccaaagcggagcaccgtgcgctgaaaatcgagggcattgcccctgcggaagtggaacgcaagattcgtctcgacgtgcacggacgaccaaagccgttgatgcgcggctggattcacgcgattgccgctcccctgtcattggcggcaggcatcgtgcttatatgcctggcacatggcgcgagtctgaagtgggcgtgtgccgtgttcatgacagcgtcgctgattctgttcaccaattcggcctgctaccatctgggcgattggagcccgcgcgtcaccgatgtgctgcggcgtatcgatcatgtcaacatcttcctgctcattgctggcacgtataccccggtttcgtttgcgctggaaccgttctggcgcaatgtgatcatcatatcgatgtgggcgtgcacggccatcgccatcgtgattcatgtgatctggatcaatgcaccacgctggctgtatacggtggtgtacatcatcttcggcatctacggcctggcttatatggtgatgttctggaattcgccgtatgcggggccagccgtggtggtgctgctgtgcgccggcggtgcctgctacatcctcggcgccatcgtctacgccttgcgcaagcccgacccttggcctcgcgtcttcggcttccatgagattttccactgcggaacggtggccggatatgcctgccatatggtggccatctacatggtgatcgtctcgctgtggcaataaacgctacgacatataagtatgcccccgcctacgggggcatactagtcacttataactcaggccagcggcttggcggccttgaccgtcacggacagctcgcggccgttcggtgcggtgtaggaaacgacgtcgcccaccttggcaccttcgatggccttgccaatcggggaatccggggtcatgatgtcgtagtcggtgccggccacgatgtcacggctgccgagcacgtaggtcatctcgttgccgttgagctcgatggtcaccacagagccctcgcccacggtgccttccggggcattctcgatgatcttggaatcgcgcagcttgacggtgagctcggtgatgcggccctcgttcttgctctgcgcctcacgggcggcctggtagccgccgttctcggacaagtcgccctcggctcgcgccacggcgatcttgtgcgcgatttcctcacgcagctcgccttcacgatgggcgagctcttccttcatcttgttgtatgcttcctgcgtcagcaggtagaccttgtcctcagccatatcgtcctcctgaaccgttgtcgatgctgaaacaattttcgttatttatgacaaaacgccggctatgaccccggcgttcgtcatgtgctgacctatggtcagcgggtggaaatgatgtcgatgacgaacaccagcgtgtcctcgccgccgatgccggcctgcgggatgccgcgggaaccgtagccgtattccggcggaatggaaaccaccagacgcgagcccacgttatggcccggcacggtctggtcccagcccttgatgacctgtcccacgccgatgccgaagctggcgggctgatgacggtcgaagctggagtcgaatggggtgtccttaccccacaccacgccgtggtagttcacggtgacggtgtcgccgcgacgcacgatcgggccgtcgccctcggtcagctccacaaccttgaggcccttcggggcttcgggcgccgggaactcgataacgggcgtggtgccgaattcggcgttcacctgaggcatctgatctgccattagtcctccttcaaagacacaatgcgccctaccttagcaccatcggcgaatcggcggtagtccttcatccctgtgcgatacgacacgctggccgtatacgtcaattccggtcatcatgctggtgaataccagacatgtcaatcagcattcgacgacattgacggcaagcccgcccttggaggtctccttgtatttggccatcatgtcttcaccggtctgcttcatggtttcgatggcctgatcgagggtcacgatgtgtgagccgtcgccgagcatggccatacgcacggcgttgatggcggtgttggcggccatggcgttgcgttcgatgcatggaatctgcaccagtccgcccaccggatcgcaagtcaggcccaagttgtgttcgatgccgatctcagcagcattctccacctgttccggcgtgccgcccatgactgcggcaagtccggccgccgccatcgaacaggccgagccgacttcgccctggcaaccgacttccgcaccggaaattgaggcgttgcgtttgaacaggtatccgatggcaccggcggtcagcagaaacgtgaccacgccctgttcattggcgttgtccacgaaatgccagtaatagtgaagcacggcgggaatgatgccggcggaaccgttggtcggagcggttacgatgcgcccgcctccggcattctcctcagagacggccaaggcgaagagatccacccatgcggcgtcggaagactcgagcacggcgtctttgcgccggctgtcgcggcgcagcacatcggaattcgaagcgagacgccgatacatcttcggcgcgcggcggggtacgtcaaggccaccgggcaatgtgggctccgccgaggtgcatccgtggtccacgcaggcgcgcataacacgccagatggcatcaatatcggatcggacctggatgcctgagcgtgaagcggtttcgttggcccatacaagttcggcgatgctgagatgatgttcccggcacaacgacaccagttcggcgcatgatgagaacgggtagggtgcctcgacgccgaaatcagtggatgatgattcgtccgcgtcggcaaaggaggtgccttccggaggacgttcatgaatgccgatcatcgggtcttcgggagcgcctttgcgcacgaatccgccgccgatggaataccagacctgttcgtcgaccaagcttgcggcggcgtcgaaagcctggaatcgcatgccattggggtgcgcggccatgcgcttccattgttcgaacaccacgtcgcggtcgtagtcgaaatggatgcgtttgaggccggcgaggttcagagtatcgtccaacgcgcaggtctcgcggatgcgcatcatgtggtcggtatccacggtggccggcagattgccttcgagcccggccatcgcagcacgatcggtgccgtggccgagaccggtcagcgccagagaaccgtaaagcgtgattttgacacgtgcggtgcgatcgaccaaatggtcggccagcaacgaggaggcaaaggcatgtgccgcgaccatcgggcctacggtgtgcgaggatgaaggtccgacgccgatggtgaacatgtcaagcacactgaacatttggctccttctcccctgctggttcggcatgccggtgtcaccaggcgtcatgccatcacgatatcgtattccagcctagcgcccggaatctttcgctttgcgcgatgatggccgcgcgcgtcgtgccggcgagcgataagtcagtcagtgagatagtgcggagaacatcataaccagtacgatgataccgatgatggccaatacgatctgcaccaccatcagcccgatggtcagtcccttcttggtggcgattttgggcgcgtacgcctgtgccaacaggaaggcgatgaagccgaacaccgcgtagttgacggtcagggccatcacatcgctgttcgacaacaccacgccgttcagcggctggttcagcgtgttcatcatcgtgctcatcacgaacatgccccacacgccgtagccgattaatccgacgacgccgtacagccatggcttgagtttgtcgttggcacgcagggtcagggcttcggcacaccacaacagggcgaagccgacgatgtaggtgaacgccacggcgatcagtatcacgatagtcgcccacggcaggagtgcggccacattgccgatcatggacagatagaatcccgagcaggcgatggcaccaacggtgagtgcagtgcccgcaatgacggcttgggcaagcatggtgggcagggcgccttgttcgactcgttcgacatcggtccagcgtgaagccatgtggattcctcgtttcatcaggtacatcgtcacaacgccacatagcctaacggccttttgtttcggccttataagctctccacatagtaagctgcgagcccctctgacgaggggagctgtcggcgaagccgactgggggagagaccgcggcacagccgcaaaaaacggcatcggccacaggccgattttaaggtgcctccggtgggactcgaacccacaagccgaagcgatcgattttaagtcgactgcgtataccatttcgccacggaggccaacttttctattataagctatctcctgccctgagcattgcgtgcgggttgctgcgcttcgtgcagccgtcgcggcatagccgctcccttcgcctaccaacagcccagtgggctgtttgtagcagccggtagcgatagcgtcgccggcgtcgcatataacgcaaacagcccaccgggctgtttgcttaacggctcagcccgctggaggcacttaccacttacgctattgagccagcaaccggcgaccataatcgagcacaatgccgtccagcagcccgtgttcgctggcgacgaacgaatcgatggcttcaccatgatcggccttggcggcttcgctgacacgcgccagcacacggctccagaccacagcgccgccgccgaccacatcgatacggccggggtggatggtcttgtattcgcggcgctcggcgcgcgtcatcctaaggaacttgtcgtccacggcataggcgtcttcaaggctcaaccgatgcccgtcgaccacggtgtgatcgtattctttcaatcccatagccaaggcggtcatcgtggtcaccgtgccggacacaccgatgatggtacgggccttgcctgcgtccacggtgcggaaggcctcatcgatatgctcgtcgatgtccgcaacggcctcatcgatctgcgcctgggtcggcggatcgttggtcagatgacgttcggtcatgcgcacggaaccgatgttcatggagaatgcgccctgaacctgggtggtggacgcactgacgccgtcgccaccgatgaccagctcggtggacccgccgccgaggtcaaccaccagatagggggcgggtagatcgtcgcgattgaccacggaagtggcgccgaggaagctcaggtcggcttcttcagtgccgggaatgacttcggggcgcacgccgaggatacgttcgatctcatcctcgaactcctcacggttttccgcgtcacgagtggcggaggtggcaacgaaacgcaggccgtcgatgggatgctcggcaatcacaccggcgaattcccgagcagccgcataggcgcgttccaacgcttcgtcggcaaaacgatgggtcttgtccacatcctgaccaaggcggatcacacgcaggatgcgcggcaccacctcatgcatgccatcggcatcgacacgtgcgatcttcagtcgaatggagttcgtgccgcaatcaatgccggcgacggttacggattccttgctcattgccttctcctcgtatcccttagtgcgtatgaatgggctgttcgcggtggctcatctgttgatcaatcgtccagtgtgcaacggcagacggtcggatcgaactcgtctttgacgcgttccagcaccaaatcgccaatggggttgacgcccggccccataaccaaggactgggccagcagggcatgcaggcacttgacgcgcaccggcatgccgccggccgaagtgccttcaatatgctcctcactgtcgccaagacggcctgccagttcgtgacggaatgccagatacagattatgggcctgctcatatgcggccttgagctcctcatcagcggccagcatatcgttgtattgctgcatcacgccggcggcctcgacatgggaggcagccttgacggcttccggaccggtcagatagcacgtggtggggaaagggattccgccgggcaacaccgggcgggtgattacggcaagtggcctaccgcagacgcatcgcgcccccacggcgaccatgccgcgcgggtatcggccgagctgacgctgcaccaggtcgatgtcatggtcgttggcgggctcggcaagcatggtgtcgacaagggccttggccttggcggcgatatcgatggtcactgttgggttccctcccctgtgttttgctgggtgttctgatcggattgggcgttctggtctgacttatcggactgcttggatgagtcgttggatgacgagtcagaggaaccggaagtatcggatttgccggactcgctatcggtcacaggctcatcggcctttttgagcgagtaagacagttcgctgtaccatggcaggacttttttgttgctggtattggaatcttccgttttctgggattcgcgatcggagccggtcacggcttcgggatgcagcacacgcacggcctgttcgccggggaatacgaagccgaggcgttcacgggcctgggcggtgatgtaggccttgtcatcccaacgcttgatatcgttctccaactcctgcttttgggcgatcagcgaggcttcctcacgcttgaggccattgagctcggccaggttcagggcataagtgtggaaggtggagaccagctggatggtgccgagtgcgatgatgaacagggagacgaagaacgctatgggccccgccgacccttttttcctgacttgtgctttgccggttttgccaggtttgccggtacgggacgacttgctcatgtcacatgaaaatacccgccgcattcgacttgacgaacacgacgggtatcgagcttcagtggaaactcacgcctttacgggcgtttcagctcacttggccaagtacttcttgcaggccttgaaggcgctgtagccggcgtactgagcggtggagccgagctcctcctcgatctcgagcaggcggttgtacttggcaacgcgctcgccacgggccggggcaccggtcttgatctggcgggtgttcttagcaacagccaggtcggagatggtggtgtccggggtctcgccggagcggtgggaaaccatggaggtgtagccgttggcggtggccagctcgatggcgtcgagggtctcggtgacggaaccgatctggttcagcttgaccagcagggagttggcggcgccgaggtcgatggccttctgcagacgagccgggttggtgaccagcaggtcgtcgccgacgaactgcagacgatcgccgaggcgagcggtgatggcagcccagtcttcccagccttcctcattgaacgggtcctcgatggagacgatcgggtactcgttgatgaggttctcgtagtagtcgagcatgtaggcggagtcgcgctcttcaccgtcgaagcggtacttgccggtctccttgttgtagaactcggaggaggcgacatccaggcagatgccgatctgcttgccaggctcgtagccggcggcggagatggcgtccatgatgtacttgagggagtcctcgttggacttcatcttcggggcgaagccaccctcgtcgccgaggccggtgttcaggccttccttcttcagaacattcttcagggtgtggtaaacctcaacgccagcgcgcagagcctcggagtaggtgtcgaagccgtacggggagatcatgtactcctgaatgtcggtggcgaagtcagcgtgagcgccaccgttcatgatgttcatgttcgggaccggcaggatgtggccgttggtgccgccgatgtagcggtacagcggcaggccggcggactcggcggaagcgtacagagcagccagggagacacccaggatggcgttggcgcccagcttgcccttgttcggggtgccgtcgagctcgatcatcaggtcgtccagagcgcgctggtcagcagcgtccatgccgatgaccttcggagcgatgacctcgttcacggccttgaccgcgttaagaacgcccttgccgccgtagacggacttgtcgccatcgcgacgctcccaagcctcagcttcaccggtggaggcgccggacggaaccagacccttgccctgagcgccgtcttcggtctccaggtagacctcaacggtcgggttgccacgggaatccagaatctgacgcgcgtacacgctttcaattactgccacaactactccttaaaacggttgtgtatcttgaatgacattcttaagagtagtgcgatttgtggacgttgtgaacaacacgcccaaaatttagtgttagcgctcacaatgccgatgcgccgcctgattgcaaggcagtacggacgaaatcgctcagtcgacgtccttgccattgaggtagtcgatttcactgtcggacaatttcagttcgctggctttgaacgagtcctgaatctcctgcgggtttctggccgagggaatcgtgaacagatattggtattgcgcaagttcccacgcgagcgtgacgcgctggtaggagcagtcgtgggacttcgcgacttcgcggaaccgatcgaacagatgctcgttgaacgggtcaaggaatccaccgagcggcgaccagcagacgaaagccaaaccgagtttttcgcaggtctccaacgtgtgttcggggtcgcggtgaaccggggagaactggttctggacggccacgagacgatcgcccaaaatgttgtgggcggcttcgatgtccgcgttgtcgattctggagataccgaccgctttggccacaccttcgtccacgagctgcttgagtgcgcccatctggtcttcgtacggcacctgcggatcattgcagtgcgagtagagcagatcgagcgtatcgacaccgaggcggcgggctgattccttggcattggcgatcatggtttcgggtcgggcgtcggcctgccagccgtagttgccgttgccgtcaagcgtgcgcagccagccggttttggtggctacgagcacctgatctttggggccatgccacgagtgcagagcatcgcggaccagatattcgccatagcccatatcctccggttcgccggtgccgggtgcgctgggcagataataggaccaagccgtgtccaaataacggactccggcatcgagcgcggcatggatggtctcgatcgcctgatcacggttggaggggcgcccctcgatggcgagcgccattgtgcccatgccgatgcggggaatctcatagccggcaagtgttgccgcgtgttggtttttcatcgttgtggcctccatgccaagtcatcgaggagttggttagtccagaggactacctggtcggagctcatggggccttggcccagggaaccggtgaacggggtgggtacgatgagctggtgggtgaccgggcggtattgggcgcctttgtaaatacggcccatacgcatctggatggattcgggcgggtcgatacggccgatgcgcacgcggttggattgcgcgagaatctccgaaatgccgagcttgcgggccttgaacttcagacgggccacgtcgaacagagtctcgaattcgaccggcggcttgccgtaacggtcggtaagctcctcttccagatccttcaaatcggcctcgttgcgagcggaggcgagcttgcggtacgcttccagacgcagcttgtccgaatcgatgtactcgatcggaatcgacgcttcgatgggcaggtcgatggacacggccaccggctcgacgttctcttcgggctccttgtacttctccacggcttcggacaccatgcgtacgtacaggtcgaagcccacgccctcgatatggccggactgctcgtcgcccagaaggttaccggtgccgcgcaattccaagtccttcatggccacatcgaaaccggagccgagcgccgtgttctgcgcgatggtggcgagccggtcatgggactgctcggtcatcggcttggacgggtcgtacaggaagtaagcgtacgcgcgctcgcggccgcgaccgacgcggccacgcagctgatggagctggctcaagccgaaacggtcggcatggtcgacgatcagcgtgttcgcattggagatatcgagaccggtctcgatgatcgtggtgcacacgagcacgtcgatgtcgcgatgccagaagtcgcggatgatctggtcgagctgcttctcccccatcttgccgtgggcgatgccgacgtgcgcttcgggcaccagcgtatggatcttgtcggcgatggacgcgatgtcctgcacgcgattgtgcacgtagaacacctggccgcctcgcagcagttcgcggcgtacggctgcggtggcctgcgcatcctcgtaggcgcccacataggtcagcaccggcaaccggtcttcgggcggggtggcaagcgtggacatctcgcgaatgccggtcacggccatctccagcgtacgcgggataggcgtggcagacagggacagcacgtccacgttggtgcgcagggctttcagcgtctccttgtgttccacgccgaaacgctgctcctcatcgatgatgacgagtcccagatccttgaacttgattttcgggttcagcagcttgtgcgtgccgatgaccacgtccaccgtgccggtttccagaccctcgatggtctcgttgatctctttggtggtctggaatcggctcatggccgccacattgaccgggaaaccctcgaatcgttcgctgaacgtctcgtaatgctgctggacaagcagcgtggtgggcacgagcacggccacctgcttgccgtcctgcacggccttgaaggcggcacgcagtgcgatttcggttttgccgaagcccacgtcgccgcagatgaggcggtccatcggcacgggcttctccatgtcggatttgacctcgtcgatggtggtgagctggtcggcggtttcctgataggggaaggcatcttccagttccttctgccatggggtgtccgggctgaacgcgaagcccctggcgcgctggcgggcggagtacagcttgatcaggtcgtcggcgatctcgtggacgtgtttgcgggccttggccttggtggccgcccagtcggagccgccgagcttgttgagcttgggggcttcggcaccgatgtatttgctgacctggtcgagctggtcggtggggatgaacagtttgtccgccggggcgccgcgcttggaaggcgcatattcgatgaccaggtattcgcgagtggttttgttggcgccggtgccgatggtgcgctggcgcatttcgatgaaccggccgatgccgtgctgctcgtgcaccacgtaatcgccttttttgagttccaccaagtcgatggccttgcgccggcgtttcggcgttttggccacggccacggccgaagtgcggccggtcaggtcgcgttcggtgagcagggcgattttggcggctttgtccacgaagccgtcgatggcctgagagcggatgacgtcgaaattggcgatgccggtagtgttgatcgcgcgcctgagcctggccaaggtgccggccgcagcggcggtgatggtgacgtggaagccggcgtcgagcaggccttcgatgccttgggaggccttggcctcatcccctcggaattcggccgggttctgggcgtcgagctgcacatggccggtcagcgtggtgtccacgccgaaactggtgaggcgaatcaccggatgttcggagtattcgagggagctgatggtttccgcatagtcgaggaagctggctttgtcgaagctgatgggcgcgccggcgccgtggccggaagcggccacatgccagctggcggccaggaactcgttcgcggtttttgccaagtcttcggcggaacggcgcagtttctccgggtcgctcaggaggatcacggcgtgcttgggcagcatggagcccaccggttccagatggtccacgagtgcgggcatcagggattccatgccttcgaccggaatggcgttggcgatggattcgagcatgtcctcagcattgggaatcgaaccgaccaaggctttggcgcgggcgcgcacggcgtcggtcagctgcagttcacggcatgcggtggcccagatggtcttgaggccgtcgccgtaggtacgctggtcggaggcgtggaattccttgatggtgtcaatttcgtcgccgaagaattcgacacgcaccgggtgcggtgcggtgggcgggaacacgtcgaggatgcctccgcgcaccgcgaactcgccacggtccatgaccaggtccacgcgcgtgtaggcgttttcgatcagacgtttggcggcttcgtcgaggggcaggtcctcccccacggtgaacacgagcggctcgacgtcgcccagtccttggacgaccggctggatgagcgagcggatcggcatgacgagaatgcgaatcgggccgaacatcggatcggtatcgctcggatgcttgagtctgcggaacacggccatgcggctggccacggtgtccgcgcgcgggctcagacgctcgtgcggcagggtttcccaggcttcgagctgggcgatgtcgtccgggtcgccgtcataccaggagcgcagcgagcccacggtctcttcggcttcgcgaccggaggccacgaccagcacgaccggcttgccgggtttgccggtcacaccctgcccgatggcggcggccaaagccgggcgcaagccttcggaaacaccggccagaacggaattgtcgatgtcgtccgaaacctcgatgtcaccagtggcgagtctaaggaaggtcttgtcctgttccagctcagacaggatgcctaccagtgagccgttgatcaggtccgggtgcgtcgcctcaccggccattgaacttctcctgggtcttggcaagaccgcggaagatgatgtcctcggcggcgtcggcgccgtcagccaggaattcgggcagctgcttgcgctggtccggaccgaatccgcccagcacccagttcaccgtgttgtcatgcgcgttcgcaccgcgcttggagtgaccgacgcccatgcgcacacgcgcgtatttcggcgtgccgagggaacggtcaatcgacttgatgccgttgtggccccctgcggagccgcctgccttgaccttgatacgaccgaattccaagtccatgtcatcgtgaatcaccacgatatggtcgggctcgatctggtaataggcgctaatggaagccaccgcattgccggaatcattcatataagtcagcggcttggccagaaagaacttgacggtgcggccgtccaggttcatcacgcttttaccgagcatggccagacctttgtggtcggcgaagttcaccgtccaacgttcggcgagcacgtcggcggtcatgaagcccatgttgtgccgcgtgtcctcatattttttgccgggattgcccagtcccgcaatcagccagaaatccgatgccataatccactcctcgtccgtcttcctatattcccgtatgcacgttctgtacgttccgtacgtcatgcgcgcgttcgcctcgcgcactggcccatgcccggccggattcaaccgtcaagattgtactcaacgccgccgtcaagccttggaatcggcaagcagcagggcacggcattgctcggcatccatcgatcggaccgatgaatggtgaaacgcttcgacgtcacgagtcacgatgacgtcggcgtcattgtcctcggcaacggcacggatgagcccgtcctcgaagtcgggctcatcggatcggtacgacatacacgcatggcgttccataagtggacggatgtcgaacaattccatcagtccaccgatatcgtctcgcgccgcccgctcctcgccataatgcttgcgcaacacgcaatacacgtcattcaatgacgataccggcgccatgatctcaatgtttggctgtgcaacggcttccatgagcaaatcaacacattgtttatggaaaggcgctcgtttgtcattgcacaaatcgagcagaatactcgtgtcaaacagcagtttcatcccgtcccccaaatcgttccatacgtgcctgcgcgagaatctcctcatcctaaagatcgccttccgcctccggcaaattccggtcggcgaaacgttgaatcaactcctgctttttcctacgctcccgctcctgaatcagggagagcgtcagacgctcgaattccggcagttcccccgtatccgcaaggtagtcggtcagatcacgaatcaggtccgaataggtgcgcccattacgcttaagcactttctccgcgtcgcgcttccgttcggcattgacgcgcgccgtcaccatggccatagtcatatgcaccttcttgtaataccagtattacaagagatggggacgggtgaatcacgtctattaggcggtccgccagcgaccttttcgcgctgtttgccgttgaggtaccagtaggccagcaccacgaacagggccgccgaggatattgccgagcgtggctgcggacaggttatagaggatgcccgacacgtcgagcgccgcgacgcccgccgcgtcggcgccgaaaccaaacgttttggcgaccaggcccatcggcaggaagaacatgttggccacgcagtgttcgaagcccatcgccacgaatccggcgatcggcagcaggatgcccagcaccttgtcggatacggagcgcgcggcgaatccgatgcgcacggccaggcagacgagcacgttgcacaggatgccgcacacgaacagcgtgtcccagcttggcgtcactttaacatcaactccggttggaaaaaatctcagtatgtagcattcggttctcaaataggagaaacatgcagcggcaatcaacaacttgtcgtttacgacgccaagcaagggaaacagctcagacagatgacgcttccctgcaatcggatgacatattgcgggacggcagcggattttgggcgttcttggcgtggcatcccgcaagcgttatcgcacgttatctgcaccgaatcataagaatggcagaattccaatgatttcgcaggaagagttgcgggacgcgagctatgtgcatcgtttgacgtgtgtggcatcccacgtgattgcgggataccacgtctaaacggacgaaaatcgcgtgccgtcccgtagtttgccgttatctgggataagcgcgtccgatatatggcgttcgaggaaaagagctgatccgatacaactttttagtgttataggacaccggaatccatggagagcaagggtaaaccgcctcgggcctacaggtccaaataccagtaggacatgtcccgcatggtgccggtggagtcggtggcagcggcgggcatgaggccgaattgggtgaagccgaagcggcgcatgagggcaatggagccgacgttatcggcgaaaatgatgccacaggccttgcgcatgtggcgggcccgcgcctcggtgagcagcctgtcaagcatgaacgtgcccactcccctgccttgccatgccggatcgatgtaataggccaaatcggtgacgccgtcatacccggcacgatcgtagaacacggagagcgcaccgaagccgatgattgaaccgtcttccgattccacaacaaaaacgccgtagggcggcgtatgggattcgacccaggcgcggcgttggtcgagggtgcgcggggtgaggtcggcggtggccccacccgccaccaccgcagcgttgtagatgtcggtgatggcttggatgtcggattcgacggccggatggaaggtgtatggcatgaagttcctttgaatacgcaaatagcccgtccttatgataaggacgggctatgtcagttgaggtaaccgactcccttcagtcgccttcggcgatagctcccctcaccctgagggaagccaagttacttgtcgagctcgatggccttgttgagggcgtcttcaagctcctgctgcgccttgccgtaggcggtccagtcgccgttcttcatggcggactggctgtccttcatggcttgggcggcatcgttcaacgcctgctggagttcggggctgcggtcggaagacgagccggaatccgactttccgtccgtggtgccggactgaccaccattggtatcggaaccagattggtcaccggacacgttctcggcatcgcccgcggccgcaccggaattgccaccgaacacctgatccaaggcctcatccaacgtatccgcgaatccaacctgatcaccgaatgcgaccagcgtcttcttgagcaacgggaatgaggtcacgcccgaagacttgacgtacacgggctgcacgtacaccagtccgccaccgagcggcagggtgagcaggttgccgcgcaccacttgcgtgtcgccggattgcagcaggttcagttccttggatacatcggcgttggcgttgaagttgttctgcgcctggccggggcccggtacgttcgaatccttgggcagctcctgcaatcggatggtgccgtagttcgagcctatcttgcccttctcattgccggcatccgagtcgaccgacaggaagccggtcaggatctcacgggtggactggccagccggaatgtaggtggaggtcagcgagaacaccggttcctcggtgccaccggtctgcaaggtcaggtagtacggcggctgcaggatgtcctggtcctgctgggactgggattcggtcggatcgaccggcgtctgccagaagtcttcgcctgagtagtactggctggcagaggtcacgtggtacttggagagcagctcgcgctgtaccttgaacaggctttccgggtagcgcatgtggctcatcaggtcgccggagatatcggagagctggtggtactggccagggaagatcttctcccatgccttgatcaccggatcggattgatcccacacgtacaggtccacggaaccgtcgtaggcgtccacggtggccttgaccgagttgcggatgtagttggccttctgagagcccagggacgagaccgttgcggaagagacggtggtagaatccttggtggcggagccgaggtcggttatttgcgagtacgggtaggcgtcggaggtggtgtagccgtcgacgatccacttgacgcggccatcgaccacggccggatacacgcggccgtcaagcgtcaggtacggtgccaccttggccacgcgctccttgggggaacgatcgtagagaatctgcgattcgctggtcacacggtcggagaagagaatctgatcggagccgaagcggatcgcgtagagaatcctggagaacaggttgccgaccgaagggccgccgtcgcccttgaacgtggtcagagcaccttccgaaccggtcgggtagtcgaactcccaagcctgcgtgccttcaggggcaccgacaatcgagtattcggtggtgttcggcgagaagtagatgcgaggctcgtacttttcggattcggtgagcttgccctgggtggggatgccggattcgaagaattcgggctggccgtcggcggtcaccttgttgccgtaggcggccaccacgccgtaaccgtgggtgtacacggtgtggtcattgacccagttgcggttgtcattgccggccagatcgagctcgcgggcggcaatcacggtgtcctgggagacgccgtcaatctcgtacttgtcgaccgccagggtgtcggcgaaggtgtagtactgcttggactgctgcaactgtttgaacgtggggctgacgacctgcgggtcgagcagacggatctgcgcggtggtgtcggcctccttggccagagcgccctgctcacccttgtcggtcaccttgtattgctcggtcttgagcttgtcaagaccgtaggcggcgcgggtggcgtcgatgttgcgctggatgtaggtggattccatctcctgtgcgttcgggttgacgcggaagcgttgcaacagcaccggccatgccacggtgagcacaagacccaccacgaccacgacggcaatggaggtcaccggcacacgccaggccttgagcgcggcggaagcgcgcacgccgatggacgcctggccttcgagcgtgtgggagcgcatgagccagatgcccagcaccacgccgaggatggcggtcagcacggccatgatgaaggtgacggggatgttggcatgtacggcggtgtaggaggcaccggtgatgcgtgaaccctgcacggtgagctggtcgaagacgccaatcatctggcgcactgcccaagcgaacatgttgagcatcagccagatgccaagctggcgacggcaacgcttggtaatggagaacaggccgcgtccgttaaccggcatggtaatgcggataccgcccatcagcacatgcgtgaccacggaaaacacaaggcccacgcccagcagcatggccacggcggcgagcacgagcttcaggcccggcagcacgaacacgtagaagccgttgtccagaccgaactgcggatcggtggtgccgaacgactgcgcgttgaacatgagcagaatctcgctccagttcgcgttaaactgggaaccgaagatgacgccgacgatcagcgaaatcaccacggccacgcggcgagcggttttcgagctgacggatttgccgacctcgaccacatcgccgttaatgcgaatggtggaaccgtcggccgaatcagggcgtgctcgaatggccagccaggcggaaacgaagccggtcagggccatgagcagcgcgtaggccacccacagaccgattttcaccccgagctgggtccagaccacggactggaagccgagctggccgtaccacatcagatcggtgatgaatcgggacaggccgaagaacagaccgacgatgatggccaaggccagcaccacgccgatcagaatcttgctgccacggctggctcctgagccaccggacgctggcttacgggtgatacgcggattggccggaccacgtggagggcgggatgacccggaggggccagcgttggtgttgtgggccggaccgtccccatcggcctcgacatcgaggatgatcggatcgtcattgttcgcattgttgcgtcgtgaatcgccgccattgccgaacagtactgagaaaggatcgttaaaagacataactcaagcctatcgaaagggcgggaggtcggttatgccctgagcacagaatgaggcaacatcctgttctacgctctgttctacgcttgccggtatggacagacaacggccacaacatatgcgtccctcagcacacgccacacgccaacttcggcacaggagcattccaatcgtggcggcaatatgtgctttggcggtggtgttggccggtgtggcagtctacggatggcatgtcggatggttcgccaaatccacatcaaacggcaacaccaccactccccagacctcccagacgagtgcgttaccgcgcaccgacgttccttccccgaagaagaacgacgatccggcggcacaagcccaacgtgcggtatccgccatgacgcttgaggaacgtgtgggacagttagtgatggtgccgttgttcgccggttccgaaccctcctcgttggcttcaacaatcgccgacgagcacattggctcggccattctcattggcaattggaataccggcgtcgatacggtcaagaccgcgaccgcgcaactccaaggatatgcgccggccggcaatcgtctcatcatcgccaccgatcaggagggtggtcaggtacagcatctgactggtaccggtttcgacacaatgcccagtgccgttgagcagggcacaatgtccgctgacgcattgcgtcaatcggcaggcacgtggggttcgcaattagccactgctggcataaatgtcgatttggcaccggtgcttggcacagtggttggcaatcgtgcctcaaatgctccgattggcgcgctggatcgtgatttcggattggatgcggccggcaacgccgaacatggcatcgccgttattgaaggtttgcgagacgctcaagtcggtgcggcggtcaaacattatcctgggttgggcgcggtaagcggcaataccgacttcaccaccgaaggcattctggatacgaccaccacgttggacggggccgaggcaggtgcctttgaccaggcgattaccaaggccgatcctgcaatggtgatgatgtcgttagccacgtatcaatccatcgacccgaataatccggcggtgttttcttctacgattatcgacggtcatattcgcaacgtcctgaagtacacgggcgtggtgatttcggattcgatgtctgccgaagcgttgagcagctacgatgtaagccaattgggagtaaatcttgtcgaggcgggcggcgacatgccctgcatcggtcagacggattatgtaaagccaattgtggacggcctcaacgaacgggcggagtccgatccggctttcgcttcgaaggtgacggcggcggcgactcgcgtaatgacattgaaaatcaagatgggactggcctgaccgttcatccttgcactggcgaggattgatgcgcgctgattcgcgctaatcctcaccagccctcgtacaaatgcacactagtcctcgtacgaatcgtcagtcctcgtacgaatacagaccatgcttgccgatgtattgcaccacgccgtcgggcaccagataccagaccggctcgtcgtgttcggcgcggcggcgtacatcggtcgaggagatggccaaggccgggatctcaagcgtatcgaccttgccttcgggcaaggtcacgccgtccgggctggagtagccggggcgcgtgacggccacgaagtgagcgaggtcccacatgaggtcggcgtccttccactgcatgatttcggccacggcgtctgcgccggtgatgaagaacagctcggcgtcgggatgttgggcgcggatatcgcgcagagtgtcgatggtgtaggtgacgcccggacggtcgatgtcgacacgcgagacggtgaatttggggttggatgcggtggcgatcacagtcatcagataccgatcctcggcgttggtgacgtgcttgtccagcttgaacacaggtcggccggtgggcacgaaaatcacctcatcgaggtcatacacccaggcgacttcagaggcggcgaccaagtggccgttgtggatcgggtcgaacgtgccgcccatgatgccgacgcgcaggcgtgtatgccagttgccgcgtgcggaaagcctgcctttgccgtggctgctggccccggccggtacggacaggtcggacatgcgccgttcggtttcgccttgggtgacggcaatgatttcggcgggctcggcggattccactgttttttcggactgaactgacgcagccgttttgtggctgccggtaacaccactcatgcctggccgccctcgccggcggcgtcatcggctgattcggtttcctcttcgatttcgccggcggagggattgtcttccttgggatcgatcttgcccatgtcttcatcccattcgtcttggaccacgcgacgaatctcggcgaaggtgggcagcgggaagtccggctggtagaggcggcggacctcggccacgcgctcggtgatgcggatgagcgtgtcggtcatgccgtcgaggtcgccgtcgtgctccatctggctgtatttgccgatgtagccttccatgagttccatgtgttcgcgcacgatcttgagctgggcatcgttgaggtccacgacttcgggtgaatcggtctcgggccagccgatgagcacggcgtccgcgtattcgagcgacgcacgctgggcggcggaggcgatgccgtcctcaatctgcacgaggaacacatagcggacgatgctgagccgttcggccgcgatcttcaggccgagcttgggatcgttgaggtcgatgtcgggccgcagttcacttgccttgtttgccgtgtcagccgtagtgttcatgttgccgtcctcgttcatgcgcgcacctggcctgttccgtaaccgatccacttggtggtggtcatctcccgcaatcccatgggaccgcgtgcgtgcatcttctgcgtagaaatgccaagctcagcaccaaagccaaacacgccgccatcggtgaagcgagtggaggcgttgaccatgaccacggccgagtcgatgcgcttggcgaattcctcgatggccgcataatcctcggcgatgatggattcggtgtggcccgtggaatgcgtgttgatgtggtcgatggccgcgcccagatccggcaccaccttgatgcccatcttgagggccagatattcagtgtcccaatcctcctcggtggcgcggttgaggtcaaggccctcgatcgccgcgccggagatgatgtcatacgacgtggtgtcggcctgcagtacaacgttcgcctcggccagagcggcggcgatctgcggcaggaattcggcggcgacatccttatggaccaatagcttctcggcggcattgcacacacccacgcgctgggttttggcgttgatgatgatcaggatggccttggcgagatcaccggacttgtcgatgtagatatgcacgttgccggcaccggtttcgatgaccggcactttggagttgcgcacgacggcttggatcagacccgctcctcctcgcggcacgagcacgtcgatatggcctcgcgcctccatcatggcggtggctccggcgcgtccgtactggtcgacggattgcaccagtgcggattcgaaaccgtgtgcttcaagcaccggggcgatgacgcccagcgtggcagcattggtgcgttcggcggcgtgaccgcctcgcagcaacgcggcattgccagatttaaggcacaggctggccacgtccacagtgacgttcggccgggcctcataaatcatgccgatgacgcccatcggtacgcgcgtctgggtaaggcgcagaccgttgggcagattgtatccgcgcacgatttcgccgaccggatcaggcaaggtggccacatgacgcacgccttgggcggcggcggccacgcgcggcacgtcgaacagcaggcggtcaagcttgcccgcatccatgccgttttccttggattcgagcatgtccagcgcgttggcggcttcgatgtccgcggcgtgctcgtccagcgcgtccgcaatggcgagcagcagttcgtttttggcttcggtatttgcctgtgcaagacgctcctgcgcgcgtgcggcctgatcggcctggcggcacaccgcgtcgaacacctcaggactcaattcatcgctcataacagtcaagcgtaactcacaacgcggctgattgcttactccgacccgcttgttatgggatgtctgacgttttgaatcgcaaacagaaccggctcccctccgtctcaggcgggaagccggtgacgtgatgcgctccggtcagcgaatcatcactaaccggtgcaccacggtggattagcgaatcagcaaatcagtggatctggtccaggtcggggtagagcgggaagtcttcggcgagcttgtcgacgcgggccttcagcgcggtcacgtcggcggacggtccggcggcgagcgcggtgccgatgatatcggccacctcctcgtattccttcggcccgaagccgcgggtggccagggcggacgtgccgattctcaggcccgaggccaccgaggccgggcgcgggtcgaagggcacggtgttgcggttgatggtgatgccgcaggcggcgagcagatcctcgccctgctggccgtccatctcgctgttgcgcaggtcgaccatcaccaggtgcacgtcagtgccgccggtcagcacgctgatgccgttggccttgacgtcatcggccagtagtcgttcggcaaggatcttggcgccgtcgagcgtgcgctgcatacggtccttgaattcgggggtgccggccaccttgaagctcacggccttgcccgcgatcacatgcatgagcggaccgccctgctggccggggaacacggaggagttgagcttcttggcgtattcctgcttggcgaggatgaagccggagcgcgggccgccgaaggtcttgtgcgcggtggaagagactacgtcggcgtacggcacaggactcgggtgcaggcccgcggctacgagtccggcgaagtgggccatgtcgacccagaatttggcgccgacctcgtcggcgatttccttcatggccttgaagtcctcgatgcgcgggtaggcggaccaaccgccgatgatcatggccgggtgggtttcgagcgcacgctggcggatgatttccgggtcgatgcggaaggtctcggggttcacgccataagcctcggcatggtagaagcggccggagaagttgattttcatgccgtgggtcaggtggccgccgtggtcgagggccaggccgagcacggtgtcgccgggcttgacgagcgcctggtagacggcggcgttggcttgggcaccggagtgcggctggacgttggcgtattcggcgccgaacagggccttggcgcgttcgcgggcgatggtttcgacttggtccacgtattcgcagccgccatagtagcggcggccggggtagccttcggcgtatttgttggtcagcacggagccctggcattgcagtaccgctcgcggcacgaagttctcagaggcgatcatctcaaggccattgcgctggcggcccagttcggagtccagcagttcggcgatctcaggatcggtttcgcagatcggcgcgttgaaagcatcggtcgctttctgcgcaaggggtgaagcggtcatgggtgctcctttttggtatgggcgacaattgattcgccgttgccgccttactgtatggccggtttgtagccggcctgtttcatgatatggccggtccccgttcgatggcaatggtgattttcgccggtttgaccggtcggctatgcgagacggacggcccttctgcccacggcccacgctagactggtgtggattcatcatccctttcaggcagaaggattcatcgtgacaaccaccttccattccacccgcagcaccaccgattcgctgaccgccaagcaggcgattcgtaagggcatcgccgatgacggcggcctgttcgtttcggacgcgttgggcaagaccaaggtggacgtggcctccctgccgggcaagtcgtaccagcagatcgccgccgaggtgctgggcgcgctgctgccggacttcac

SEQ ID NO: 2333 - DNA, 18124 bp, Unknown
  R119_18m  MAG No. k141_51668
atgccggacaacggtttttgccaaagttgcgccatgccgttctatcgcccggaagaccatggcaccgaaccggatggaacgcgaagcggagattattgcaactactgctatgacgacggcgtttttcttcaggactatgccaatagcgatgaattggtcgccgcgtgtgcgccgatgatggcggaatcctgccatatcagcgtcgaacaggccgaggattgcatgtcggcgctgctgccaaacctcaagcggtggcggcgtcaggacgagatcgatgcggtggcggaaggggaatgagcgatggcgttcgattataagaaggagtataaggacctgtatcagccgaagaccatgccggccatcgtcatggtaccggcgatgcggttcgtcgcggtggacggtgtgggcgacccgaacgaagaaggcggcgattacgccaaggcgatgcaactgctttacggcatttcgttcaccgtcaaaatgagcaagaagtcaaagaacccggccgagcatatcgacgggtacttcgactacaccgtgcctccgctggagggcttatggagcatgggggagggtgtgcccggcgtcgattacgcgcacaaagccgacttccattggacttcgatgattcgtctgccggaattcgtgaccgatgaggtctttgcgtgggccaaggcatcgtttgccgccaagcatcccgaagtcgacatcaatcgtgcatatctcttcgacttcgatgaaggcgtggtcgcgcaggtcatgcacaaaggcccgtacgacgacgagcccgcaaccgtgacgattctggacggctacgcgcgttcgcaaggctacgggctcgacttctccgacacccgccgccatcacgagatctacctatccgacccgcgccgagccaaaccggaaaatctcaaaaccatcatccgtcatccggtagtgaaggtgggttgactttcagcgaactgctcgaagcgctcaccgcgcagtagcgcgaacaatctgccggaatcctcaccgtggtcaaagagcgctaccaagaactcgataagcaaaataactagaagcactggttcctctcggagagattctgcccgagcgaccttatgaatccttgcgcgggtcacctttcccggtgcaggaagcatccaggctcatgtgcattgatgacgccgatggattgcagataggcgtagacgatggtggtgccgatgaatcgcatgccgtacgtcttgagatccactgcgatggcgtcggacagaggggatgtagtcatgcctgtctcgtagatgacgtgacggccggtgaaccgccaaatatagtcgtcgaaactgccgtacgacgtctggatatcccggaatgcgttgcaggtattttggtgtcatttgagattgggaagcggaaatcgatgtcgcatggaagcgaactgactagcaggtggggtcccaacatcacaaaagtcccttagaccgcaaggccatataggttctacggtcatcggataaaatcggataaatcgtttagcggccggataaaagaagaagcccagaatcgttgagattccaggctttttttgtttgtcgggctagcgggatttgaacccacgcatcctgttttagcggggtgtttctttgttgaaaccactggtctttgttgagtccaatatcgttggaaaatggcggtttgcggtttttggttgtctttgttgaggcgactgggattggctcaccgtgacggtcattgttaacggattgtattcaagtcaggctatggcatgggctaagtccctcggcgtgtcgaatgcccgtacagttttccttactgacgatgatcagatcatggttctagctgatactgactggcttgttgccgtccatttcctccataagaaatattattcttcagcatgcggcaagtaggcttgtacagccttacgtgccaatgaacgtgctttcttctttgctccttttgacgaacaaagacggaagtcaatatatgcatgaccagtaacacgcaatgattcttcttgaagagagtcattgtcaacccaacgtaactcttccttgcgaatatcatcggtagtaactgaatagactccggcagactgatgtccaaactgagtaaattcttcgtaatgctgttgaggacttacttttgaagaacgtgctgtagacaactcgccttcatcgtcttttgacggattgaaagctgaagaacaaacaatgccatcagaaataaattcagggtgtacatttctgaagcaagtatctgaggaattagttatatcttcctctccggtctttaaatcaggccagttttgtgagttttcagtcatttagctcgcccccaatcatccaatttaggatttcatttggagagcagtctgctgcaaacatcttctcgcaatcttcttcgtttttgctaaagtcaaacgcattgattgtatcgtcaggctcgaaatcaacttcgtaatctagctctttccattcgatttgaattccaccgttgatttgcgggaaaatgacaagatcgattatttgcggtattgagcttgtataagagagtgcttcgcataagaatgactgaacattcttaaagatgctgtctttaatgggttcaccttgaggaacgccatcttgagtgccataccatccagtgctaagctgcgcaagagcttccagcctgcttgtaaacttctcaggtagagtctcttctataccgtaagtctgttctatggattcaatatcgccatcatcgtttattttgcaaacgacggacaaggaacacatacgtgctcggcttctattgttaaagaatttataaaaatcatcccatcgactaatgtcagctttgcctctaattatcttctgggaggtatagatcaagaaagtataagtaaaccattcctcgctggcatccattccgacaagcttgccgtcaataactctttcgacaaattgactctcggtagaacgagaaataatatctttccaatcgctgtcaacgtctatacgtcctgaattatctgcctctgctagggtgattttttcatcttcgtttagtgatttacctaaacggtataagcgggaaagcgactccggtggaaagtctcctattgaagctggatccttagcttgttttatgctcctaatagttgaattaatcatttttctggctgtttcagcaaagtcaggcgcatcttcatcccaaagcggtatctgattagaggtctcatgctgatatcttgtcatttccaccactacacagccatgctttattcctgtaaggcggatgtcgatatcgcgagaaaacccactgggaagattctttttacggggatgttcgcgcttgtaaagcctagcagccacgtcatcgattagatctttgtagttcttgagttcactgatagcggagagagggagaccttccgcttcttcaaagcgtcctcccgacatagagtaacgtccaaaggctgtacctgaccgactcatgataaggctaaccaacctttcgtttctatggtcaatcgaattgtatggacaaaccgtgtcctacgctcgtttaagcgagcgtaggacacgcctcagacatcaagcaataaatggatctgtccaatgaaaatgtcaaactagttttagacattaaacaatagagatccataggatggtgaggaacgatgatgaacacactggttgaggaagccacgcttcagttccttcaagaatccaaagggctctttgacaacttgccgatgtttggcgtggacgcgggagacctcattcttcagatcaaatcaaacaacacctcccttcctgaactgcgcaaagaaccggaatggcagcaggtctacactctcttgatcaaaaaaagtgagaaggacccttcttggtggcgcactccgcttgggaattatgcggctcagaacatgccggtcgaggacaaaaccatcaccaaggcagaggccgcaaaaatactaggtgtgaagaacgccacagtcgccactctggttcgacgcggcacgttgcgttccaataatggcaatccattcctctccgacgtgctggagcgcatgctttctcctaggaaggccggccgtccacgtgtgaaaacaaatggcgctcacgcatcagctggggtgtccaatggccgagtgaagcctatcctgaagtgggctggcggcaaatcccagatgcttgatgtgcttcttccgaaagttccggtgcactatggcaaatatatcgaaccattcttcggtggcggtgcgctgttcttcgcgcttcgtcctgagaatgccgtggttgcggacagcaatcccgaacttgtgaatctatatacacaagtgagggatcatgtcgaagaagtgatcgctattctcgctgggtacaagaacgagcgagagcggtttctcaaggttcgctctctggattggacaaaactgtcgccggtagaagctgcggcgcgaacgatctacctgaacaagacctgtttcaacggcctgtatcgagtcaatcgcaagggacagttcaatactccattcggaaaatacaagaacccgaaaatctgcgacgttcaggccctgcgtgaagcttccaaagcgctccagaatgccacaattgtctgcggcgactatgccgccgtgcttgccgaatacgccgaaccaggtgacttcgtgtttcttgacccgccgtacattccggtttccgaatattcggatttcaagcgctatacgaaggaacagttcgagatctccgaccattcacggcttgcagttgaattctcccgtctgcattcgctgggatgccatcttctgctgaccaactcgaatcatccgctggtccatgatctgtatgggcaatacgagattcaggtcattcctacaaaacgttctgtagcctgcagggcaagcagccgcacgggagaagacacactggtcattgcagaaccagagcccaagaccctggcggcggctctgccggaaaagaaaaacctatccaagcaggttgagctatatccgccaacccgtttcatgggttccaagcagaaactgctcactgaactgtggaatgtggcatccagattcaacttcaactcggtcgtggacctgttctccggatcgggcatcgtcagctacatgttcaaagcgcaaggcaaacaagtcataagcaacgactacatggccatgagcgccaccttcaccaaggcgatggtggaaaaccagaacgcgactctgcctttgcaagaggcaaaggcattgctgaaggattgcccgaccgacgatttcgtgtcgaataccttcaggggactgtattacacggacgaagaaaatcatctgatcgacgttcttcgcacgcgtatcaaagacatcgaagatccctatcagcaggccatcgctatgaccgcattgattcgcgcctgcacgaaaaaacgcccgcgtggtatcttcacttacaccggacaccggtacgacgatggacgcaaggatttgaagaagacacttgccgagcagttcctcgaagccgttgaagcggtgaacaacgctgtcttcgataatcatcagcagaataagtccattcgcggcgatgctttgctacttgaggcaaaccatcccgacctcgtatacatggatcctccgtactactcgccattgtcggataacgaatatgtacggcgttaccatttcgtcgagggacttgcctgcgactggcaaggcgtcacgatgcaggggcataccaagaccaagaagttcaagtcctacccgaccccattctcttcccggacgggagctgcggacgcattcgacaaattgatcgagcgattcaaggatagtattcttatcatctcctattcttccaacagtcagccgacaaaagaagagatgctgaggatccttggtcggcataagaagaatgtcgaagtcgttcccgttgactaccgatactccattggcacccagcataaaggtgcggcaaacagaaacaaggtcgaagagtacttcttccttggctggtaatcataaggctaatgcccatgatgctgagttgactgtaaactgaagtcatgggcaaaccgataacgatctggcaactgggcaacactggattacgcaatccgatgcgcatttgggaggggctgaaactgttcgccgagtccccgttcaatgggaacctgcgaggaagcaacgaagaacgattccaaacactgcttaatcatgccggcttggttaattcgaccggcgaagcagaagacaccagcagctatgcaagaaaatggcggttaatgtttgcccgttttgggttcatttacccgcaagttaaaaagaagggcggcaaacaggaagatctcggcccccaagatctggtgacaccattcggcgagaccttcctcaaagccgacacctatcctgcgcagcaggaatgcttcttacgttcgctgagtcttgagcagaccaaagttccaggagatctcggcttcttctccccgctaaggtggatattggcggtgatgctggaacttgaaaagcgtacaggcaccagtgaaatcagccgaatcgaattctcgctatggggtcataccaccgatcccagctatgacatcaacgatgtcgtaaaccatatcatcgatctgcgagagcgtcgcaagaaagcaacagccaagcgtaggttcgacgccgacgaaatcaagaagcgcggtcaggattacaacaagaagagcgataatttcactgattacagcgatatgaacatgcgctaccttcgcatcagtggaatcgtccaaaggaaaggtcgaggccttgtcatcgttccggccaagcatttcctagcagaaaagctggcctcaacaacattgagccgtcgcccaattatggacgtatacaaggagctctgccatggcgcgtccttgcctatggatgatcttgagaccgccaaggctttgcttctcgatatggaagcacagctgaagaagaaccatgtgtattacgattttgggaatcgcccggtatcgacggtacctgagatcaatgcagcgcgcctccatctcgaagaactctggcagagaaccgacgaaatcaactacgccgccaaacagccagaacagtggcaggagatctccgactacatgacactgttgatcaaaggcggcggcaagaagatcgatgacgccgatgaggacaacggcatcgaagtaccgaaagatgaaactccggcatatctcgaatgggtattatggcgtgccgcgctcgccttcggaaacctcgtcaaccatcccagcgatatgcgaggtttccgattggactcggacttccttcctgtatcggcagcaggcggcggacaaggagacctgtactgcgaatacgataaattcaccattctgactgaagttactatgtccacaggctcccgccaggaatccatggaaggcgagcctgtaagacggcacgtatccgaagcggtgctgaagtatgggaaaaacgacattccagtgtatggactgttcatcgcagtcaagatcgacaccaacacagccgagaccttccgccacggcgtatggtacgcaaaaggcgatgtcaagcaacgactagacatactgcctttgacgcttgcgcaattccagaaatgctttatcgcactgttccagagcaacgaaagcgccaaacacgaaaaaatcaaagagctgattgaagtgtgcgaagcgcagagagatctcatggaagctcccgcttggaagaagtatatagatcagacggcggaatctggcatatgagatgaaagggttgccggatggcgcgcatgctgcccggtaaccctttcctttaaatagccccagagtctttgctcagcttgccatcaaaagcttggttgacaagcgtatacacggtctgcgcgacgcccaccacgcctgcgagcacgataccccacgtgtaggtgccgtcgaaaccgccggtggcggcgatggcgatggtgccgagcaggatggacgccgcgagggagacgagtccgacgtatccgctggggatgtatttcttgaacgcctgcacgaatgcgggcacgatcaacgccacgagcccggatgcgagcgtggttgcggtggaaatatccatagttttctccttggtttgatgatgaaggtggcctccggcacggtgccgaaggccacgatggttgtggtcagtagcggagccgctggccggggtaaatgaggttggggttggcgaggttgttcaactgggcgacgcgctgccagccggaagctccaaagatgccgctgagcgtttcgccgctcttgacgacatgcacacgtccacccgtggcaacagatccgctggaagcaacggtcgccgcgcctcggtaggtgacgatgttgccgggatagatcaggttgatgttgccggacggcacgctccacgcggacagcggccaaaggccggttctggtggcgatgccggacatggtgtcgccgctgcgcacggtcacgctcacgctccgggtggaagcggcgggcgtgtatgccgtggatccgttgagcctctggttgacgatgctcatgaccagcccgtagttcgctcccaacgcggccctgcgggcttcgccgttgccgtagtcgccacggatcgtcgcggtcgccaatgcctcgtagtccacgctcggcgcgggctgtggagccggcatcggagtcggcttgaaggatttgcccgggttggcgtacttgtcccactgttcgcgggtgccacggaagtagttcagatccaacgggccgttgtagccgttgatgcgcccgttgctggtgtactggcgcatggcctcgccgtacttgccgtagttccacggtcgggactgccagccggtgggattgttgttggtgtactgagccacccacagaccgcagttggcacgcacatcggccgggatctggggaatgaacgcggcggacacgtagaccagcggccatacgccggtgcgttcgtggacgttgactactccgacgaactggtgtcgcaggcaggcagattcctgcatttcgtcaccgccgacagccacagcgccgagaatctgggacgtatgttcgcaacccctttgttggagccatacaagcatctgttctacgtgctgtacggtggcggcggcaacggcaagggcatcctactggacacactgcatcgcagccttcccgaactgtctgcggcggtcacgtcgaagaccctgctgggagggcgcaacggcaacggcggcttcgccaccgatcaggagactctgaagctgatcggcgcgctgtgggcctacgacgaggatgccgacaccatcaccctggaacaggctaccctgctgaagaagatcggcaccggcgacacgatggtcgcccgtcgagtgcaggagaacgcggtcagcttcaagaacaaggccacgttcatcatcgcatcgaacaatccagtcatcatgagcatgaccgaggcgttggaacgccgccgcgtgttcgtgcgcatgagggacagccgagccgaggaggaattcgccgacctgctgaaattccgcgacgaacatagcatagcaccgttcctgatggcctcatgccgcctgtgggaggtgcgtggcgacaagccctggaacgatgtcgtcatcggatccgccgacgacctgaccgaagcgcagcagtggatcgtggactgcatcgtggcgaacgggtacgccgtcagccgcgacaacccgcaccacgagaccgacatggcgcaccgcaacaccgtcacgaagctcggtctgaaatcgaagcccaagcgcatcaacggcgaggtcgtgcgcgtgctggtggtcaggaacgaacgcgtgttcagcgtgtaccgcgacggcaccgccaaggacatgaccgaagccatgcaggaagaagacgcagccaagacggtgccaccgttgccggatcccatcgagggaggcaccgtggtcacgccggacgattgcggctatccggtcacgttcggcacggtcaacgaggggaaacgctcctacgactgggccaaaaaccgcacgctgccggaaggcaagcaaccgccgacgggcgtggccgcgtatgcggtcgttcccgttgcgggcatggcggtcatcgatctggacgtggccaaggatccggccaccggcgaagtgctcaaagacgctccgaccggctgggacgtcttcaaccgcgaaatcggcgaatacggctccgaggacttcccgaagacgtacctcgtaggcacacccaccggccgcaggaacggcttgccctccgcacacgcctactacctgatcccgcccgaactgcaaggccggctgaagaacgccgtccacgagaagggcatgccggtagacatccgctgcgaaggcaagggctacgtggtcggagcgggcagtcatatatccggcggcgactacctgctgcttgacctaccagacggccagccgccgatgatgccgcccaggatggtgcgatggctgatcgaccacggctacgtgaccgaacccgatggccaagcttccacgcccaagccggagcatgcggcgcggatcccgtcattgagcgagctaatgcgccggcccgtcacggtcggatccatagcgaacgggaaacccgacatgacgccgataccggccggaagccgggacaacgaccttcacgcgtgggcctacggaagactgctgaaccaccccgacaatgccgaggccattcgccgtgatctgttcgagcgcggacagaccagcggactgaaggaatctgagttggagacgatctggcagtccatccgccgccagctgggaggcgaccgatgatgccgagacggaaaccaccgtggctcaaactcctgtgcccgtcgggcgcgaaccccgcgcacctgacagccagacgctgcggcacatgccgtgaatgggtggcggtggacaccggagggccgatcgaagagatttacgaccccggcgtactggacgcaacggatctggccgtggccatcatcctgggccgcaggttcacgcgcatccagcccatcgccggcaccacgctgattggactgcgcacaccatgcggcacgcggggcatcaaacctgacggcatgtacctcgcagcccacgagtgcttccgcacgccgatcagcgtgaagccattcaaaccacccaaacgcacggcagcgtccaaatggaacggaccgcaactcagcaaaggggagataagcgctttcgagacagcctagaggaataaaccatgaccatcacacaccaaccacaaccaccaagcatccacacgcatcggctcgccaaactcgtgccggcggtactggccacgctgcgcacaccggccctcacggtcgggttcggcaccgccgccggatacatgcgcgtctgccaatgcggatacgccacacgcgaccccaaccggttcgccaaccatctggaacacaagatcggagaaaccatcatgagcaacccactggcattccttgacgaccccacacccaccatcaggcacaggctcgtggacaccgcgaagcatgggcggatctacgtctgctcgtgcggccgcaactacccgtcgctcaccgccatgcaggaacacatccgcgccatgaacgaaagacacgacgatgacaaccacgagtgaaccgcatctggtcatcaccgaatctaccggccacggactgcgctggtggtgctcgtgcggatatgacaccgacagcctgcaagacctaagacaacacttgaacggagggaacgacgatgacagggccatgcgtgaacaatgacggagccagcactgttgctggaaggctgctgtgcaaggagtgcgagcgacggctcatggaagccctcgccatgataggtgaggatgccatgccgctgctgttggtcgccaccaaacgggccagcgtcagcatacagggcaacaggcattccacgccggcgcaggcaccgtcgccgttgcgtgacggcatgtgggaactgtactgcgagacggaacagctactgcgacaactgggtttgcgtttcgactacgcgaaggccgtggacccgcgcgccactgtgaaggcgctggcgaacgccgcgatcatggatccagttcccttgctgtcgagcggggacgtgctcgcctggtatcaggacatcaccaatcttgcccgacggatccacacggcggtcaaccccgccaagccgcgtatagcgttcggcgcttgccccagttgtggaagcgtggtgtggggcgatcccgacgaacggtacggcgaatgcgctggatgcggcaacaaggtgaaccgtcgtgccgtcgccgaccgtctgcttgccaaactggtcgtcagcgaagtacgaggtacagccaagcaactgagtgctgaatgcgcgaaagcggggatccgtctgccggccaacactatccgctcatgggtgaaaagagggcaattgcattatggcaatgatgggaaactcggcttaagtgaactagtgccgttgcttgataggcgacgggcataggcatgcggtgagtaatgttgcttgcgcagtatcactcaccgcatttacttattcgcctttatgtgacggggcttccagcattgctcggtagggttctagactcaatgccgttcgtaaggcatcgctgcgtaggggcacaaatttgccatcactggtcatcttccctaaaagcgcagaccaagcgtcgaatttctcctgcttctcaagaagcggaatgttccgttccaaggccttgttgataagatctgtcacgttctgcgttgtcagcttttccatggtctgacgcaactccagtttcgtcttttcatcgaaagcggattcttgaatgttggccgaggaaagttcacgaatatcctttgcgagatccattgccttgtacatgatgataagcaaacgattttgtgcctcctcgctgtccatgtgcaactggcatgcttcaatcgcgtcatcgacttccttggagaatgcgtttgtcgtttcaggagcggaagtcagtaatgcaatcggctgaggcgtttcgacatcattcttttttgaacgacgagtcactttgttccaaagtttacccatcgtaggtttaactgaatcctcccaccaatgaacgacggttttatcccaccagcttctgaatgtctcattgttcgctagatagtatgcggttccgactattgcggcaatcgcaattgcggcggcagccatagccgctgcaggtgtgtctccgtcatcgttgccgatttctgcgccgtctccgtcgtcggtattgtcgaagacgggttcccaacgtgcttgtcctttcaaatggttttcatcatcgaagaaggctcccagatagacgctgggatcgtcttgaggattggccaaatgcatcccgtcaggcattatcaggcggtacagcggctcgtcttccatatcgactccttaaatccttacgcttcgacgtcgaaagcgcatgaatcacttgtttaacaagtataaggtggaaagatttgcgtcggtagactcagtaaaacccagtaaaactttttcagcctccgaaacggcctttcaagcaaaagaaaaagccttaattcccaagcgggagtagggctttcgtggtcgggccggcgggatttgaacccgcgacatcttgctcccaaagcaagcgcgctaccaaactgcgctacggcccggtaattatgtcacttggcataacttttttagtctacacatacctcaagacggtctgtgcctccagatgactcatttttgacactcagataggccgagaaaatcggaggtctgcggtcattgttactgagtgttactggcggtcatttttcagttttagttgaagtcctaaaacccaagcgggagtaaggcttatcgggtgtcgcaagcgcaacgctttgggaacatcctgttgtattcgacctgttttcgtctttctccatcaaattctgtaagacctaaaacggttggaatttcaacgttttgtgcctatgtagttcattcgttgagttcggtgatatatgtcgttttcagaggtcatcggataaaaatcggataaatttacaccgtctcggaccgcgcctacaacgtgaaaaatcggccccgtccggccgcagtcaagctcatgagagccgtctgcgatgcctgagcggggcgttcggttttcagggcatgccttggtcgtcggcgagcgcagcatacagttcgagtgcgagtacggctgcgatcaggcccgcgcattcgacgagccattggatgcggttcatacgccgagctgttccatggtcttgcgcacgagcgcgtcgacctggtcgaaacgaccccaccatggggcgccgttgttgccgtggatgagcggcacgccggcctgctggagcaggttggcctggtcggggtgtgtgagagcggtgcggcccttgccgggctcgcaatagtagatgaccccggtgttgtcgttgcggatcatcattcctgccatgatgtctacctcctgcccggctgtggcgccggatagcttctgttggacgagttggacgaaggcgccccagttgtagccgaagcgcgtgaagtacgggatggggtccgtatggtcggatccgccgtaggtctggctgaaccattggtgtgggtgcatgcggtcgacgccccacccgtgcgtgcggaggcgctgggctatcacgtcggctgcgatgtcgatgccgcgccagaagtccgacgcgttggtggcctcgcagatctcgatgccctcgcacgtgccgttgccgttgccgacctgccagcacagccggtcgtagggcacgcaatgaatcgcctcggtccagtcggacgtgaggtgcaccgcgtagtcgtagcctcgcgaccacaggtcccggtggttgcgggccgtggcgccgggattcgccgtgctgtggacggcgaacagggacggattgaggtagccgtgccctgcgttgacgatctcctccttgatctgcactattagtcactccgtggtggtcttggcgtccggatcggagatcatctcgctcatgggcacgacctcgcccggcatatccacggcgttacctgtgtcctgggcaagcttgacggcattgacgacctgctggccctgcacggcggccacggtcaagttgttgttgcgccaccacgcatatacggatgcgatgacggcgatgacgccggtgatcgccgtgctcacctggtccgatgtgaacggcagctggctgatgcccgcgatggacagaccggtctggacgacgctgaacagctggacgagcagcagcacgatggatttcgtgcgctccgcggtcaggccggggatattggtgttggcggccttgtggtcggccacgcctttggtgtttgccattggtgttcctttctattggtggttgtttcctccgcgccggaggtcgttgacctcgtggcgcagttcgatgaggttctgctcggtagtggtgatgcgacgattgacggtcgcgaactcgccgttcatgtcgtcacgcagaccgtctaccgtgtcgcgcaataattcgatggcgtccaatgtgcgccggttcttgtcgtcgaggtcgtcgcgcaacggcagcgcgtggttgttcgtgatctcgcctcgcgtcgcccggtccctttcgtcccctctgtggttgatccagatggcggtgacgatctgggcggcgagcaccagggcactcaccacgatgtacgcccatgctggcaatccctcgggcaggttcatgcacggctcctacggtatggaaaacccacacgcagatccgcatggaacggccatgctgcgtatgggttttggaggtatgaaatgttgctgaatgagtattgggacgagtcgtattggccgtcatgtggcaggctgcgcgaatgcacgcgcgtcggatatgcaagtgcatggcgacgtcacatacgacccgaattgggtgacatggatctggcggatctgacggggccgcgtatccagtcgtggcttgactcgatatcatcaccaggtgcggcgcgtaaggcgtgggccgtattgcggcagatgctgcgttcggcggtgcggctcggaatattggacgtggacgtggccgggagggtcacaccgccgaagccatccggctatgagccggaagtattggatatccgccagatacggcaactattgcaaggtttccatggacacgagttggaggcttggctgatctgcagcatctgtctcggattgcgcaccgaagaagccctcggattggaatggcaggatctgaacctcaacaccggcaaagtcaggatcaggcgaggcctgcaatgggttgacggccacgaagtgatagtggacccgaaaaccgagttgagccgtcgcaccgtcgtgctgccgcgattcgcggtacttcgactccgtgagatcaggccacgagaaggtggccgactcatcggcctgttgaatcccggccaggtcgctcgtcgctacgccgcatggtgcaggtcgcagaacctgccctacgtgccacgcaggaacctgcgccacagttgggccagcaccgcgttaggagccggcgtggacgtggcagtcgtaagccgcgcactcggccactccagcatcgctaccaccgcccgctactacctgcgcccagacagcgaggtgctgcgcgaagcacaacgcacatgggagcacgccctcatacgctgatagggattcgctaacccaatcgtctgtattgtttactggcccctacgcaatgagggtaagactcatgcgcataggtcgcatcgttacagcggtcggtcaaccttcgccgtcatctagttatgtgaccggagaattgaaagctgtagagataatcccggaaggatacaggcctgcgactaacggcacgatcctgtttgtatcgaacaatggcggtgcagtcagcagctggtacatagactctgacggacgcattaccgttcgaggccgagcggataaagggtattaccaaacctgcaccggcagctggctgaccgcctagctttcgctaacccctatacggtccggcaaaaaaccgtgacgttcaccggcaacgtcgctgacgtcctgtccgatgcggaataccgtgccctggtcggccggagctacactggttgcgatgtggttgttttcacgcccgtcaccaccggagtgaatacggcgctggtcgcatgctacgacgtgccccataagatcgtccgcgccatccaggtcggcaccccgcagaacatcacgatggatgtccggtttgcggtgatccccgccgtctaacgcgcgccgagaatcctcgtgatggtcaggcactgcgtgtctgacgtgttgccttccatcacgtggattcggtgtccgatgatctgcatgctcgtgtcggagatccggacgagagtggccttgcctgacgcgagcccgttcgtgaaattcatgccgacgaatgagaggacgatcgatcctgcttcggcggcagtgtggaacagcctcgggtaatggtcatcatcattaccctcgatgatcagctcgcggaaatccgtgatcgattcggcgagcgggagggtgccggttttgccgctggtgccctcccataggacggtgggggttagcgaatcccacatgtccttcattggtttcagcacgttgaagagcgggacgagggtgccgacggtgatgccgtccaatgggatgcggtagaggggcatgtcgtgggtggcgacgccgtcgaggatactgccggtggtgtgggctggatccgtcggggcgccggtggtgggggtgcccttgaggaccacgattgagcaggtttccacgccggtggtggtgttcttcgtgtagcgaagcaccacgagatcgttgcgtttctggccttgggtgccggattgcacggtggcggtggtggtgccggtcaggtgcacatggcggccgttcaatacggcgtcgccggattggacggcgatggtgttcgcgttgctcatggtggccttgagctgattaccggtggcgagcgcgtagtcgccgggtccgacgatgccggcctggaatgcgccgatgtcgtcgctgccgatgtgtggggttccggcgtagccggtgatgagttcgactgtcatgtgttctcctgacgtttatgcggtgcgtttccagaggcggcctcgtccgatggtgtcgg

SEQ ID NO: 2334 - DNA, 35531 bp, Unknown
  R119_18m  MAG No. k141_52472
gacagggtggccatccatctcggttcagcccatgatgacgatacggaactaccgttctcggcgatccttcgctcggatgagaacaaagaaccgcatcgtctggagatgctggcggaggcgatgttcgatttcggccgatatctgcttatctcctcatccaggccacacacccaacctgcgaatctgcaggggatttggaaccataaggatttcccgaactggtacagcgcctacacgacgaacatcaacgtcgagatgaattattggatgaccggcccctgcgcgctcaaggagctcatcgagccgctcgtctccatgaatgaggagctgctggcaccggggcacgatgccgctgacaagattctcggctgccgaggatcggctgtcttccataatgtcgatctctggcgtagggctcttccagcaaacggcgatccgatgtggtcgttctggccgttcggccaggcatggatgtgccggaacctgttcgatgaatatctgttcaaccaggatgcatcgtacctgtcccgcatctggccaatcatgcgggacaacgcgcgattctgcatggatttcctatcggagacaaagcatgggctggccccgtcccctgcaacatcaccggagaactgtttcctggtgaatggagaaccggtatccgttgcgcaaagcagtgagaatgccacggccatcgtgcgtaatctgcttgatgatttgattcaggcttctcacgatttggaaaaccttgacgaagaggacagcgctctggtccgtgaagcggaatccgtccgttcccaactggctgaaacgcgattgggagctgatggaagagtcctcgaatggaacgacgaattcatcgaatccgatccacagcaccgccatctgtcccacctttacgaactgcatcctggtgcaggcatcacgtctaagactccgcgtctggaggaagccgcgagaaaatccctcgaagtgcgtggcgatgatggttccggttggagcatcgtatggcgcatgatcatgtgggctcgtctgcgtgatgcggaacacgccaaacgaatcataggcatgttcctacggccggtggatgcgaacgctgaaaccaatctgctgggcggaggagtgtacgacagcggattatgcgcccacccgccgttccagatcgacgggaaccttggattcccggcggccttgtcggagatgcttgtccaaagccacgatggctggattcgcgttcttccggccctgccggaggattggcatgagggaagcttccatgcgctccgcgcaagaggtggaatccaagtggatgcgacatggacggatcagacagtggaatatacgttgcgctgttcgaagcctacggagattacgctgaacgttctggggactgatatgggacgtgtcgcattgtctccggataagccattcaagggaaccatccggcgttaacgtattgcgttatatccgttactaaatgttgcggaccgtctttcctaatagaggaggacggtccgcaatctttttttgatgggaaaggagattccgccattttccacgattggtatgcgcagatgaacctgtacagtgaaagctatgcgtgtaatttctggacgattcaagggtgtggcgcttgctacgccgaaaacgggtacccggcctaccacggatcgcaccaaagaggcgattttctcgcacctcgactcatggggagtgctggatgacgcccgtgtactggacctgttcgccggtactggtgcgttgggcatcgaagcgctgagccgtggcgcgcgagaactcgtggccgtggaaagttcccggcctgcggcggcgctgattaccaagaccttgtcgcagttacaaaagaatcgttcgtgggatgcctcgctcaaggcccgtgtgttcaccaaaaaggccgagcaagtggctggcggctttggtgaatcctttgacgtgatattcattgatccgccctacgcctatgagaccgctgaatgcaatcagttgttggccaatctggcggtgggcagcgccaccaacgagaacaccgtgattatgctcgaacgctcggtacgctccgacacccccaccgcccccgaaggctggcaaatcactgaaagccgcaactacggcgaaaccgccgtcttctacatcgagcccgcggatgacgactcggatatagagcgttccgacgattccgccgcgtagtgaatctcccaccgtgtggtgaattaatcggcgagccggcgcggatgggcggcggagacctcccagcccaaggccatcagggtcttgcggtcggccttatccagcgccttgcaatccagtgccgcgataaggtctggccggatctcggcggtgcgggccagcgcttcgtcgcggcgaaaacggtccaccttgccgtggtcgccggacaacagcacgtccggcaccgcaataccacgccacacggccggcttggtgtactggcgatgttcaagcagtgcgtcctcgccggtgtaggattcctcgacaatcgaatctgggttgcccatgaatccgggcatcaggcgggtgatggcctcaagcatcaccgacaccgccacttcgccaccgttcagcacatagtcgccgatcgaatattcgcgtacgtcgacgccctgggagcggtagtagtccgggatgcgcgcatcgtagccctcataccggccgcagccgaacagcagatggtcggcatggctgagctcggtggcgtcgcgttgggtaaacaacggggccgatgggttcgggaagatgagcaccggtgtgccggatagggcggaggattcagacggccgcgagaatcccagcagttcgtccaggcattcgctccacacctcgggcttcatcaccatgccggccccgccgccgactggcgtatcatccaccgaatgatgcacatcgtgggtccagtcgcgcaggttgtgcgctttgatctccaacaatcccttggcctgggctttgcccatcaggctgaggttcatcacctcaaagtattcggggaacacgctcacgatatcgatcttcatgttatccagcctaacggtagccccgcccgcattacacggccaccactacactattgcggtgatgaatacgacgatgaacctccccacccgcaaaaagcccgaagtgttgtccccggccggcaacctgaggggcctgaaaaccgcggtcgattatggtgccgactccgtctactgcggcggcaaagccttcggcatgcgatcggcccccaaaaacctaagccttgaggactttgaggaaggctcgcgctacgcccatgaacgcggcgcccgcgtgtacgtgacctgcaacgtgctgccgcgcaacaacgagatcgaagccatgcgcgagtacgtcggccagctcaaggacaccggcgtggacgcgctgatcgtctctgacatcggcgtgatgatgatggcccgccaagtggctccgaacctggaattgcatgtctccacgcaggccggcgtcaccaattaccaagctgcgaacgccttctatgagcttggcgctcgccgtgtggtgttggcccgcgagatggacttgcaggccgtgcgtgatattcgcgccaacattcccggtgacctcgacatcgaatgcttcgtgcatggcgcgatgtgcatggcgttctccggccgttgcctgttctccaactatctgaccgggcgtgatggcaatcatggcgaatgcgcgcagccatgccgctggaagtattcgatcgtggaagagaagcgccccggccagtacttcccgatcgagcagaccgagaacggcgcctatctgttcaattcgcaggacatgaatatgctggggcacttggatgatttgattgactccggtgccaccagcctcaaaatcgaaggccgcgcgaaaagcgcctactatatcgccgccatgaccaacgcctacaaaaccgcggttaatgaatacatgattcaacgcggttttgaagacgctgatggcaatgttctgaagcctttccgtgaccgtgtgattcgcccgggcgaccccgattttggccaaggaaccgaagatcaagtaatgagcaatgccgatgccgcgttcgccggtgtggccgatgagggatatgaccgtggctctgatactgcggttgccgattcggtcaccggctcggttgccgcagaacgtgaccgcgtgacggttgctgatgccgccgactcaactgcctctggtacgtcggccggcaccgccgtcgaacccgacggcatgagctcccacgcccgctccacgcgccgcaagtccaacaccgcggtcgaacagatcgagaccgattggaagcatgcggccgttcgcccggccccgcacgtcgaactgcccgaatggctgctcgaggaaaccgacaaggtggcccaccgcgactactccaccggcttctattacccggagcacaaggtcacacagaacaccgaccgctccgcctacttccgctcatggctggtagtgggcgaagtgctgagctggagcgcggacgaaggcggacgtgtcacgctgatgagccgtaacaagatcgagcccggtcaacaggttgaattcctgctgcctggcgagagaccattggtctttaccgtgccggaaaccggcctgcgcgatgccgatggcgcgccagtacccgccatcaataatccggcgcacgtgttctcgatgccctgcccgcaccaggtgcccatcaacgccgccatccgctcgcgcaccaaaaagcccaccctcaaagccgaataacctaccactccgcccccgctgactgggggtggtcatgggaatcatgaacaccgcccgcacccaagaaagaatgccttatgcctgaatacagcgaagaaatcctcgattccaacagcatcagctctaccgataaagccggtcgccctattccggtgaccatccccatcgcactggcccccggcatcaaggtggtgtacaccacgcgactgggcggactgagcaccggcgattacggcaacctgaacctcggcggcaagtccggcgacgaacctgaggccgtgctgtcgaaccgcatcgcactcgccgaagcggtgcaagcccgcctatcgctggtctcccaagtacattccggcgtggctgtggacgtggacgactcgttcgtcatcaacacccccttcggcttcgacgtgtccggcacacatggtgagactgacactccgcacgtcatcgaggcggacggccaggtcaccgcacaatccggcatcgccctaggcatgttcgcggccgactgcctgccggtgctgctgggcgacccggtcaccggcatcatcggtgcggcccactgcggccgtcgtggtctggagcgtggtgtgatcggcgccacggtagacctgatgaagagcaagggtgccgatccggcgaacatcgtggccacactcggcccgcgcatctgcggcgactgctatgaagtgggcgacgagatcgccgaccagttcatcaagcgcttcccgctgaccaagacgaagacccgtttcggtggtgccggcatcgacatcgccgaagccgcgatgattgacctcgccttcgccggcgtacaccaggtggtcgattcgatgccgcgcgtgcacgccgccacccagtaccttgaggaagacccggaactctccgaactgtgccgcacggacggcgaaggcccggccgagctcgcggagcgcatcgacaacatcagccacagcatgtgcacgctcgaaaacccactgtggtactcgcaccgccgcgctgcgctcgccaacaaaacacacgaaggccgcctcctcgccctcatcgtgcgtgactaaacggagaatgcgggcacattccgtggagaagatgtgatgcagttcacggacggccagccctcaccctacggtggtgcctatgactgagagagatttcgatacccccgtcgagacgcctaccgtccagccggcccccgctcggggcgccaaaccggcacaaaccgtgccggtggtggccgtggtgctggccgccggcttcggtacgcgcttcgaccccgacaatcccaagcagcttgtctccgtgggcggcaagcccatcgtgtgctggagcattgatgcctttgaacattgcgatcgcgtcagcgacatcgtggtggtggtcaatcccaaggtgcgcggtgaagtggaaacgttggttggcgagatgggctacaccaaggtccgcgtcatcattgacggcggtgacgaacgtgtggacagtaccgccgccgcgctcgacatgctggctactgctggcattccggacgatgccaagattctgatccatgacgccgtccgtccgttcgtggaacagtccgccatcgacggttcgattgatgcgctcgaccagttcacggccgcgaccgtggcctacacctcaaccgacaccgtgctgttgaccgaggatctgggcgatttgaaagtggtcaagtcggtgccggaccgcccgaacaccttccgcgcgcagaccccgcaatccttccgcttcgcgacgattcgtcacgcttacgatctggctgccgccgacccggacttccatcccaccgacgacacgcgcgttgtggtcgattatctgcctgatgaacccgtcgccattgtctccggtgcggaaaccaacctgaagatcaccacgctggaggatattcccacagctgagcgtatcgccgaggagattctcggtcgtgatcccaaggaagaggcccgcgcccgcatgcacgccctgctggcccaagcggccggccagatgcatcgctagactggcattatgcgtgaactcaatgttgtgatctccggcttcgaccactatgacggcgtggaggtcaatcccgccgtcgaagtgcccaaggccatcgccgagcaggggttgggcgtctcctctgctccggacgatccgttggagcaggtcgccgtcaccgtccatgccgtcagcatcccggtgagcttcgccaaagcctggcccacgctgaaagagacgattgaggccaccaagcccaatatcgtcatcgccaccgggctcaagcacgcagcccgaggcgtgatgcttgaacgatgcgccaccaacctgatggacgcgatcaagccggacgcggacaacgtgaccccacgccgcgaacccatcgaccccaatggcccggccgcctattggacccgcctgccgttgcgctcgatcctgaatgatttcacggacgattcgattccggccaccctgagctcggacgcaggcacgttcgtatgtaattcgctgttctacaacttgctgaactggaccgccacccaggagcgggtgctgggcggattcgtcagcttcccgccggtcgtgccggcggattccagccagcatggtctgccactcgaccagcagatcgccgctggccgtgatgtggtgcgcgaagccgtgcgctactatctcaagccctccagctccggcatcctcatcgcctagcacgctgcgcgccacgccggaatagaacatggttcgcacgcattgtaacgattgcgcgtcactcaacgcccagcgctagtgcgatgcgctacagtgcttcaaggatgtgccaagagctttatgcgtgtgcgaaaggaataaacagcgatggtggatcgtttcccggtggtgctgcgaggatatgacaaggagaaggttgatgctgccttcgacgctactcaggagagtgtgaagcgtgcgcagcagacgttggccagcatgcgtgagcagattgcggcggatgacgaccgtattctgcaactgcaggcccagcttcaggaagagaagaacaagaagccggaaggcaacagcttcgcttccctgggggcgaacgcccagcagatgctcgcctccgccgagcagacgagtaccgaactgctggaacgcgccaagcaggacgcatcctccatccgtaccacggctcaggctcaggccgaaacgctgatcaacaacgccaagctggatgcccagcatattgttgacgacgccaatgccaaggccgcctcgattctgacgaacgccaacaatcaggccgaatcagtgaccacctccgccaacgaggacgccgcacaactgcgctccgaaaccgccaagaccatcaccgaacagcgtcagaccgtcgagcttgagctcagcaacgcgcgcgaagagcacaccaagaagatggcttccgaacgctccacccaagagcgcgaaatcgccgatatgaaggcggaagctacccagcaggttgccgcaatgcgcaaaagcgccaatgaggagatcaccaagcttaagtccgattccaacgatcagattgaggcggcgctcgccgaggccaacaagaagctcgccgacgtgcgcgagcaagtgtccaagatgatgaccgaagcccagcgcaaggccagcgaaatcattgatgcggccaagaccaagggtcaggaaatcactgatgaggccgaggtcaagcgcaccagcacgatgagccaggtcaacgccgaagtcgagcagatccgtcacgacatcgccgctcagcaggatgaggccacgaagaaggtcaacgaactcctgcagcacctcgaagagcgtcgtgtggcggccaagcgggaagccgatgagttggtcggccaggccaagaacactcgcgaccaagccgattcatatgccgcgtccaagcgcgaggaggcggacatccaggccgccgcaatcgtgcataaggcgggcgaggaagccgatgcgcagatcgaggagcgtcgtgccgccgcccaaagcgagcttgacggtctgtccaagcgcatcgccgatctgcaggaacgcgagtccgtcatcacccagcgtgtttcggaactgcgttctatgttctcgcaggcgttctccggattcgctttcggtggtaatgcggcggcctctggtcagagtcaggaagccgctgccgtggcgtcattgccggtggtcgcgcccgtcccggaagtccagcctgtacacaacgaggccgatgatcagccgggtgagttgagcggaaacgagtcggctgccgacgatcacaatgagacagatgcggcaccggctgattcggctgattcagctgcgcagaatgagcagtccgaatcgtctgagccgtccgagcaccagacacagggcgaaccggaggccccgactcaggagaatccagccgtatctgagcagaacggcgaatgacaggccttcgattagactactagcggtaagaattacggcacctgcgctttcgagccaggtgccgtattcgtttggatctgcgccacaagcgcaccatcacagaaggagtatgacatgagtgaattgacgcctctgaccggcgaagcattgaataccctgcgcggcgatttcgcacagagcggcaccaaccgtctggccatgaacgcggtgaccgccgccggcatcgacaaggtggctcgcaattatgaccgcgctcgtctgatgcagcgccgtttctccaccatcgttgacaatggcgaagccacccatcaggatcgctccggccgctgctggctgttcagctccctgaacgtggcccgtttcgtggccaagaagaacatgaacctgaaggagttcgagttctcccagaactacgcgatgtactacgacaagctggagcgcgtcaactacttccttaaggatgtggccgctctggtggctgccggagagccttccgactcccgcctgatgcagcacctgctcgccgacgtgatgggcgatggcggccagtggaccatggccatgaacgtgtacaagaagtacggcgctgtgcccaaggacctgttcccggagaccgaatcctccaagaacaccggtgaaatgaacacccagctgcgccacatgctgcacaccgccgtggcgcacatgtacgccgctgacggcgatgcctccaaggtcgaggcgattattgccgacgccactgctgccggccaccgtattctgaccatccacctgggcgagccgccggtctccttcgactgggaatggaccgacaaggatggcgaattccaccgcgacggcgagattacgccggttgagttctggaagaagtacgtgggtccggctggtcttgaggactacgtgtgcctggtggatgatccgcgcaccgagcacgccaagggcaagaagatcggcatcgagcacctcggcaatgtggctggcggcgacgccaccgagtacctcaatgtgccaaaccagttcatgaaggactgtgtcaagcagattctcgttgagcagggcatcccggtatggttcggtgccgactgccacccgttcatggaccgtgagaacggcgcttgggccaccgacctgttcgagtacggccgcgtgtacgacgtggacttcgatttggacaaggaagcccgcgtgcgcttcggtgactccgccatgaaccacgccatggctttcgccggcgttgacgtggccgacgacggcaccacccgccgctggcgagtggagaactcttggggcaccaagatcgccgacaagggctacttcaccatgtccgacgactggttcaccgaatacgtctacgaggtagccgtcccgaaggccctgttgccggaggaataccagaaggccctcgaagagccagccaccatgctccccgcatgggacccgatgggtgccttggcctgacttcgccagcctcccggaatcggcctgacggccgatgctgtgttttttcgcagcctgccggctgctagggtctctccctctgtcagcgcgaagccgctgacggggggagaggccgcggtcgcaggccgcacaacaacacagcatcgccgcaggcgagtccacgcaggcgagttcacccaaagtccataaccgccggcccaacaagcagtccccgtaacagactgctatagttgggcttttgcgtctatagcgccataccgacggtacgtatacaaggaaaggagtcgagcaatggcagcactacgtggtccggatagttccgaggatgaacgtcgtttgggggagcaggccgtctttcccgagaccgtcgatgtcaacattcgtcagcttgaccccattcccgcgccgcgtgccttcctcagggagcagccgctcaccgatgagatgagcgagctcgtgctccactcgcggcaggaaatccgcgacgtgctcaatggccgcgacgaccgactgctcgtcatcgtgggcccctgctcaatccacgacccgaaggccgcgcacgagtacgcagaaaagctggctgccgtcaagcgcgagctggaagaccgactcgtgatcgtgatgcgcgtgtacttcgagaagccgcgcaccaccatcggctggaaaggcctcatcaacgaccccgatctggacggtcgcttcaatattcgtaagggcatgtggctggcccgcaaggtgctcaccgacgtgctgagcctcggcctgcccgccgccaccgaatggcttgaccccatcaccccgcagtacatctgcgacgcgatcagctggggtgccatcggcgcgcgtaacaccgaatcccaagtccaccgcgaactggccagtggcctgtccatgccggtgggcttcaagaactccaccgacggctccatcaaggccgccgccgattcctgcttcgcggccggcttcgagcatcacttcctgtccattaacttggacggtcgcgtgatttccgccgaaaccaaaggcaacccggattgccatctggttctgcgcggttccagccacggcccgaactacgatgccgaatccgtgcgtcaagctctggaagacctcaaggtttccaaagcgtccggcccgagtcagcatggcctcgtcatcgatgccgcccacggcaactgcggcaaagacgaaaaccgcgaagccgaagtcatcgaagagatcgctgagcgtctggcgcacggcgaacaaggcatcaccggcgtaatgatggaaagcttcttggtcggcggtcaccaaaagccggccccgctcgaccagttggtctacggtcagtccgtcaccgactcttgcgtgccgtgggaacgcaccaacgagctgctgcacaccctagccgacgccgtcaccgctcgcagctcggctaaatagctttgtctttgtaaaaatgctcactgagacccactcagtgagcattttttgccaataacggtggtcatgtcagtttgttcccgtgacaccttatccttgggaaagatactgacccaaggagagatgttatgcagcagcaggaggaagcagcacattcgctgcatccgttgcaagtcggtccgcagccgttgaacaccccggaagagcttcgcgccattcgtcaggcgatgggggaggggaagaacccgctcgttgccactgatgtgccgcgctgggaagatcaggtgggtgtcagtcgcatcatcaaccgccgcgtattggagctggagccgctgcccacgcccgcgcaagtgctcgctgaactcccgctgaccgatcaggctcaggaaatcgtcgcctactcgcgtgatgagattcgcgcgtgcctgtacggccaagacgacaggttgttggtcatcgtcggcccctgttcggttcatgacccgaaggccgcgctggactacgcgcaccgattggccaagctgaaggacgagctcggtgagcagctgctcatcgtcatgcgcgtgtacttcgagaagccgcgcaccaccatcggctggaagggcctgatcaacgacccggatattgatggcagccacaatattcgcaaaggcctgttgcttgcccgcaaaaccttgcttggtgtgctgaaggaaggattggcggccgccacggaatttctggagcccaccagcccgcagttcatctcggacgcggtgagttggggcgccattggtgcgcgcaacacggaaagccagatccaccgccaattggccagcgggctttccatgccggtcggcttcaagaacgccactgacggctcggtgaaggcagcggtcaacggttgcttcgccgctgctcagcagcacacgttcttcggcattgaccatctggggcgtgcctgcgcagtcgagacccttggcaacccggactgccatgtggtgttgcgcggctcgattcacggcccgaactacgatgccgagtccgtggccaaagccatggaagacgtacgcgccgaaatgcccgccgaatccgcagcctcgcacggtctgattgttgattgctcgcacggtaactccggcaaggacgagcatcgtcaggccgaagtcgtgcgcaatattgccagcagaattgcagctggcgaacagggtattaccggcatcatgatggaaagctttattgaagggggcaatcagaaggccgcgccgcttgatcagctggtctatggcaagtcgattaccgacaagtgcatcagctgggaagaaaccgaggccttgctgcgcgagcttgcggaagccgtggccacgcggcgttggcactgagttgcgtcatcggctctctcgggggggagcaatgcaacgaaacgtctctacccctcagcctgccattcggcggccacctcccctgacatgggagtcgaaagcgttgtgaaaggaacttacgtatgggtatgaaaactgtagctattattggcgcattggatgaggaagtggcactgatcgccaaatcgctcacgcatgtgacgcacaccgccaagggcagccttgacatcgtgtccggcacggtcgactccttcggttctgacgtcatcaaggttgccgcaacggtaggcggcatgggactggtcaatgcggccgccaccacgcagctgctgattgacgagttcgccccggacgtcgtgattttcagcggcatcgccggcaacctcaacacccacctgcacatcaacgacgtggtgctcggcggcaccctgcgctacctcgacactgacatgcggctcgtaggccagtggaagcccggcactgcggccactccggtggaggaattccactctgatgaccgtctgctggaagttgccgacgaggcgcttgccaatgcgggcattacccacatcaccggcatcatcgcctctggcaactacttcgtggacacgccccaaaaggtcgaggaggtcatccgactcaccggggctgacgccgtggagatggaaggcgccgccgtggcacaggtcgccgcccgcaatgacgtgccggcactggtgattcgtgccctttccgacaacgccgacaccgattacgaggtattcaaggagttcgacatctccgagtacgccgataccgccgcccgtctggctgtcgacatcgtcaagcgcctgtagtcggcgggctggcccatctcaccatccacgttttgggtatgatgaccacaatatgagcgttttcaaactattgcttataacctgagccatactcggtgttcggcacagcgatgtgcggggttcatcgctggggccacaagccgtaccagttcttctcccgcatgccggtcgctgtgctcaattcgttaagcgacgacaacaccgtcgcgaagcattgaatacacaatgcgcacgctgcactggggtttatctgcagcatgaggagagaaaaaatgactgcaagcgcaaccgcggctgtgaccaaaccggtgaagaaggattcggttcctgagatcatcgccgcttccatggtcggtacggccatcgaattctacgataactactgctattccattgccgctgctagctacttcggcatgatcttcttcacggacgtcgccaagtccaaccagaccctcgccacgctgatggccttcgtgaccttcgccgtttcgttcctcgcccgtccgttcggctccatgctgttcggccacttcggtgacaagctcggccgtaagaagacgctggttatcgccctgatgaccatgggtatcgccaccttcctggtcggctgcctgcccggttatgagcagattggcgcatggtccgtcgtgattctgtgcatctgccgtgcctgccagggcgtgggcctcgccggcgaatggtccggtgccgcgctggtcgccactgaaaacgctccggccgacaagcgcgccctgtacggttccttcccgaaccttggcgccccgattggcttcttctgcgcttacggcctgaacctgctactcgaatccaacctgagcaaggaacagatgattgccttcggctggcgtatcccgttcctgtgctccgccgtgctggtgatcattggcctgtacgtgcgtgcccgcatgtctgagaccccagtgttccagaaggccactgaagagaagcgcacctccaagcacccactgcgcgacctgctgccgtactggaaggaagtcgtgctcggcaccgtagccatgggtatcacctataccctgttctacgtactcggcacttggtcgctggcctacggcgtcaagggcttgggcttccagcagggcgagtacctgctcatgcagatgtgctccgtggtgttcttcgccatcttcatcgtggtctcctgcgtgtacgccgacaaggtgggccgcaagaaggtcatgattgccgtgaccgccgccgccttggtgttcagcttcttcgtgccgatgctgctcgtgcactccgccgcccatatcatgatcttcctgtgcgtcggcttcatgatcatgggtggtttgttcggcccctgcggcgcctacctgcctgagctgttcccggtgcacgtgcgttactccggcgccggcctgagctacaacctcgccgccatcttcggtggcgcattcgctccgaccatcgcccaggccctggtcgcctccaagttcggcgttgccggtgtgggctggtacatggccatcatggccgccctcgctctgctcgctctgttcctgattaaggaaagcaaggacaaggactacgagctgtaaatagagctccccatattatgctcccgctggcgggagctgtccacgaaagcggactgagggtggccaatgggatttcggttctttgaccaccctcagtctcactgcgttcgacagctcccgccagcgggagcattttgttatgtcgtcccaccaaaaatgaacaatagacgaacttacgtagtttgggcatctcactacgccttgcacgttttactctggaaatcatggatatctggcagatcgtcgtgattgtggtgctcgccgcgctgatactggcgtgggttgccgtcatcgcctacaacaaaggccgcgtttcaggtcggctcgccgccgaacaggacctgtccggcgacgaggatacgcgttctctattcggtgatgatgcgcccgtgcgccccaccgagcgtcgcctgattgaagtcctgcccgaagccctgattgttaccgaccgcaacggcttggtccaatattcaagccccggctcagtgccattcggcctggtctccggcgaccgactcaactcgcgcgaagtcgaggacatcctcactcaggccgccgccgacggtggcgtgcgtgagcgtgaggttcagctgccggtcaatcgcaattcctatccgtcctctaatggccgaggactggaggccggccagtcacgcccgtccaacatgctgtatttgcgtgtgcgcattggcgatatcggcgatgacctgtacgccatcttcatcaacgacatgtccgagcagcgccgtttcgaggccgttcgccgtgactttgtgaccaacgtttcgcacgaactcaagactccggccggtgccatctcgctgctggccgaaaccgtgaccgacgccgccgatgatccggacgccgtacggtatttttccggccgtatctccaaggaatccgcgcgcctgaccgaactggtacatcatcttatcgacttgcagaaagcccaaagcccgcaaagtgtgattgatgcgcggcgcatttccgcgctggatgtggcacgcgctgccatcgccgccaatcagacccaagccgactcccgccatgtggatattcgactgagtgtcaacggacagtcagtgcccacgaaggtcgaggagctggccgatggcgaaggttccttggaagaatcaggcagcccggccacgagcggtccgatgatcaaggccgacaaagaggccatgcaaaccgccgtcaagaacctcgtagagaacgccatccattactcgcccgaacacaccactgtggcggtcggcgtgggggagcgcgatggcaaagtcaccattcgcgtggtcgatcagggcatcggcatccccgccaaatcactggaccgcattttcgagcggttctaccgggtcgacccggcccgttcgcgcgagaccggcggttcgggactcggcttggccatcaccaagcactgcgtgcaggagaacggcggtcggatttcggtctggtcgcgtacgggggaggggtcgacgttcaccatcgagctgccggccgccccggatgaggatgacgacgaggcccggccggacgagtcgacacaagcgtagggccttggttggtgcccgatatggtgccattccattgccgcacaatcacacagtgggcgaggtgcgcacaccgtgcgtagcgcaattacgcaattacgtactttcaggaaacagcaggctaacggagaacaaatggttacgatagtatcggaaaactttgcgcctatgcgcacgggaacatacccaagaaaggctactatggcacgcattcttatcgtcgaagacgaggaatcctatcgcgagccgctggtataccagctcacacgcgaggggtacgacgtgtccgccgccgccactggcgaggaaggtctggaactgttcaccaagggcggcatcgatttggtgctgcttgatttgatgctgccgggcattgacggcactgcactgtgccgtcgcattcgtgagcagagccgtgtgccgattattatgctcaccgccaagagcgccgaaatcgataaggtcgttggccttgagattggtgcggacgattatgtgaccaagccgtactctttccgtgagctgctggcccgcatccgtgccgtgatgcgtcgcaatcaggccacggcccaggcttccggcactgtggatgacgatattccgctggtgtgcggcgatatcgccatgcaggtaggccagcatcaggtcaccgtacgcggcgaaaccgtgttcttcccgctcaaggaattcgaactgctcgaatacctgatgcagaacaagggccgtgtgatgacgcgtcaccagctgatcgaccgcatctggggttcggattatgtgggcgacaccaagacgctcgacgtgcatgtcaagcgcgtgcgctccaagatcgaggaagatccggcgcaccccaagtatctgactaccgtgcgcggtctcggatacaagatcgatactcccgcggagtaaatggaaggcggccttcgggccgccttttttgttgtggattgtgggctcgccgcaggcgagtccactccaaaaactacgtagcctcaacgtagcccacaaacatccaagtgttcatcttctgtttactgatttcggttttgggcccttgaaaccaccaatacgcttgtagttgtcatgaattgaccgggcagcgctgagccgcccgcgaatagttgatagagggattaagtaataatcatgcagaagaacatcctcattcgctccattgccgctctgtccggcattgtgatgctcgcttccgtggccgcctgcggcgataacaccgccaccacgaccgacaacagctcctcctccgattccacttccaagtccaccccggtctccggcaacttctcgggcgccggcgcctcctctcagcaggccgccgttgaagcctggatcgccggcttccagggcaccaaccctgaagccaagatcgcctacaacccgtccggttccggcgctggcgtgcagaccttcctgaccggtgccaccgcttgggccggctccgataaggcccttgccgatgacgaagttgagcagtccaagtccgtgtgcactgaaggcaccgccttcgatgtcccggtctacatctccccgatcgccgtggtcttcaacctcaagggcgtttccgatgccggcaagcacatcaacatggacgctgccaccatcgccaagatcttcgacggcaagatcaccaagtggaacgatccggccatcgccgatcagaacaaggacctgaagctgcccgacaccgccatcaccgtcgtgcaccgctccgataagtccggcaccacccagaacttcgtctcctacttcaaggacgtcacccctgacaactggacctacgacctctccgagaactggccgaacgaggttggccagggcgccaagggcacttccggcgtgatctccaccgtcaagcaggccgacggcaccatcggctacgctgacttctcccaggtcggcgacctgggcaccgtggccgtcaaggtcggcgacaagtacaacgagatttccgccgaggccggctccaaggtcatcgaggactccaagcaggacgacaccgttaagggcgacaaccgcatcgtcatcaagatcaaccacgccaccgaggccgagggtgcctacccgatcgtcttggtctcctacgacatcgtctgcccggcctacaaggacaccaagcaggctgagttcgccaaggcttggctgacctacgtgacctccgacgagggccagaaggccgctcaggatgccgccggcaccgctccgctgccctcctccctgaagtctaagatcaccaagtccatcgaggccatcaagaccaagtgatgacgtcggcccgcaagggtcgtgtggactggacctgacaactgaacgatagactgtagtagtaagagcagtcgccgccaactttaagccgcagtcgtaaaccatacggctgcggcttaaagcgggtcaggacccgaacggtttggcaaagtcacagacgaaaaccgcaccacttgaatacttgataaccaccctatataaggagaatccgtgagttcgcaagacaaaacggctgtgcagccagttggaggcaagaccgccgacaaggtgtttcgcggtgtggcatacgcctgcggcatcctgatcctggttgtacttgccgctgtgttcctgttcctgtttttccgcgcctggccactcatcggtggcgatcaggccgccaacagcgacaccgtgtccagctttaccggcggcaaggccagcagcttctggggctacgtgctcccgctgttgttcggtactgtgctcgtgtctttgctggcactgctgattgccttcttcgtgtccatcggcattgcgctgttcatttcgcactatgcacctaagaagctcgccaccgcgctgagctatgtggtcgatctgctggctgccatcccgtccgttatctacggtttgtggggcggcctgattctggtgccggccatctacccgttctggaactgggttgccaaccacctgggcttcattccactgttcgagggcccggccgccaacccgtcgcgcaccgtcgccaccgtggctgtggtgctcgccgttatgattttgccgattatcacctccatgtcccgcgatatcttcatgcagaccccgcgcctgcacgaagaggccgcgctggcgctcggcgccaccaagtgggagatgattcgtctggccgtgctgcctttcggcaagtccggtattgtgtccgcctccatgctggctctcggccgcgcgcttggtgagacgatggccgtgttgatgatcctgtccccgggcctcaactactccatcaagctgctgcaggcctcgcagaaccagaccatcgccgcgaatattgccgcacagtaccctgaagccaacgatctgggcgtctccacgctgattggaaccggtctgattctgttcctgatcacgttcgtggtcaacttcatcgcccgtaagcttaccgagaaagcgactgcgtgatgactgctgctgagaacactgaaaagactccgatggacggcacgcccgaaatcgacttcgatcgtttccgcccgacccgttccgccatccagcgccgtaatatcatggaccgcttcatgtgggccctgatcgcggtggcgtttgtgatcgcctgcatcccgctgatctccctgctgtggaccactatcgtcaacggcatcaagcgcctgaacctgaacttcctgagctacaacatgaccggtgtggtcggtggtagccagaccccgtccggtggttacggcggtgtgctgcacgccatcatcggtactctcgaaatcaccgctggcgctatggttatctccattccgatcggtttgatgtgcgccgtgtacctggtcgaatactcgaaccgcggcaagctcgccaccacgatctccctgctcgtcgacgtgatgagcggcatcccgtccatcgtggccggcctgttcgccttctcgatgttcacgattctgctgggccccggtaccatcaacggtttcgaaggctccgtggctctctccctgctgatgctgcccaccgtggtcaagtccagcgaggaaatgctgaagatcgtgccgaacgatttgcgtgaggcttccttggctctgggcgttaccaagcagcgcacgattaccaagatcgtgctgcgcaccgctctgccgggcatcgtctccggtgccattctggccatcgcccgcgtgattggtgagaccgcaccgttgctgatgaccgccggctacatctccagcaccaacgtgaacctgttctccggccagatgaccaccctgccggtgttcgtctaccaggagtactcgaagctcagcgcgaactgcccgcccaacgccgacgccacctgcgtgaccacgattccgatggaacgtgcgtgggctgcggctctcgtgctgatcgtcatcgtgctgctgctgaacctcattggccgaatcgtggcgaaggtcttcgccgtcaagaccgagcgctaagccagtcgctaagcctaagccttaagaacacaaggaaatataaggaaacatcatgggacaacgtattgacgtcaaccacgagaacatctattacggcgactttctggccgtggaagatgtgaacatcaacatcgagccgaacaaggtcaccgccttcatcggcccgtccggctgcggcaagtccaccgtgctgcgcaccttggaccgtatgcacgagatcatccccggcgctcacgtcgagggcgaggtgctgctcgaaggcaagaacctgtacgacaaggacgtggatccggtggccgtgcgccgcgacgtcggcatggtcttccagcgcccgaacccgttcccgaccatgtccatccgtgagaacgtgctggccggtgtgcgcctgaacaaccaccacctggccaagtccgacgccgacgatctggtcgagtgggctttgcgcggtgccaacctctgggaagaggtcaaggaccgtcttgacaaccctggcatcggcttgtccggtggccagcagcagcgtctgtgcatcgcccgcgccgtggccgtccacccgcaggtgctgctcatggatgagccctgctccgccttggacccgatttcgaccttggctgtcgaggatctgatcaacgagctcaagagcgactacaccatcgtgatcgtgacccacaacatgcagcaggccgcccgtatcgccgactacaccgccttcttcaacctgaaggcagtgggccagcccggtcacctcgagtacttcgcggacaccatcacgatgttcaacaacccgcaaaacgaagaagccgagcgctacatctctggaaggttcggctgatcgtttcctgcgcgcggcgtaatgatttgtgcgtaggagaaacggcaaagcccgccgcaaggcgggctttcgcatattcaacgcgagtattgccgagtattatcgttctcgcaacggagcgagctggaatactttgtcggactgggcggcgacttcccgcttcggtcgatcgacgggagaacggcgggtaaagcggtacaagacaagtccgcacgatgaatactctgtgatgaatcttctgtttacggtgcgagtgtggaagaatggtcacagcaaggtccagcaaaggagcataggtgagtactggtctgatcgtcggcattgtcgttgtcgttattatcgttgttttgattggttggggcgtcagcgcctataacaacctggtgacgctgaagaaccgtgtgaagaacggttgggcgcaaatcgacgtgcagttgaagcagcgcgccgacctcatcccgaacctggtgaataccgtcaaggggtacgcatcccacgagtctgaagtcttcactcaggtgaccgccgcccgcgccggcgtagtggctgcggccagcaacccgagcacgaccactgctcagcgcgccgccgccgaaaaccagctgtcccgcgccctgttcaacctgcaagccacggctgaggcatatccgcagctgcaagccaaccagaacttcatggatctgcagaaccagctcaaggaactggagaacaagatcgcctacgcccgtcagttctacaacgacgtggtcctgaagctcaacaccgccatcgaaaccgtgccgacgaacatcatcgccggtctgttccactttgagcaggcgcaatacttcgaggccgatgacgcttcccgtcaggtgccacaggtccagttctgacccgcttcaggcccgtccggtaagccgccggccgggcccgtattgtcttaagagagggaagatatgcggatacgattcattcgcgccggaatcatcagcattgttgccacggtggtgttggcagttatcaccttggcgataatcgggacttccgcgttcggcgattcggccgacctcagctaccgcacgctggactatgacgtgaccgccaccgcgaacggtgatttgaaggtcacgcagcatatcgacgtcaagatgcgtgaacgtaccgacagtgacgacaacaccaagccgtggaagcagctgttccagcaatacacgctgaactccggcaccttgactgatatcagcgatatcagcgtgcgcaacgtcaccgacggcatcgactacgcacaacagagcgagcccaagctgcccagtgacgtctcttccgacaaggaatggaacagcgactacgccaaccattggtatgtcgccgatgtgagcgatggcagcgaccatccaaaggcatacacgcccggtaccgatggcctcaagcccagcgcctccgccaccgaagatgacacaaccgtggagatcggctggaatattccggtcaccaccgaggccgacagcatgaagttcgatgtaagcttcaccatgcacgatgtggccaccaaatggaaagacgtggcctccttccaatgggagccgttcggcaagaagaaccaagtgcctatcggcacggtcaccggcaccgtccatttccccaacggcatcaccggcaaaacctcatggacatggctgcacaccgagcgcacctcggaaaccaagcgcaacagcgacggcagctacacgttcacggcctacaacatccacaatggcgactacctcgatgtggtcgcggcgttcgatgccgccaaagccaagggcatcgcccgcaagggaaccggcaatcatctcaaggacctgaaacaggacgaatataagcaacagcagcgctggctcgacaagcaacgattcgctgccagagctcgtctcgtgttctggattgtcagcatcgtgctcggcatcgcgttgtgcgcgtggggtatctgggctgtgatctccagcaaccggcgtgcgcaatacagtggcagcgtcgaatactggcgcgaccagcccggcatcagtccggcttccgcagcccgtctgattcgcgtggtcgatccgtcgacgcgccaatccgatgaagaccgccagctgaccgccaccatgctgtcgctcgccgtcaagaaggccatcgccatttatccggggccgtcggacatgtatcgcggcatcgacatgagccaggccacgccggtgggcttgagccaaatgattgccgccgaccaaggcaagcagtatgcggcaggcatcaccagcaccatcgtgattctgccgctcgccattgatgaggcacccaacgcgcaacagttgggattgagcgaatcggaagatgcgctgctgaacctgctcatcgtcatttctcagcgcgtgggcagcccggtattcgacctgaaccagatgaaggcgacctgccagaactggcaagacggctatattgagctcggcaaattcaccggtgcatgcagcatggaataccagcggctgggtgccacgcgctctgtgggctggcaatggatcctacccggcgtattggccgccgtgctgggatttggttcgctgctggtcaacagctttatcggatacccggtggctggtcttatcgggctgccgatattcctggtcggactgttctgctcgatggccggcgcgatgaccgtgctcactgatcaagggcaggatatcgccggccggactctgggccttaagcgttatatggaagacttctccaacttcaccgaccggggtaccgccgatttggccttgtgggattggtatatggtctacgccgccgcgtttggcatttccgatcgcgtgatgcgtgaactggccaaagcatatcctcaggtcaacgacccggcttggctggatgccaacgcctccaactcgttgttctactggaactaccgcccgtatggctggtacagccaccgtcataatggtccattcgaccacgatgctgccgggcagatggacctaggcgttggcggcccagctccggcttacggaggcacgtcgtttgccggcggattctccgacctcggctcgcagctgaactccggtctggcggacatcagctcgaccatcagcgcggcagcaccatccgccgattccggtggcgatttctccagcttcggttcgggcggcggctccggtttcggcggctcgttcggtggctcaggtggcggctcgttcggcgggcggtagcgcatgcctatgtcgaaacgcattgttcgtgccctgggcttaagccttgtcggtgcgctgattcttgccgcactctgtgccggtgccttgattctcggcacagatggtgccgacctgagctaccgcacgcttgattacgatgtgaccgccaccgccgacggcgatcttaaagcacggagcatatcgatatcaagttgcgcaaacgcaaggatgacgatggcaagaccaaaccgtggagatcggctggaatattcccaccaccgtaaaaaccaacagcatcaagttcacggtgagcttcaccatgcatgacgtggccaccaagtggaaggacgtggcgaccttccaatgggagccattcggtgagaacaatcaggtgccgattggtacggtcaccggcacggtgcatttccccaaaggtgtgaccgcgagcaactcgtggacttggctgcacactgaacaaacctcggaaaccggccgaaccaaggatggcagcttcaccttcaccgtaaatgatgtgaaaagcggcgagtacctagacgtggtggccgctttcgacgcggccaaggcgggagatatggctcgtgtcgagaccgacgatcatctgcaggagttgaaggaagacgaagccgacgacgaacggttctggcgcaatctggaacgccaacgcgccacaaggcgcctgaacaactggatgaccaccatatcggccggcctgatattcgggattattggtgttgttgcagccttacgctcctccggacgttcacgttaccgtggctccatcgaatattggcgcgatcgccccgagctgagccccgcatcggcggccaaactcatcgatatcgtgacttccggcgacaaacccgacatttccgagcgccaactcgtcgcgaccttgctttctctggccgtgaagaaagtcattgctgtgttccccggttcggcggacctgtatatcggcgtggatctgaaacaagtttctccggtggagctcagtcagcgaatcgggtccgatccatacaagcgcaataatgcgcgtaccaatagcacgattgtgatgctgtggcagtccgattacggcgtatctgagggatttgatgaatcagtattcgtcgaatccgtatttgatggatctggatctggcggatctggatctgccgcatctagcgtgtccgatgcacaccagcccgatctcagtgcttctgagcgggcattgctctatctgctcaccgtgatttccgagcgcgtaggtcgtacggcatttggcatggatgacatcaaagacgcctgcaaggattggaaagacggctacaaggaactcgaaaagttcaccaatgcgtgcaagaccgaattcgcggcggcggatatcgcgccgaaaaccgagaacggatggctcattcccggggcaatcaccgtgctgatcggtggcgccagcatattcatcaacggtttggccggatatctggtggccggggccctcatcggcattcccctgatgacggtcggcatattctgcttcctgatggggaattcctacgtgctgaccgatcatggtcagcagatggccgggcaatgcttgggtctcaaacgatatatgcaaggcttctcgaacttcaagtaccgtggagtcgcggatttgacgctgtgggattggtatatggtctacgctgccgcatttggcatatccgaccgggtgatgcgggagctggccatggcctatccgcaagtatccgatccggaatggcttgatgccaatgcctccgacacggtgttctattggaattatcgtccgtacgactggtatgggttgcgtttctacaatggctcggcgttcgcggattccgtggctgacagcggattggccggagcggtgccagcgttcgggggcacgtcgttcgcggctgggttctctgacctcggcacgcaattgtcgtacggatttgcggatatcaccgcgacaatcaatgcggcctcgccatccggtggctcaggcggctttggcggtagcagcggcggttccggcggcggttcgttcggcgggcggtaagcggtgtgcttctgaaagtccctatagctttgaaagtaaaaggtccggtgtcataagacatcgggcctttctctcaaaatcgaggtgaggagacctcaacagtcaggtccaacggggcgaaagtctgtggcgccgccgagaagattgcctcgaagctagcgtgacctttctgctacaacacagcataccagcctccaccgaagctcaccagtacactggactgaccaaaccaaggtctactagcgtgccactttggcgcggtgtcgttgtgtcaaccggcataatgacgtctcaaaattcaagaggaggttctcatggtaggcaacgaccatgacaaccgtccgagacaagaccggcaataccgggaaggtctgatgaccggcctgttgatcgccctggccaatcaagttggacaggggcggtcgacggccatcatcattgccgcactggtattgctgggaatgagtctcagacgaggccactgatctatcagcggaacagccggaatccatggggttccggcccctcgttttcgctgaactgggtatgagtaagttgcgttttctattccgtgaagttgcggaaatttcatagattgattgtgcgggcaggccgagagtgtgaaatccaacgggatgcttaggcttgattgcggatatcgagtttccataagtttcacgaagggaatcaccatggcattgttccgtaacctcggaccgttctccaccaccgccatcggccacggcgaaatgccgctgaccatcgaaaacaaccgcggccatgaggtcggcatcgaaaccctgcatgcctcgctggacgccggctgccgccacatcgacaccgcttgggcctactactgctccggcggcgaggagcagaccggtgaaaagctggtgcgcgaggcccttgagacctggaaggggccgaaggacgaggtgctggtggccaccaaggtgggccacttccgcaacttcaccgacggccgccccacgtgggatgtggacggtcgcccggagaacctgattcggcgcggcaaggagagcgcactggcgctcggcgtggacaccatcgacctgctgtacttccaccgcccggacccgaaggtgccgtacaacgagtccgtcgaagccatcaagcagctggtggacgagggcgtggcgcaggaggccggtatctccaacgcctccatcgagcaaatcgacattgcgcgcggcattctgggcgacaagctcgtggccgtgcagaaccagtactcgccgattcacctggagacccaggacacgctcgactactgcgccaaggtcggtctggccttcgtgtgctggagcccgctcggcggctaccgtcacccctatgatgagaccaagttcgacccgttccgcgaggtcgcggcggcccacggcgtgagctaccagcaggtcgtgctggcatgggagctcgccaagggcgaccacatgttcgtgattcccggcgcccaccaccccgagaccatccttgactccctcaaggccgaccggctcgagctcacccccgaagagctcgccaagctcggctgattgcccattccccatcctcccgaatttgtgccgctgacgttggcttaacgtcacaaattcgggaggattgattcgtcttgaaggaaccgccatgcgcaaaaaactcatcctcgacctcgataccggcatcgatgacgcgctcgccatcgcatatgccctaggcagtgccgacgagatcgatctgatcggtatcacggccacctacggcaatgtcgcggtgccgctggccgcgcgcaacgcgctggcggtggtgcacttgttcggccgtgacgacgttccggtctatcccggagtcgaccatcccatcgccccggcagcattgccgaaaatgcgtggcaccacaccagacgagcggacccaggcctacgcgcgctggcagaacggcggcgcggacggctggcaaacggacgcttcgtgggcaccaactctcggctcggtggcggtccaccatcccaacggcatcggcggcgcaatcatccccgactccccgcgcgctccggaagcaccaggctcggcggtcgatttcatcatcgccgccgcgcgcgaatacggcccggacctgaccatcgtacctacgggcgcgatgaccaccatggccaccgtattccgcaacgctccggacctgaaggattccggcgtgaacgtgacgttgatgggcggtgcgttgacgctgcccggcaatgtaagcccggccgccgaagcgaacatctcccaagacccagagtcagcagactatctgttcaagtgtggcgcacgcaccaccatgatcggcctcgacgtgacccaccagaccgcgctcacccgtgagaaagcccatgaatgggcgtctctggggacgccggccggcgacttcctcgtcaccatgaccgactactacatcgacttctacctgaagaaccagccggagattcgcggatgtggactgcacgacccgctggccgtggccgccgcgctcgacccatcattggtcaccacgttcggcttcaacttacaggtcgatctcgagggcccgttccgtggccgcaccattggtgatcgttcacggctccaggaccccgacaaacacacccaagtcgcattgggcgtcaacgtgccggaattcttcgaccgtttcatgacccgcgtcaccgccgccgcgcgcgggtgaacgattacgcttcggcagggaatagggttctgcgtcaagtgcgtctgcgactcgcatgatggtgttgaacgagggctgcgaattcgggcgaagcgccttatataaggattcgcggccgaggccggattttcgggccacattggtcatgcctcgtgcgcgtgcgaccacaccgaacgcatcttgcacaaatgcgggatcatcctcttcgagtgcgccattgagatatgcgatggcatcctcgtccgaattgatgtatgagaatcaccaaaactcaaccacctatttcacatacccgaaaaaacagaaaaagaatcagatggtcgctggattttccctgctcttttcgatctgacgtttgagatattcgcccagcccatccacgcaccaaagtgggatgttcgtcagccaagattgcttcctatagcctatttctcctatacggataccgtggagcccgtatctgttgcagacatacgagagacttctcgcacgaatattggaagaggacttcacttcgatgggaaaaacctcgtctccctgttccattacgaaatctatttccgcatttccttgaggatttgggttagcccaatagcggggtctgattccttgagctaccagctgctgacatacgtattgttctacgaacgcgcccttgaattcggaaaagagcttcgacttgttcaccagagtattcacgtcgagaccggacagtgcgcccagtatgcccgtgtcttccagatagatcttgaacgtgttaagactctcatatccgggcagaggaatatgcagagcatcgaggcgggggactttggtaatgatcccgtagtccgtcagccaagtgagcgcttcctcatattcgcgggcgcgggctccttgcctgacaacaccgtaaacgaatttgcggttctccttggcgagttgtgatggcagtgtgttccatacaagccggatacgctcgcccagcgtatatgcggcatgcttggaaaaatcaagatcgtaggcgttgagaatatcttgttggacagttcgcacatcctgcggaatcccgttatccaggtgagcgcttaatgctgctggcatgccgccgacccacatatatgttttgagtaggtcattcatctgaggttcgagagcttgtggaatgtcctcgaaccggccttcacgtatggtgtcggcgatcatgtcttgtccgatgctgtccagatactcggcgaaggagagcggatgtaggttcatcatggtgacttttcctacaggaaaagaggttttgccgtgcttggatattcccatgtaggagccggtggcgatgatgtcatagtcaggtgcctgctcggtgaagtatttgagagaggtcaacgcgagcggactttcctgtatctcgtcaaagaagagcagtgttctgccggggagtatccgttgattggcggcgagttcgagctgacggattattcgttgcgggtcaagatcctgctcgaatatcccggatagggatggccgctgcatgaaatcaaccgagacgatgttgtcgtattgtccattcgcgaactcgttgacaagccatgtcttgcctgtctgccgtgcgccacggatcaggagaggcttatggtcaggtgtggtcttccactgcttgagcgttttcagtgcttttcgctggagcctcatgacgaatatcctatgataaatgtgcgatgcttacacatttatcatatcataaatgtgtaagcatcgcacattttttatagtttattgcagtcgcagtagttttagcgcaacggataccagctgatcggtacgggtcttgatcgcttcggcatcctatttggttatctgtgaggctcagccatcttacgcggtataaacgttaaggagcaatcaaagggcggtctttctgagactaatctcagaaagaccgccctttgcgatggaataaattgagtgtggaactcggtattggtttgaaagactgtttacagcccgggaatcagaccgccgggcggatcgagcgtgaggtattgctcctccagatcgatgtcggggaccaaggcctccacgaacgggaccaatgcggtcttttcgaccacatcctcgcccttggaattctggccggttaccaccggctcggtcaaacgaatcttgagcagggactgagcgggggagtcgaccacatccaccactttgccgaccacttggccggcgggcagtcccagaccgttgccctcgactagacgggcctcaaggccaataagatccttgggataccattcgtcggcttcgagcatatcttctgcgtcgtcggcctcgccgtagagttcgacaccgtttagggcctcggcggcattgcggtcgtcgacgccctcaagcttgagaatccaacgatccttgaacgtgcgcgagccctcgacgatgtactcggtctcgccatcctggctgtagagcacggagtccggctcgaagcgccactcgggatcatcggtgtacaggcgcacggtgacttcgcccttcaggccctgtgcgcggccaatacgagcgaccctcagcaactcgagctgctgagggtcgtcgtgcatgtcttgctgtgccatgctgtgaatcgttccttatcggttatcgacggacgtccatgatgtcaacgcggaccttgtggtcagacagtgcctggatcacggtgcgaatcgcgttggcggtgcggccgccacggccgatcacacggccgatgtcttccgggttcacgcgtacgcgaagcagttcgccgcgcgcgttctcatgggacttgacggaaacatcgtcgggaaaatcaacgatgttcttgatgaggtgttccacagcctgtgcgagcatagctagcctttcgtttccgctcaggcctcggccggagcttcttcggcggcctcttcagccggggcttcctcagcggcggcagcggcttcggcttcagccttggccttggcggcagcttcggccttggcggccttcagcttctgggcctggttctcaacggccgcgatgcgggcctcggcgtccgggccggcctcaacggtcttcagggtgccttcggcaccttcaaggcccttgtgcttctgccagtcgccggtgatgttcagcagcttgaagacgggttcggacggctgagcgccgacgccgagccagtactgagcgcggtcagacttgatctggatggtcgagggctgggtgttggggttgtaggtaccgatctcctcgatgaccttgccgtcacgcttcttgcgggaatcgacgaccaccacacggtagaaggcgtagaacttcttgccctgtcgcttcagacgaatcttggttgccaaaatggctctccttgtaatgctaggtgtgcgggttctcggtttgccatgtggggcatggccggccggaatccacgtgtcctcgcggctcggggtgtagagggcgccacgcgcgcgcgaataaccgtactagtgtaacgcggaagccggatattgcgcatcggtccggtcgtgacgcacggaatcgccggacggacggcgtgtcggcggcgcacctaccgtcttcatgactgatagcctgattgatggcagtgcgagacgggaaagggggcgctgatcgatgggtgagtgcgtgatcggccctggtgcccgggcgcgtgtggatgcggatgacggattcttcttcggcatgggggccttcgagaccatcgcggtatccggcggcgcgcccttgttgttggacgaccatctgacgcgtttgggtgagacgttgcgatacctcggcatcgaggcgcgtcgcgccgatctggagacgatggttctccgcgcatgcgccggactcggcgcatcggacgattcggccctcaagctcacggtcaccgagcgcaaccgcgtcgtctcgttgagacgcaacccgtatgccgcgccgggggcgaagcgcgtcttccgctgcgacttcgccgatgtgcgcaggaacgaatcctccccactcgcgcgcatgaagacgctggcgtatgccgaaaacatcatggagaagcgtcgcgcccgtgaccgcgccgtcgacgagccgttgttcctcaatacgcggggcgaggtcgccgaaggggccgtctccaatatcttcgccgtcatcgggggagacgtcgtgacgcctcccgtctcctgcggtctgctgcccggggtcatgcgccatgccgtgatcgggttcacgggggccgtcgaacgcccgatcatgcccgacgagctgcttcgggccgacgaggtgttcctcaccaactccctgatgggtgccatgcccgtggccggtatcggcggcgtggaattcgaaccggggagcgtgtcgcgcgacgtgaacgacgcctatgcccgcatggtggcgcggacgcgggcccgggcgcagacgcaggcgcgggcccgggcgcaggagaaggagtcccggtgagcgcgcaggtgttcaagctcaggacgttccgaccgcttgccgacatcgtggagtgcgtgcgcggcgaggaacgcttcgcgttcctggactcctcgatgccgggggcgcaggggcgctactcgatcctgggactcttcccctatcttgtgatcgaacacgggcggggcggatgcctcgtcgacggcgttgccgtggagggtgatttcttcgatgtcgtgaagaagcggcttggaccctgcgatggcgcgcgcgatccgcgtctgcccctcacgggaggcgcgatcgggtatctgggatacgatttcggccgcgaatcgtgcggcgtgccgaccaggcacgatcccgtcgcggccacaccggaggcgagcatggtcttctacgacctgctactcatcgaggacgtccggtcgcggtcgttgttctgttgctgccaggggcggacgatgacggccgcccacgccctgacatgggcgcaggacc

SEQ ID NO: 2335 - DNA, 13523 bp, Unknown
  R119_18m  MAG No. k141_52613
ggagtcgcacataatgtgtggctcccctttgctatgcctgccaaatccccatggggcggtgattaccccatggggcggtaaaactctcatggggcggtaaaaccctcatggggcggtaaaactctcatggggcggtaaaactctcatggggcggtaaaactctcatggggcggtatgccagaatggcttaattccgcggtttcacatatctttcaaaccgccccatgggcaagttaccgccctatgggtgttttgccgccccatggatacgccggtgtaccgcccagaagcaacaaaaaaacggcgtccagccgtagccggatcgccgctttcgggcatcctcctcaaaccataggaggacaagtgttcagttattcgcccaatgtgaggacaagccccaatcagtcgatgtcggtgccctcgtcgcgggtcggctccttggtggggtcgaagccggagacgatgtacaccacacggcgggcggcggacacggcatgatcgccgagacgctccaggaagcggcccagcagcacgatatccacggtctgctgacgggtgatgtcatcggacagcgccagatcgaaggtctggtggtgcaggttgtccagcttgtcgtcggccaggatgatggcctcggcggtcttggcatcgcgatcggagagcatggccaccagctggtcagcggtgttgtccaggaagtcgatcatctcggcgaacaccggctgagcggattcgggaatcgcggcggccgggtaggtgcggcgagcggcctcggccacgtggcgggcaagatcgcccatacgctcgaacgtggaagccagacgcatggtggaaacgaccacacgcagatcggtggccaccgggttctgcttggcgagcagcttgacgcactggtcgatcacagaggactccagggcatcaatctcgatgtcgccgtcaatcacagtctgtgcggcttcaacgtcctgattcagcagggcttctccagcgcctttgatcgccttgcgcacgttctgcgccatacggtcgaggtcgtcagcaacctgcttcagctcctcgttgaaaataacgcgcatttctctagcctttcatgcttgcttattgcaacctgtaccagtgtattattccagtacttgttccccacttcaacgtaggtaatggcaacctcaagttgttctactgttcattgggttgttcacctgaaattcatgttaccggcgcgccggcaaaccgcaatcccggcgtgtggtgtgaaagaatgggggcatgacacagatgccgctcgtcgccgcgattgctcttattgtcgcggctgttttatttgtggtaggaatcatcacgctcatcgtgggatttgcgacacatcgagtgtctgtggaatcgccgctggccgatgatgacgacaatgacgatctgtccgacgacaccgccacgctgctgtccatgctgccgggtgcgtccgtggtggtcgacgagcacgacgaggtggtccgctgcaatcccgccgcctaccgcctgggtgtggtgtcagatgacgccatcgcccagcagcaggtgctggatgccattcacgaggcgcgcaagtctggtggcaagcgccagttcgacttgaccaccgatactccggagcggtacgtcgcagaccagaacaagggcgatcacgtcgccacgcagtccgtccaccgccccaactggctgaaggtgactgtagggcgtatcaacgagcagttcgtcatcgtgttgattaccgatgtcagtgacgtgattcgtttcgctcaagtgcgtgactcgtttattaccaatgtatccgagcaattgttgggccccactgaagctctggccaaactcgccgattcgctggagtccggcaatctggacgaacagcaggtggctgccgatgctcgccgggtgcgttccagctgcagcaagctcaaccatatggtgtccgatttgctgctgctcatacgcgcacaggagccgattacgccgtcttccgccaaccgactgaacgttatggaacagctcgaggccacggtggcgcgactggagccgcaggcggccgcggctggcgtgcagctgaacatcaagggcgacgatgatctagtcatcaatggtgaggcggatcagatcgacagcgccgtgaccaagctcatcgaaaacgccatcggctattccaaggaaaatggtgtggtcagtgtgtccgcatccaaagacaaggatggcgaccgtgcggtgattcgcgtgatcgaccagggcgcgggtatcgcgaagaaggaccaggcgcgcatcttcgagcggttctaccggggtgcggaacagagcaatcgcacggcggatggcgtgggccttggcttggccatcgtcaagcatgtggcgctaacccatcatggcgatgtgaccgtatggagcgcgcccgggcaaggcagtacgttcagcctgacgttgccgttggcgcagtgaactttattactgtccgaggcggcggtagtcccagcggtcgaagtattcccaaatcagcagtagcaagccaataatgacaccggccacgcacataatcaccaacggcattacgctgtagcccacggccagcagaatcagcacgacaatcaacgccacaatccatagaccggtaccgatggcaaacaccttacgcaggtccacccgtacgggcttgggcgcgggtttgcggacggcagggtcaatgagaggcgcgaacttcatactcatgcactgtagtaagagtagggaggggcgtcaaacacctctccctacgatttattcaatcggtatcagttgagaccgatcaatgtgcatggcatatatggtcggccatgcgaggcatagaccgccatcacaggtgctcgaccacatagtcgacgcacttggtgaaggccatgacatcagccggttccaccgaggggaacacgccaacgcgcagctggttgcggcccagcttgcggtagccggcggcgtccacgatgccgttctctcgcaggatggacagtatctgggaggcctggacgcgctcgtccagatcaatggtgaccacggcgttcgagcgggcgtccgcatcgacgacgaacggagcggcgtattcggagcgctcggcccacgagtacaggatggatgcggacttggcgcaacgcgtggtggcccaggcgaggccgccgttgctgttgagccagcgaatctggttttccatcatgatcagggtggccacggcgggcgtattcagggtctgatccttgcgggagttgttcagtgccgtggtcagcgagaggaacggcggcacccagcgatgtgcgccttccagatgagcgcttgattcgacgcatgccgcacgatcgatggcttcgggggagaggatggcgacccacagaccgccatcggcaccgaaggccttctgcggtgagaagtagtagacgtcggtctggctgatgtccacgggcaaagcgccggctgcgctggtgccgtcgatgacggtcagggcaccggcttcacgactgccgggcacgcggcgaatcggggcggccacgccagtggaggtctcgttgtgagcccagcaatatgtgtccacgcccttggtgagctcaggcagacggtaagtgcccggctcgccggggaacagcaccgggtcttcaaggaagggtgcgttcgcggcggacgcggcgaacttggcactgaacgagccatacgtgccgaatgcggcgcgacgggggatcagcgaagcgcaggcaatctcccagaacgcgctggcgccaccgttgccaagcgccacctcatacccttcaggcaggtggaagaactcgcgcagaccttcacgaatcgaagcgaccagttgcttgactggtgcctggcgatgtgatgtgccaagcagggtggtggcgccggcatcgagcgcggcgatctgttcggggcggattttgctggggccggagccgaagcgaccatcttcgggcttcagcgactcgggaatactcagtgtgatagtcatggtttcaagggtagaccagtgttggggaatatcgcggataatgctcggtgtgcgggattgctgcggggctactgcggaattccggggtgccgggcggtagtagcggcaatgcggaatgcagtgcagaatgtacgcagcacatcatggctacggtgtgtcggaatgacatgagttagtgattcttccgataaccggatagtgaggttcgtgaacgggcggaaacaaggcagtttttcaccctgccgcacggttacgtaaatcgtttgacatgcccggatggtgggggatcgcattgaggattgacctctgttcgttgtacagtactcaattgtgccggtcatacggggtcgttgaaaggaccccgccgaacccatccaaggagttaacgtagtatgaagcatgcttcgcataaagcgaccgcggtctcgcgccagaagttcagcttagcgaaggcattgtttgcctccggcaagggttctcattccgttcgtgccgtgcgcgcggtgcaatccgctggcagcgacgccgttgttttggggcttgatccggccattgccgagaagatcaatgaaatcgctccccagactcgtcgttccattcgtgaggccgctcgtgccgctgaacgccgtagccatattcttgcctcggcctcactggccgctctggtcggcacggccgcaggtgctctcgcattttccaacaataaagacgccacgaactcgttcgtggctgatccggccacgacgaccacgcagattaagcgcatcagcgatgtgactgcggcttctcgttccgaagcacgtactgatctgagttcgtcctccgttaccgcacagtccaccaatgaaggcggttgggggctgagcaattcagacagcaccttggacgccaagctgatgaatcgcaataatgcgaacaatcctgtggtgtcggctctcatggatgccgatggcgatgctgtgccggctggcttcaacccgaaccatgccgttggcaccaactccaacaactatccgtggggtcagtgcacgtggtacgcgtaccagcgtcgtgccgaactgggactgccttccagcggcaacttcggcaatggtggcgagtgggcggcgtcagcttccgctctgggctattgggtggacaacactcctcgccatgtcggtgatgctgtggtgttcgctcctggccaggccaatgccgatggcacatacggccatgttgccgttctggaaaagatcaatgccgacggctccattgagatctccgaatccaatgccaagggattgggtgtgatttcgacccgtacgttcagcgccgccgaagccggtaagttccagtacgtccactactgattcatttcattggcttacattcggtgattactgttcggatgtgacgtcgccctatcggcaatcgttcgcgcgaaatgacatttcaagtgttgcgaccgcgtattagtccgaactgacctgtgccgacacgccgatatatcccaatagctccggggtgttttatttcttccatcctgtacgagttaatgcgcaccgtgtaaggtgatggttctatgaagaccaaaactgtagcttcttccattgttgccgcgattgtctcctgtgcttgctcgtttatgtttgttcctacagcgactgcagctgagggtgttactgtgacttccaccaagtccttcccctcgtacactcaggtgcataaagatctgacgactgaagccactgccacgaatgttgaggacaatgctgattggggcggcattgagaacctcgatgtgccgcagacggaatctcaggcggaaaaggatgccgcagcggccaagaaggttgccgaagaggaggccaagaagcaggcggaggccgaggctcaggcgactcgggatcaggccaacgccgcgagccgtaatgagtctcgctcttctgttacttattccgatgccagtggttcggtttccgctggtgccggtgcctctatcgaccgtgcgtattctttgatcggacagagcatggactgcaccgcattggtcagtcaagcgttggcggcccgtggcattaacttccacggttggcctgaagagtacgtcaatgttcctggtggccacgtagttacagacgggtccctgcagccgggcgatattctgatttacgccaacaccggtggatggaacgggggtgcacactacgatcatgtggcgttgtatgtcggcaacggtcaggcggtccatggtggatggaatggccatagcgtggctctcgctagtgccatgaccgaaaagctcaccatcgtggtgcgtatcccgtgatgcagtcctattgattgatatattgcaggcctcggatgccaatcggtacccgaggcctgttgcgttctcctgccgagtgatacacccgcgacatcatcttcgaaatgatattcctgttataaaatcgacccatgtgtgctaaggtaaggcgctgatgacgaacgttaagaatattatttccacatcagtggcggttatcgccacgggtgccatgtttgcatgcgtagccccgtttgcctctgccgattccgcacagacgagtgctgtggtgtcctcacgttctttcccgaaggcgagttcggtgaagaagaatctgttcgccgaatccacctccacttcggttgacgagaactctaaatggggtggcattgagactcttgatgtgccacagaccgagtctcaggccgagaaggaagctgctgctgcggcggcggctcagaaagccgctgatgaagctgcggcagcccagtccgctgctgctgcggcagccagccgctctgaacagcgtgcgtcgattccacaggttgacttgggtaagatgactggcactggcgctgagcttgccagcttctcactgaagttccaaggctatccgtatgttgccggcggcaacactccggcaggatgggattgctccggttttgtacagtacgtcttctcccagtttggcatttccctgccgcgaacctctggtgctcaagccactgtgggtactccggtcgcaagcttggcggatgccaagccgggtgacattcttgcgaatggtactcatgcggccatttacatcggtaacggacaggtgatgaatgctatgaacccggtgcagggaacggcaataagcaacgtttccgtgttcggtggagctggatattccattcgccgcgtgatgtaacaagaattatgcggtaagcgaattcgtattaaggcacgtcctttgggatgtgcctttttcgtatacgcggatttctttttgagcggaggataccggccaaaccgagtgtcgcggggtattgttggaggtacgtggtattcgtgccacaataacttcaaggaggtcgtcatgattaacgacaaggccattctcgtcggcgttgacgggtcgcatgccagttacaaggcaacatggtgggccgcgaattatgcaaagcacgcggggctgacgctgcagattgtctgcgcatattccctgccgagctatgccgccgtttcgttcgatgcaacttacacggcgatgggggacgataacgccgcgcattccgatgctcaggagattctggccaaggccaaggccatcgcagacgagcagggcgtcgaagccgccacactgattgttaccggagacccggcatcggtgttcgtcgaattgtcgcgtaactacaatctgatcgtcattggtaaccgtggcaagggcggtctggccgagcgtctgctgggcaccacgtcctcgtcgctgccggcatacgcctactgcccgattgtagtggtgccgtacaccgatgatgacggcaacctgatgcacctgaacaacacgattaccaaggtggccgtaggctccgacgaatccaagtggggtctgaaggcgctggacattgccgccgacttcgccacgtgctggggtgcggaactggacgtgatttccgctgtgccgaacctgaagggcgtggatggcgaggatgccatcatggagtcctacaaggacgatcttgaggtgcgtatcaagccgttgcaggaatcgcatcctgatctgaaaatcaacaagcagatcgtttccggcccggccgtcagcgcactgaccaaggccagctacgatcacgatgttgttgttgtcggctcccgtggtcgcggcggcttcaccggtctgctgctgggctccaccagccagggactgctgcagcatgcggccggcccggtgtacgtggtgccacgcaagtatgttgaggctgcggaatcgcgtctcgacaccgtgccgagctcgcccgccgaagtgcctaccaagtcgctggaggagattgccggcgtcgaggagattccggtgtccgcagccgagcctgaagtcgcccagcagatcgaaaagaccatcgatcccgacaggcagtaaagtccgggtatacaatgagctccctcatcagagggagctcaatttattagtacgtcggtttattagtacgtcagtgcttgacggtgacgttcatgcgcaccggggtctcctgtacgtaggtgtgcttgaccgtgcagcccttgtcgatatggcgggtgacgcgttccttgagcttgttggcatcctcctcggacaggctggcgtcagaagcatcaatcaccacctgctcctcgaaaccggtgtaggcgtcgttctcggggtcgtacgtgccatccaccacgatcttggcacccttgccctcacccagcgtatgttcgatggcgaactggctggacagcgcggcgcaaccggccagcgcgaccttcatcagatcgcccggcgtgaactggccacgatccttgccgaacttaatgtgcgcgccatcgtcgctgaacgcatcccacgaaccgtccttgttgcgttcaacccacagtcgcttacccatagctgctcctttattttcagccgccggcgatctggcccatcgccatgccagcgggggagcgcggcacctggccgctctcccgcatcatcggacttctctattatgcccctaagctacactggtgcacatggctttgaccgaagaacaactcgcagatattcgctcccgtatccccgcacgtcccgaaacggacattccgatgccctatgaggacctggtgcgcaagatcctgaccgaaggcacgctgaagtccgatcgcaccggcaccggcacgatttccctgttcggccagcagatgcgcttcgacctgtcgaagtacttcccgctgctgaccaccaagaccgtgttcttcaagggcctggcctacgagctgctgtggtttttgaagggttcctccaacatcaactggctgctggagcacaacgtgcatatttgggatgagtgggcggacgagaacggcgacctaggcccggtctatggcgtgcagtggcgttcctggcccgcaccgacccccgaggacccgaatcgcaccatcgaccagatctccaatgtgctcgacctcatcaagcatcatccggattcgcgccgcatgatcgtctccgcgtggaatccggccgaggtggagaagatggcgttgccgccctgccacgcgctcttccagttctacgtggccgacggcaagctaagctgccagctgtaccagcgttcctgcgacatgttcctcggcgtgccgttcaacatcgcttcctactcgctgctcaccatgatgatggcgcagcagaccgggctcaagccgggcgaattcgtctggaccggcggcgactgccacgtctacgacaaccacgtcgaccagttccttgagcagctgggccgcaagccctacccgtacccgaccatcgagattcgtaaggccgattccctgttcgactaccagtatgaggacttcaaggtcgtcggctaccagcatcaccccactattaaggcacctgttgcggtctgatgctgattaccatttcgtggacagcgaagactgtggaggtgacggaccccgagtcttcgctgtccactacactaaggcccagttccgcaatccaggaggagtaagcgaaatggagcatgacagtagccgtagcggctatcacgaacccgagcccggatctgccgggctgtctgccactgaagaagactggggtgacgattatcccaagaccttctcggtgaatcttatctgggccgaagcccgcgacaaggaaggtcgcgccggtgccatcggcctcaatggcggcatgccttggcactgtgccgaggatatgaagcatttcaaggagctgaccgtctcccatccggtgattatgggtcgtaagacttgggaatcgctgggggtcaagtaccggccgctgcccaaccgcgataacatcgtcgtttcccacgatccgatgtaccgtgcgccgggggccactgtggtcaccagtcttgacgacgcgctcgatatggcccgtcaggaggcgattccggacgacggtctggaccgttcggagatttggatcctcggcggcgcccagctgttcgccgaggcgttgccgttcgcggacaaagcctatgtgactgatctggccgtcactgtggatgccgacagctatgcgcccgatatggcgtcgctggtcgaggccgggatgtggcgggaagccgaagtgggtgagtggcgtacgcccgccaaggaggagtccggcatcgattcctatcgtttccgtatcttggtcaaaaccaagtaagcatgcgaatccggcttgtgtcctttatggcggcatgagccggattcatattcattcgaccccaaaaacacattcgggccgtgtgcggcccggtgaagcccgattgaggattgattcaaagctatgagcaatacccagccctacaccgtaatgaccgtctgcaccggcaatatctgccgttcgcctatgggcgagattattctgcgtcacttctttaatgagcgcggtctcggcgaccaggtgaacgtggaatccagcggtgtgtccgacgaggagtggagccatccgatcgacccgcgtgccgtgcgtgtgctacgcgaacgtggctatggtgatgagattccgcgtgaccacttcgcacaccgcatctcacgtgaggaaatcgaccgtaccgacctgttcctgccgatgaccgcctcccacatgcgcgccctactgcgcatgctgccgtccggcaagcgcgccgaagtgcacatgtaccgcagcttcgacccgaatctgcccaagccgaagcccggccgcgaagatcagatcgatctggtggacccgtggtacggcggcaagcacgagttcgaggtcgccatcgaccagattgaggaagtcgctccgtacatcgtcgattgggtggcgaagcagctgtaggaatcggcctgtggccgatgctgtgtgtttcgcagtcttacgaccgcgggtctctacctccgcttcgctgcgttcagcacctccctcacagagggaggtggtcgccgaaggcgaccggagggagagatcaacgaaggagaagccgagcccaacctcagaacaccagctgcaccagtagcatgtatacgatcatgccgccggcgattgaaagcagcatactgcgtttccagacgtgcagcagcacgatgacggtgcaggcgatgagttccggaaggccgtgtgaaccggtcagaatcggggtgttgcgcagtgcgtataccaccagcagaccggtcatcgcatagggcaggactcggccgaaatattcgatgacgcgcggcggctgcttggattcgggaaataccaggaacggcagaaaacgggtgcacatcgtccccagcgccaccgtcacgatggtgagcgcgccttgccagatggtcatcgtcatcgcgtctgtccttccttctgctggtccgctgcgtggctcatggcacggtctgccgtggcttccggggcgtcggcggccggccgcaacacatccagatgcgggcgcaacgcgacgaacagtatcagcatggcgatcattgagggaatcatgaaatcattggccccgaatatcagcaggcaggccagcgacgtcagcacaccgatgacggcggacagtcgctcgcgatgcttgccggcgagccactgatcgaggaagatcaccagaaacagcgcggtcagtacgaaatcaagaccgtcggtattgaacggcagatgcgcgccaatcagcccgcccagtgtggcgccggtcacccaatacagctggttgcacagcgtgacccagaagtagaaccagcttcggtcgataccggcggggattttcgcggtggagttgatggcaaaggtctcgtcgcacatgccgaaaatcaggtacggacgcttccagccgagccccttgaatttgccgagcatggatagtccataaaacaggtgacgggcgttgaccatcagggccagcagaaagccggcgagtgggttgaacgcggagagcagcagattcaccgtgacgaattccatcgaaccggcgaagatgaacgcgctcatgcacatcggccatacaaacgagaagcccttggtgcccatgagaatgccgtatgaggcgccgagaaacaggaatcccaggcaaatcggtatggtcagcggaaacgccgctttgagcgccggcaaccaggcgttggtgttggcggtgtctgccatgtggatgatgttctccttgtgcaactggtctgccggccgatattcgccgataatgccatatgtggttatacacgcatggtgccgataaacgaggtgaggacggtgtcgggactctgtgcgcgaagtcacagtgtggatgatgtcacatcgtctacggtgggacagtccttgtggcgggcgtgaacacgtgctgagatgaaagcatgagcacatatcaaggtaacgaaccatcgcaaatcgtctacaccgctacggcgcaggttacgggcggccgcaacggccacgccgtgagccatgagccggaactggagttcgacctggacacgccggtcgccatgggcggcaagggtcagggcacgaaccccgagcagctgttcgccatcggctggggcgcctgcttccaaggagcgttggcgcttgccgccaaggagcagcgcgtggcggccaccaagctggccaagagtcaggtgcgcgccagcatctcgctcggtcctgaaggcgagtccttcggcctgaagggcaagattgaggtagttctgcccgatcttgacgatgaggctgccgccaagctcgtcgagcgtacgcaggagctgtgcccctactccaaggccaccgcgggcaacgtgcccaccgaggtcgttgtggtgaagtcgctggactgaagccttccgggttgaaacccgagtccaagcattcggcccgtttccttcagggaagcgggccgaatgctttcaggcctggtcccgcgaatacgaaaagacctcggtcgctatgaccgaggtcttcaaagaagtacccccagagagggggatacgaaaggcaattgcctcaagagcaaacggcaaatccttcaaatgtatatttacttattatcaatctgaattttaggtatagcaacgattcccgcctccttccagtagacacgcgagcggtgttgctcctta

SEQ ID NO: 2336 - DNA, 11489 bp, Unknown
  R119_18m  MAG No. k141_53946
cacttcttcgtgtagatgtcgtaccacttctgccagatcttgatattatcctgcagaccgaggctattgagctgcttgcaatacgcatcccactcctcatcgataccacccttggacatccaggtagcagtcttctgcataacaacattagaaatctgtgcattattgttggtcagcgtattactgtccgtcggatcggggttcacgtagtccggaatgtagtccttgacggggtcgaagtggctgcgctgctcctcgtacggcttgcttgcctcaagcaggttgtcaccgtcgacgtcgcccttgatggtgacgccatcgggaatccagccggagaaacgatcggccaggcccgggaagaggttgtcgcccatcgccttggtgtacttatcttcgtccacggtgtagtggcggttgccgtcatcggtgactaggttgccgaaggagccgaggaactgctgcacggagtacttctcggagtagagcagattggccagcttcagcgcggcgtccttgttcgcggcgtgggaggacagggagaacctatcggcctcgaactcgacggaggagccgtcccacacggtcttgtccggggatacgcctggggcggacggcaccgggatggggatgtactgatccttgagcgttccgaagctcgcatcctgggaccatccgaacgacacgccggtcttcgcggtcttgccgtcgctgagctggtcggcatcgcacgcatcgaacgtcttggtggcccagtcggcggggatcaggccctcggagatgagcttgttgtagtacttgacgacctccttgtattcgtcggaggtcaggaagctcttgaccacgccgttcttgacgtagaagccggtcggggacgcgcccttgctgaagccggtgacgatgccggtggagttgagcagcagcatcgggctgtagtaggtgaagtagctgtcgagcttcctgatgttcatcgggatctcgtcggcctggccgttgccgttcggatcctgggtcttgaacgccttaagcacgttctccagctcgtcccacgtggtcggcacctgcagacccagcttgtcaagccaggtcttgttgatgaacatgtgctggcccgtaccggaataggacttgcctcgggacgaaggcagggcgtacatgtgaccttcgggatcggtggtgagcttctgcgcgtccggcttctccttgaagaactgcttgacgttcggcatcttgtcgagatccttgctcagatcctcgaacaggcccgggaactgcgcggcgtcggcggggaagaatgcgtggaggctgacgtccgcgatcttgcccgcagccagggtggcgttcttctgctgggcccaggcgtcctcgctgacctcctgccattcgatcttgcagtcgcagtcgacctcgaggtccttggcccactgcatgttggcgatcttgtccgtggccggcctcttcacgaccaggacgctcacgatcggcttgccgtcggcggtcgtggtcggctccttgtcgccgccacatgcagccagcgaacccagcaaggcgacggcgcacgtgacggcgcccgccttcagtacggttcttcttctcatcgtctctcctttgacatgatgatgtttgagcgcgcccgccccgtctgcgaggtggacgcatacaggataagtctcgggagatattttgtcaacgtccttaacatatatgagacatcgacactgtttcgctatgtctcagcacccttcctcgccagacggcggaaaaccgccgattccgtcgacgttcagctggccgttgagccagtcgagcgagatacgggtgtacataatgtgattatcatcaccttcatacagcaggccatagccgccgccggccttgtggctcaatgcggcgatcaccgaataggccatcggccccgtcgtgaaccgtcggccggcgctccaggtcttgccgtcatcgatcgagacgcgcaccagaccatcgatcctgtccgaaggcgacgaggaggaatacagcaggaccttggcctgcgccgatccttcgggggcatcggggaatgcgcgggcaatctgcgcgttgttctcgggatcgggcagctgcgtttcacgggtcaccggaccatacgtggcgccgccgtcccgagagatggcgacgtagcggcaaccgtttccatcggaggaacgcgagttcagcatcacgcggccatcggaaagctccacgaccttgttctcgtccatgtgatcgccgacgggggtgcccgcatgccaggtttcgccgtgatcgtcagagaaaaccgataccgcgcggtaacggccgtcaagctccttgatggtgtactgctggatcaggcgccccgcatgttcgccatacgtgagctggatgccggcaccggaagaagcgaaccgcgaaatccatgattcgctgttcgtgatgtcggcggtgatgatgcgcggcctgctccacgtcacgccattgtcgatggaactggtgacggcggcctgaagcaccgtacgcgcagaggggtcgacgcccgcctgggaggttccgaaaccggcgtcataggatttgacgaagaacaggaacacctcccccgtctgccggtccaccacataggacggatcggaatacccgtacttgtcgacgccatcatgcccggcggccacaacatgctgcggctcgaacgaccggccgccgtccttggagatacgctgcacgatcgaattggcctgcggggcatcctggcagttatggggccgcgcgtcgaatgccgcgaggatccagccgttaggcgcctcggcaagggccgggatccggtagcaggccacaccgtaatcgcctgaagccgccaaagtcatcgcttcgtcatggttcgcgccgcacacagtattgttcgtattcatcatcccgttttccgtcatattcgcttactcctgttcatcgcctgatgccgcccggcgtccacggacaatttccattcacggccaagcggcaccccggcgcattccgcaacattgcggtgtgccatcccgcggacctacatggattgggggaaggagaaggaccgcgggatggcacgtcatcatcactcggtggacgcatcgacctgttccaccgtgcgtgcaagctcgaaaccgcatgcgcgcaacacgttcgcaatggcttccacattgtcgccgcgcagcgccgacaccggttcgggcatctggttggtgtcgaacacgcccagcaacgccatcgcggtcttgaacgcacccacgccggaaccgaatccctggacgccggacggcgccaggacgatccgcatcaacgaggcgagcttgttctgctccttgcgcaccgaatcccaatcaccgttctggtaggcgttccacatcgcaacatagccatacggatccacattggccagaccaggcacgctgccgtccgcaccggccatgtacgcgccatcgacgacgacttcctgaccggtcagcaacgtcagcggatgaccgttctcctcgttgtccccaatcagaaaacggaacgccacatcatcgttcgacgagtctttcactccggccagcacaccatcgcgccccaagcggatcagtagatcattgggcagcttggtatgcacgcatacggggatgtcgtacgcgaacagcggcagctcaggcaccgcggcgtgaatcagacggaaatgcctctcgatctccgccacgcctcccaatgcgtagaacggcgccgtggccacgatggcggcggctcccatctcgcgagccgcacgagcatgctcgatcacgcgattggtctccgtgtcgatgcaccccgccaacaccggcactcgaccaccggcgatctcgatggccgcgaccagtatctcacgacgccgctcatccgtggagaacacgacttcgctcgaggatccgagaacgaaaagtccattgaccccggccgcaatcatgtggtcgatcgagcgcctgtagctctccacatcgagacgatgatccgcggtcaacggagtgacgaccgggggaatgaccccacgaaactgattcatactgtgaatctccttgttgtatttgtgcttgtctggtacgcgagacaacaccgcatccgctccgcatgagcgaaccgcacccaatcgttgatccgaattcctccagttcaacaattcgggtgcggctcacatctcggagtcgcaagcactgccttgcaacaggtccgcgctcacgacaccgtcacttcgtgtaggtgtcgtaccacttctgccagatcttggtactctcctgcaggccaatgctgtcgagctgcttgcagtaggcatcccattcctcgtcgatgccgccctgagacatccaagtagcagtcttctgcatagtggtattgaaaatctcggcattattagtgttcagcctcgtcgcatcggaagaatccatatcatccatattatagtccaccgtgcaaacgatgtggcccccgacttcctcgcaggaagtcgggggccacatcgtttgcacggcccttgtcagtccagcggatgcgccacgtggacgaagccgtctctgacggccaccttggccggttcatccgtgtcggtatggttttggatgatctacctgcggacaagccccttgaacggctcgtcgggagacagtcggacctgcgtcgcatcggcgccatcgacgatcagggtgaccgtcgcgggcttcgtgcagcgcagcgtgtattcgatggcgtcgtccgcccaggaggcgtccaccgaaagacctcccctggcgcgcagtccatggaagctgccttcatgccaatcctcgggcaacgcgggcaggatgcgcaccatgccgtcatgactctggacgagcatctccgccagagccgcggggaagcccagattgccgtcgatctggaacgggggatgcgcgcacatgccgctggcatacacgccgccaccaagcagatcggtttcggcgtcagcttcgaccgggcggaggaacatgcctatgatgcgttcggcgtgctccgcatcccgcagacgcgcccacatgatcatgcgccatacgatgctccagccggaaccatcgtcgccacgcacttcgagggacttcctggcagcctcctccagacgcggggtgttcgcggtgatgcccgctcccggatgcagttcgtacaggtgggacaggtgacggtgatgcggatccgcctcgacgagttcatcgttccattcgaggatcctgccatcggatcccacgcggacatccgccagcttctcgcgggtggattccacctctcgcaccacagctatgtcgctgtcgtccaaatcgggcatggcctgtgccgcatgaatcagatcatcaagcagattgcgcacgatggccgtcgtgttttcgctggtatgggcgacggcgatcgtttcgccgtccacgacgaaatagttctccggtgatgttgcaggggatggggccagtccatgctccgtatccgacaggaaatccatgcagaatcgcgcgttgtcccgcatgatcggccagatgcgggacaggtacgacgcatcctggttgaacaggtactcatcgaacaggttccggcacatccatgcctgaccgaacggccagaacgcccatgtcggttcgccgttcgccggcagcgccctgcgccatagatcgacattatggaagaccgccgaccctcggcaaccgagaatcctgtcagcggcgtcgtgccccggcactagcagctcctcattcatggagacgagcggctcgataagttcttggagggcacatggaccggtcatccaatagttcatctcgacgttaatattcgtcgtgtacgcgctataccagtttggaaagttcctatggttccaaattccctgcagattcgccggctgggtgtgtggcctggacgaggaaatcagcaggtacctgccgaaatcgaacatcgcctcggagagtatctccagacgatgcggcgtcttctccttggagcgaagaatatcggcgaacggcacttcctcatcgttgccatgggtcggaccgagacgcacgtcgaccctgtcgaagaactggcgatagtcggcgacatgacggtcgagcatcgcccggtaatcggacggccatgcagcgatggtctcacccaaccgattggcgagcaccgtcatatctcgctccggctgcttgtcgcttcccttgaacccgctcaggctgcggaatcgaagcgatagaccggtaatgcccgagcattgcaaagcatcatggtccaccgtaatgtcgccgcccgtgacagtgatgacgaaggcgccagcatacgccattccggtaccatcccgctcatcctcccacggatcatcagtggtatgggccaatactccgatgttaagtccgggcatccggcccatgacgatgagcgtggcttggtgcgcatcaacatcagaccctaacgacacctgtgtctgcttgagaaaagtgccggcgatgctcacacacacatcgatcggctcactcgacgacatctcatacaccagcagatcatcaggagcgctgcaccatgcgtcgacatggacgtcggcggcacccagctggaatgattcgccggccagggccttcgtaaggtccaagctgcgcttcacattcccacgttcgccgacattcgacgaatactggatgcgggccgtgccgaacggctcgtatatctgctcgtccttctctcgctgcgtggcgtcttggattatccgcgtggccgacacgtaatcgccgcgcgctgaagcctcacgggctttggccacgatttccggcgtcaacggcgaggtttccgcatgcggatagcccgaccagagggtgtcgtcgttgaggtacaacacgtccgctgccggctcggagcacaggaccgctcccatgcgaccgttgccgaatgggattccttcctcccaatgcgaggagaatccatcaaaagtgagtttcatggtgtgataccgccttatacgtccttagatacgcacggcagccgcacggctaaccatcggcgcaagccttgaaccgtccacgtgcagggtgaccgaggatacttcgacatcgtcaaagcggagtattctccggtagcccaccgtgccggcctggccgagcacacgctcggtaccgtcagacagcgtgcctgtgacacgcagctgttcgatacgctgaccatgctctatggcctcctcgattacgacggcgttgattgtcgtgggccgcgggaatgtgagcgtgatggcgggggcagcatcatcgtcatcagggcgccagaacgtgtcctggtccccgtcaacgagatgtgccgcggccgcggatgcgctactggtcttggcttcgcaacggacagaagccaacgcctcacggaatgcgccgatgcggcttcccaatcccttgagcgactgcacgtccggttcagcaagcagaccttccggcgagggaggaacgttgagtaggagcgacgagttgccaccaaccgcggaaagccacaaaccgaacagctgatcggagctcatgaccttatcgtcttcgtacttgtgatagaaccatccgggacgaatggaggtgtcgacctcggccgggtaccagcagacgttgtctccgcatccggcgaccgcctcacggcttccgaggtcatcgtcctgagagctgaccgtggtggcgaaggatgcgtcatcctcctgctgcgacttctccatggttagttccgccgaacgcaggcgacggggcacgacgctccattcgttgtcgcgcacatgtccggcttcgtttccggcccagcgcacgtcggggccgcacacggaaatcaccgcattgggctgaagtgagcgaataacgttgtagtaccgatcccagtcgtagtactgggtcttgccgttcttaccctcaccattggcaccatccagccagacggaaaaaatcggtccatattgggtgagcagctcggtcagctgtccaacgtagaagtcgtcgtacgccttgcccttgccgtaggactcctcggtgcggtcccacggagacaggtacacgccgaacttcagtccgtgacgcttggcggactcgctgacctcacgaacgaggtcgcccttcccttcacgccacggcgacgaggcgacggtgtgctgcgtcaatcgggacggccacaggcagaatccgtcgtggtgcttgcacgtcaggatgacgccggccatcccgccggccaccagcgcgtccatccactgatccacgtccacgttccgcgggttgaacagtgccggatcctcatgcccgaggccccactccctgtccgtcatggtattcatgccgaagtgtaggaaggcgtacatttccatgcgctgccaggtaagctgccgcgatgacggacgcacattcgccagatacttcaggttgatgccctcattggttggattactcattgttactcctgttaaggtgttagcgtatgacgccttttctgatgatgatgttcgcatactgcgattgttcgccagtggcaacgatgcaataggctttgccggcctcctcgtagaaggcgaaccgttccagcatcccgatgcccgcttgcttgccgggctcgtgcctgtcgatgacctgatggtaccggtcccatatcggggtgtccacggtgtctccgggaaccttgtccatcagcagcaccgggtgttccgtgtattggtccagcggtatcagctgcagcaccgcgtcgagcagcggctcgatgggctggccgtcgtatcggatcacatgggaatgaatccccaatgactcagcgggaaaatgggcgtccgcgagaactatagtatcgccatggcccatttcactgagaatcttcaataaaccgggctgtatgatcgacggtatccctttcagcatagctgctcctgcttgtcttcagacttatttgattgttacttgcctagaatgctctggatattgcggtactgttcgtcggtcagctgcacggcgggctcatggatggacgtgtcgattggcagtcccttcgccttgaccgcacccttgatggcgctgatgaacaggtcggcagtgtcgtacaggcgcatcagataggaaatgcgttcagccgacttgacggccgtggcgtaatcacccgactgccatgcgtgatgcaggctgacgaaagtctccggctccacattggtcaatccgcacagcacgccattgccgccactgattcggttgacggtgtagtactcgtcgaatccggacagcacgctgaacgatggattcaccttacggacggcagcgatgaccttcctggtgtggctgatggtgtcgacggtgtccttgatgccgatgatgttctgattctccgctgcgagatccgccaccaactcaggtgtaaggtcgttgcccgtcctggctgggaagttgtacaggatgaccggcaacgtcgttgccttggccaccgcagagaaatagcgcttcgcgcaatccggggatggtccgaaatagtacggggatactgcaaccaatgcatcagctccggctgcttcgctctccgccgccaatgttctcacattgtctaggttggtgtctcccacgccgacgagcaccttcatgcgtccggcaactttcgagactgcgaaacgcaccgcttctgccttcgtcttgacgtcgatggcgtagaattctccgatgctgccgaacagcagcacaccgttgatgcccgcgtcgacgagatggtcaaggtgcttgccccaattgtcgtagtcaatggttccatccgcgttcgtgatggtgatggaggggcagaacacgccttcgaattgggcgttacaagtcatgatattttcctttcgacgatatggtaggcgttccgcgcgttattgaggaagaagtcgtcgtctcccgcgaaacggttgagcaggatcgacagatgactgtcgaaataggcgtatagaccaacgacaggccaattcgacgcgtacagcaacctcttgttcgagaacgcggcttgtgcgagatcgagcagggttgagacgaatcgtgggtcatcggttggataccccgataccttgacgtacacgtttggcagctctccaagcctatgcagggcatcggatgaggattcgagattgtgaagatcggatatgttgcccatatggtcaacgatgacggttgcttcgggcacctgctcacaagcctgagcgagatcgtcaagttcatccacccgtacgcatgcgtcgaatggcatgttcttatcggccataagctgcaaaccgcggatgaagtcatcttgcaggcaccgtccccgcggcgatgccggcgtatgcaatggctcacgaacgccatgcgcgtacagcggcacgcgcatggccggcccgacggtggaccgcatagatgttgccaacagcagaggatcatggttttcggacagcagccgatcttccaatgacgtatcgtccgtgtcgacttccacatacacaccgccgatgaaattgaccgcagcgtctggatggtgctcattatatgaggcataggcgcgtttgaggcagtccatgtcgtaacggcgggtgattgacccatccgtaccgtcgagccatgaaagtggttggacggatggatcccagatgtggaaatgcgagtcgatgatcctctgcatgtcgcgcgtcctagtcgagtgccctatcgaggtggacgtatccgccgtcggggaagacccattgtccagtggtgtgcgaagacctgtcggacagaaggaaggccacggtgtccgcgatttccgaagtctcggtcatgcggtggccgagaggaatcctgtcggtaatcttcgccaactgctcacgctgcgcctgctcgtcgccgaacgtcttgatccattgcgcatacagcggtgtccacgcttcggccacgacgacggcattgacccgaacctcgtccggggcgagggcggcggcccactcgcgggtcaggcccagaatcgcgcctttcgccgcagcgtaggcgctagtcttgccctgaccggtcaatgcggtcttggaaccgatattgaccaccgagcccttgctggccttgagcgccggcacgcactgatgaaccagctcgtaatagtgggtcagattgccgtgaagagactcctcgaactgacgccatgacgtggtctcgagcgcgagattgtcgtttcttccggcattgttgaccacaccatcgatatggccgtatttcttcatgaccgattcaacaatgggggcgatctcgtcggtgttgttcaggtcaatcagataggtgtcatacgaatcggtgatctgttcgatatcctgtcggaattcgtcgtcggcaccatccgaacgattcagcaccaccggaatggcgccttcttcggccagtcgcagcgttacgcccttgccgatgcctttgaatcctccggtgacaataatcaccttgttctcaagatgcaggtccatctcaggtccttccgactagtccttgtgcaggtacttcatgcattcgtcgagcttcatctccgtgccgttgcccggagcg

SEQ ID NO: 2337 - DNA, 9014 bp, Unknown
  R119_18m  MAG No. k141_55016
cggcatgggcttccaggtggggtcgtgcatcagcttgcgcgagtcccaccagcccttggcaatctgcaccaaaccggtcttgaggtgctcgcgatccaccatcaccaggcgaatgacttccttggccgcggtgagcacggtgcccagtccaaacaccagcggacggaagtcgccgtaggtcatgaagtaccgggccatatagccgcggttgcgcatgatgtggtaccggttcatgtcggacgtggagttgagctggcgcacgccggcgatatcccagttgccgatttcgcgcgtacggcgcaaaatcacgtcgggcaccacaatcgggttggtgaccttgctggcgcggtagccatacatcgtgtcatcccagtagatgaagaagcgcgggtccggcagaccgatttccgtgaccacacggcggttgaacaggccgccttcgaagcacagcgtgtccatcactcggtatccggccgggccgaatgcggcgggcgcgatcgggttcgggatgcccagcggcacaatgaagtcgtactgccagtagaacgggccgccatcgtaatcgaatcgggatccctgaatcacctcgtgcttgtcggtccacttggacagcttggcaatggcgtccggcagcacggccacatcgtcatccatcacccagaaccatgcggcgcccagatcatacgccttggccacgccggcggagaaaccgcccgcaccacccaggttctcggtctgcggcgcatagaccacacgttcttcgttgccggactggtcggccacggtggtgccccactggccggtcaccttgccggcaaacgcagcgaccatgtccgccgtctgatcggactgctcattgtccacgatgacaatgcgccacggtgcctgctcaagcgccagaatcgaatcgaacagtacctcgagcagctgctgacgtttgtaggtggtgacgatcagggcaagcttgtcaatggtgttgttgggtttcttcacttcagccatggctcccattgttgcacttgaccggcacaagacgaatttctgcacagtgaaacgcgggttgcgtacgtccggcgcatggcgtatgaataagcctgtcagtttcagggaaggtgcaattccttactggcggtaacctgcaccccgggtttcataacggggatggcgggaagcccgcgacccgcgcaagcggctgatccggtgagattccggagccaacggtatagtccggatggaagaaacgagggctcattatgagcgtatcttcgcgtatccgcatgcaagttgttcgttctgtggcgcccgaggccgagggttcggccagcgcgtccaccgccagcaccaacgccaaacttggctcacacaccactggcgtggccgattccggccgctggtccacgcgccgtatcgccatgtatgcgctgttcgtggcgctggcgatggtcaccagcttcattgaattcccgattacgccggtcacttggctgaagtacgacccgtccggcatcgtctgcctgatcgccggctttgcgtacggtccggccgccgccgcaatcgtgtctgtgctcggctttgtgccgcacatgttcgccgacccgtggggttcgctgatggctgtgctggtggcgctgttcctgtctgtgccggccgcgttcatctaccgtaagatccgtacgcgcaagggtgccgccatcggcattctggtgggtgcggtgctggccatcgtggtggcgctggtgggcaacctcatcatcacgccgatttacgcgcacatgccctaccaggctgtggccgcgatgattctgccgattctgctgccgttcaacgtggctaagatggcgattcacgccgtgatcaccttcctgatctacaagccggtctccaacctgctgtccaagcagcagtgaccggcctgagacgggcctatgcccgccacgactaacgaccactcaacgaccactcaaagaacaagaacgcagaactccggcccttgccgggattctgcgttttcgcctatcagttacggattgctgtttcatgaccgttgcaccccattccttcgacgccgacgagttccacgattccgccgagcccgctccccccgccgccgtactcaaggacattcgtttcagctatgaccgcggcacttcatgggctttggatggcgtttcgctcacggtccatgccggcgagcgcctatgcttggtcggtccgaatggatcgggcaagtccacgttggcccgtctgattgcgggattgaccgcgccggacggtggcgaagtgacgctactggaacagcgcgtgtacgcagccggcccgaatgccgacgcctatcgcgctgcccgccgcggcatcggtatggtgtttcagaatcccgaggatcagctggtcaccaccgtgttggaggatgacgtggcttttggcccggagaatctcgggctggagcgcgggctcatcggcgagcgcatcgttgattcattgcaggccgtggggttggcgaacttgcgtcagtccgacccgacccgtatgagcggcggacagcagcagcgcgccgccatcgccggcatgctggccatgaacccggcgatgctggtattggacgaaccgaccgccatgctggacgaatccgcacgcgccgaagttatgcgcattttggatgatttgcaggcgcgcggcaccactattgtgcatgtcacgcatcatccggatgagaccgttcatgccgatcgcatcgtgcacatggaggccgggcgaatcgttggtgtcactgcagccgccgataatcgacccccgctagcggaggctgtctcgcaaagcgagaccgagggtggtatcggcacagaagccgcccccagtcgtcctacgaacgacagcccccgccagcggaagcgcgaagacggctccgaactgccgctgctctccgacggcatcggtgatatgacgaaccccattattcgcgtctcgcatctgacctatcgctatccttcggccaaacgggcggttatcgatgacctgtcgttcaccatcgcgcgcggtgaaaccgtggcactgatgggcgtgaacggttcgggcaagtcgacgctggtgcgcatgctgtgcgcgctggccgcgccgaccgccggcagcatcgaggtggccggcgttccggtggcctcgaccggcaaacgcggtagcaacgcacggccggagccggcgaatcgcaggcaattggcgcaattgcgccggcatgtgggttacgtgatgcagcatccggagcaccagttgttcgcggacacggtggccgaggacgtggcgtacggcccgcgcaaccaggggctcgccgaggccgaggtggccgaccgtgtgcgcgaatcactggacctgctgcatatcgggcatcttgccgaccgctcccctttcgacctgtccggcggacagcagcgattggtggccatcgccggcgtgctggcctgcaatcctgacgtgctcatcatggacgagccgaccgcgagcctggacgtccaggccaaggagcgcatccatgagctgttgcgcacgctcaaatcgcgtggcgtgaccgtgctcatcatcacccatgaccgagcggaggccaagcatatcgccgatcgcgtggtacgtatgccgattgccggcgcggctggtgctgagagcatctcggcaaccgagactgccttccccgccgagtccgtctcccctgacaaacccgcgcactcggtgatccaccgacttgacccgcgcgtgaagatggtgggcttcctggccgccatgttcacgatgttcgcggtgaacacacccctccagcttgcgctgggcatcgccatcaccctggccgttatcgcggcggcacgcctgaacccgttacgggtgctcgaatccattcatccgattctgattctgctggtgctgatgggcgtggtcaatctgtttgtggtgcgcaccggcacgccggtggtggcgctgggcccgctgagcatcaccgatcagggcgtggccatagccgtgctgtacgcctgccgtttcgcgttggtgatcatcttgggcgcggtgttcctcaccaccaccacgccgaccgccatgaccgacgccttcgccaccctgatcagcccgctcaaccggctcggcatccacgcccaggagatcgcgttggtcatgagtctggcattgcgattcattccaacgctgaccgacgagacccgtgccatcgtcgatgcccaatccgcgcgtggcggttccatcgaaaccggttcgctggcccagcgcatcaaggcgatgagcgcgattatcgtgccgattttcgccgacacgttgcgtcacgcggacaacctgagcctcgcacttgacgcccgctgctacgaggagagcatccgccgcacccactggcgtgccctgaccatcgccgcgcaagatctcgtgttcgccgtcgccgtcatcgcctacatcgccgccatcatcgcgctgtagggcggcaaacagcacagacagcaccggttgctatgctggtgtggttatacgaaagatgtaaggaaattcccatggcattgaccaagaagcaaatcaagcagctgcgcgcgatggcaaactcgctgaagcccctgttctatgtgggcaagaacgatttgaccgagtcggccgtcaatcaggccgatgaaaccattgagaagcacgagctcatcaagtgcgccgtgcaggacggttctggcctgaccgccaaggaagccgccgccgagcttgccgagcagctgaacgccgaagtggtgcagtccatcggcaatcgtttcgtgctgttccgtcgctcccggcgcgacgatgtggagcatatccgcttggtgcgcgagtagcgttcgctctgctcgatcccgtagcttgatatgagtaatggcggttggaatcagtccgattccaaccgccattactcatattcgcccagcgagcaccgtcactgatccaagatggacccgacgattcccgcaacaatggtcagaaccaaggaccccagtaccgaccaccagaaaccgtgtacgaagacgcccacgccgaacagactgaccgccagccagctggcgagtcgcatgaacagccaattgataatcaaggtgaccagcccgagagacagaatcgcaaacggcagtgcgatcagatgcacaatcggcttgattgacgcattaatcagcgccatgaacaaagcgaacgcggcgatgccgagaatcggaggctcccccaccggggtcatgccgggagtcaccgcgaccatgacggcggcggcgatagtcataatcaaccagctggtcaggaaacttttcatggcccaatcgtagcgcggcaggttttactattaggcaaaacgtgagatgatgttgtgcagaaacggtaagaaggtactgccgttcccgattgagaagggatagacccacatgactgataatcaacaacaaccgtacggttcggacagtgttccgcagccggcacaacctgcacagccggcacagccgtcgtacggccaagatgccgcacggcagcctcagggctatggcgccccacagcccgccgcatacgctcaacccgccgccggaagctacggccagcagcagccgcaatacggccagcccgccggcgcatacgctcagtctcagtacgctcagccgcagtatggccagccgcagtatggccagcccgcacagcccgcagcgggctacggccagcagcccggctatggacaggcctaccagcagccgaatgcctacgcacagccgcaatacaccgccgctccgtatgccgccgccccggtgtggcaatcatccaagtccaagttggctgccggcctgttgggcatcttcctcggcggacttggtgtgcacaacttctatctcggcaacaccggcaaggccgtggcccagctgctgctgacgcttgtcggctggattctgctcggacttggcccaatcgcagccgccatctggggctttgttgaaggcatcatcattctgtgcagcaagcccggctcgccgtggcataaagacgccaacggctacgaactatcagactgagactgacctcgggccacgttcattgggcctctgatcaaccacgcctctgcaggtatcatctcgatgccgcagtcgtagcgggatgcgacacgccggccgtgtacatgagttcatgtacacccgatacaggcgaatcagtatcgcacgagattcaacagttcctgctgtttggcatagcgggaaacgttggtcagggcgatgcggatgatgtgctcggaagtcttttccaaatgattgccgccggccacatgcggggtgatcaggcaatgcggctcatcccacaacggactttccgccggcaacggctcaggctcggtgacgtccaacccggcactgtggagccgtccattgtgcaaggcgtcggccaaggcctcgtgatcgatggcgtcgccacgcccggcattgattacgatggccgtggatttcagacgacccagacgatccgcattcagcagatgatgggtctgcggcgagcgcggcaccgccatcgccaccacgtccgccaatggcagcagtgcttccagccgctcgaagccatacatcttttcaatgcccttggccggcacgtccgcatgacggcgcacgccgaaggtacgcatacctacggattgggcaagctgagcgaaatgcgacccgatgtcgccgacgccgataatcagtgcgatgccaccttccgggctcaataccgggccttcatcctgccactgatgatcacgctgattggaggcataccggttgaggttcttcatcaatgcccacatggtggcgaacatgtgttccgacacgctttggccatacgcgccgctcgcattggtgaccatggtgccgcgaggcagcacacccgggcggatgtacgcatccacaccggcgctgaaggtctgcaaccattcaagacgggtgtattgggaagcctgcgagaccggaaagttgccgatgactgcggtagctcgggagcgaagctcctcgggaacagcggccgaccagaccatgtcgccgcggtgcgcttcgtcgcccacgaattcctgcggcacatcgcgggccgccttggcgaaagcgcgccgttctccttcgttgagtggcaggcagttgacaatcagcttatgcgtgttctcaatacccatggttcaccaaactaggcggcagggcggatattatcgcgtgtttcctcatgctgaaccaatgccgaacccgccccgccggaccaatgccgaacccgccccatcaaaccccaccaaaccaagggacagcccattgcgcatcgaccgtagcgtccgccccgaaccgtacactcacaggtggttttgtgattccatagcgtgcagccaaggcagtacgattgccggtttatccgcacgcacaggtacctacgccggttggtaaaccttacattccatacattgcaaccgaacgtttaggagcatgtatgcctgagcagcatattgataacgagaagattcccacacgtcttatcggcgcgattgtggctgtcggctcacttgccttcattggcattctgaccgaaaccgtgatgaccgtgcttttccccgcactgatgcgcgaattccatgtcgacacggccactgtgcaatggattaccacgatttatctgttggcggtggccgccaccatgcccatcagctcgtttttgaagcgccgattcgcactgaaaaccatttttcttgcggctgtgattctggccatcgttggctcgctgatcatgatcgtcgcccaagccttcccgctgctgattgtcgcccgcattattcagggcattggctcaggcgtggccacgccgttgatgatcaacatcattctggagcagtctcctcgttcgaaaatcggccgattgatgggcgtaggatcgctggtcattaccgtggctccggccatcggcccgaccgtcggcggcgcggtgaccacagtgctgccgtggcgcgcgattttcgtcatcgccattccgctggtgctaatcgcagcatgcatcggcatgaagtgcattgagcagaagacaccgaccgaggctgcctatcttgacccgattcagcttgggtccattgttgtcgcgttggtcggtctggtgctggcgctcaaccaaggtggcgtggccatcagtgcggcggtgtccggcaagtcagccacacgctccggcattatcgccattgtcagtctgattgtgggcctcgccttgttgatcgtgttcgccatgagttccaagcgtgccttctccccgctgctgcgccttggcattctcaaggatcccgccgtactgttacacgcctgcgcatatctgctgctgccattggtcgccatcggctacggctatgtcatcaccaatgtggcacagctctcgctcggcaccacggcatttgtggccggctctctggtgctgcccggagcactggtcggcgctgtctgtgccccgcttggcggctggttctacgataagttcggcgcggtcaagccgattctgattccgatcggcatcgctattttgggcccagtgcttatgctggtgttctcgatgcagcttacgcccgtgctgctcgtcggattctatttcattttcggtctgttctattccatcggcaatgcgaatgtgatgaccagtggcctgtcggaggtctctcccgagttcaagccggacggcaacgccattttcaacacgtgtcttcagtttggcggcgctgccggtaccgcactgttctccacgattctttccgtggctcaggccggcgcaggagaagaaggcaccgctgagtttgctcacgccactgccgtcggcggcacatggacgtttgccacgatgacggttatctgcctgattggctggtgctgtctggccaccgcgttccgcattcgcgcggcacgtaagcgtgcataaatccgatcatcaatagagtcccagctttccaaacacgtgtggggcgtggcccgggggaaccccggggcccccccccaacgcgaaaggaa

SEQ ID NO: 2338 - DNA, 24949 bp, Unknown
  R119_18m  MAG No. k141_55136
cgctcccccgcgttgatggtgaggttcacgtcggtgatgatgacacgacggttacgccggaattcgacgttgtcgagttggaggacggtgtttgtcatgagtgaaatactaactatgattcgcggtctgagaactcccctcagtcacctgcgccggactgagggggggcactcgttgcagcgctacttacttcttctgctcgtcgagcacagactggtagacttccacggtcttgtcggcgatggtctcccagctgaacacgtcgcgggcgcgttcgtagccggcctgacccatcttcttggcgagttcggggtcagccatgatcttgtcgatggcggcggccatgtcgtgcacaaacttgtccggatcggtgggggtgccggtgccgtcgtgcagctggtcgatcgggaccagatagccggtttcgccgtcgaccacgacttccggaatgccgccagtggcggatgcgacgaccggcagaccgcaggccatggcctcaaggttcacgatgcccagcggctcgtagatgctcgggcagatgaaggcatcacagccgtgttccaaagcattcagctcaggcttcggcagcatttcttcaatccagacgatgttgccgcgttcctcatccagcttggcgaacgcgatcttgacctcttcggcgatttccggggtgtcaggagcaccggcgcacagcaccacctgaatgtccttggaaatcaggtgcagtgccttgagcaggtatggcaggcccttctggcgggtgatacggcccacgaacagcagggtgggcttcgaacggtcgatgttgtaacgatcgaacaccttccagcccgggtcgtcaggggccggggtggcgaagtcggccatggtgatgccgttgtacaccacgacgaccttgtccgggtcgaggttcgggtaggcggtcagaatgtccttgcgcataccgccggacacggcgatcacacggtcggcgtgctcgtaggcttccttttcgccccaggagctcaggttgtagccgccgccgagctgctcacgcttccacgggcggaacggctccaaggagtgggcggtgatgaccagcggcgtaccgtgcagcatcttggccaggtagccggccaggcaggcgtaccatgtgtgtgcgtggatgatatcggcgtcaacgtcgttggcaatctgcagatccacgccgaaggtcttcaatgccggattggcatcggcaagctcggacggcgtatcgtatccgacaaccttcagactgcccttggcattagcggcattgggaatcgcggggatatcagcctcagtgcgcttgccatcaaacgcacgcacggtcacgtcaatgcgctcggccaaaaccttggacagctcctcggcgtgtacgccggcaccgccatacacatgcggcgggtattcgcgggttagaatatcaactttcatcggactgcctctccttcgtgcgtcagaaagaaactcaagcacttcttactttagggcaccgcatacaagaaaacgcacaacttccgtcgtgcgttttgcttttcaagccggatttaccaggcaaaaaaatcagacggccgtgccgttctgatccaaattcggattatgcttggaatcgccagccgtgaagaacaggctcagcacacccacaatgaacaccgcggaaacggtgatgatcagccacatcggatggcttggcagccacataaccacgaagaacgcgataatcgcgatggcaatcagcgtccagctgcccacgcggaaccactgacgcaacgaatgcggtgccttgaacatcttcggattcgtgtagttcggattcgtgtagttcgggttagtggtcagcagggtttcggtgtccgcaatcgtaccgccgctgggcttccattcggtgccgtcggtgccgtcctgcagacgctgggacttctgctgcagctggtattcgtcaatcattcccgaacggccacggccacgggtctggtcatactgcgacggcactcccctgcggcctgctttggcttgggcacggcgttctgcacgattcggcatttcactactcctgtttcgacggtgacactgttggctatattacccgcttatcggcggcaatttgccaccagtccatcggaacccactgtgtgtcattgtattttcagtcagtgatgcgggcagtcgatgatgcgataggtttgcgtatggaagtcgcaagtgaccgcagtgccgtccgcgaataccgaacgctgcaccagcggatcatcatccacgaactcgtgacgaaccagttcctgcatgccgacccgctcatggaatgcagcgaccgtatggcagcgttcgatgtcgttttccgtgcgagcgcgctgttcgtcgtccatgtcgccgtcaacgccgatgtatgcggcatcgcgaatcaggtatggagctccgccattgagcaaggcgtacagcatgtaatcgtcgccgtccaccacacgctccatcatccacggctcgataacgcaatcatggtagacgaggttatacagcggcaccggcacaccttggcgcggctcgttgggtgagcgcatctggaagtcgtatggcgcgtaatggcagaatatcaggcttggcactgcccagtccgatacctcttcggacgaggagaggatgccgtgcgagagcagatattcgaagcattcggcgcggcggtcaaagcattcgcggcgggtcatgcggtgttcggggttcgagcattcgtcgccttcgttgcaggtgaagacatccaagtatgcacagtcgagcttgatgccgtgtgcggcgatttcggcgaaattgcggcgcacgtagtccggtgcgagctcggcgcacaggtaggtctggcggccgcccgcccagcgtgcgtgttcgggcatcgtaccgtctgccagccgaatcgcattgttggcatcaaaggtttgcgcggtgaagtagtaatcgcggtactggtcatgcgtaccgaaaatatcgccttgctcatggcaggcgtcgaccagcgacttcatgccttcccagccgcctgcctcctgacaggccggcagatagtcggggtgtgcgttgtcgtatccgggctgtgcccaaccatccaagtgcatgtacagtcggcctgcacccatgctgtgcaatgttcgcatttgcttttcgcgctgtgcgaaggtgaccagtgactcgtttttctcggggtggtccttatcgtagtagtacgagtcgggctgtactttggttttgatgccgatgtgcacccatgaacgaccaatcaggtcacgcacggagggattgcgcgccgccttttcgacgagcgtacgcaagcgacctcgttcattgacgtacgaacgataggccttgcacaccgccgtgtgatcggcgtggtcgaggaactggtagcgtaccacgcggcgataattcattgtgccgaggcttggctcaaaccaagtattgatatgggtgtacgggccatcgctgggatggtcgatgccgtaaccggcattccatggagtttcgcagatggcgatatacccgtgtccgtctgcgcggagctgcgcgaaccacggcatgtaaccgccagccgtttcgaagcggccgtcgaaggcgatatctttggtgctcacggcggtaggccatgtgttggggatcatcacaccttgctcatgggtgatgagtgtcgtgtcatggtcgtcggcgcaatcgaagtccatggctgcgggccacgtcacattggtgatgttcaggccttgctcattgagcggaatccattcgaagagcacatcgcctgaggcacgctccacccatacataggtttcaaaggagtatgcgctgtgcccaaagccggtgaagatgctgcgaatgccggttcctgtgccggtttcacgctgctcatgggtgatggaagtggcatccgcgaacgcgaaggtgccttgcgcgcattgcagggtcggcttgaaatcagcgcaggtattccattcggcaccgtcgcgcgtaaaagcgaactgcattgttcgttcatcgaatcgcacggtagtgccggatacggtgaattccatagttaatgtgctcctgtatgttctcgattgctcccgcttacgggagctcgctcatataacaagattaggggtggtctgctgtttgagaccacccccagtcggctttgccgacagcccccgccagcggggggctagcgctgtctgtttattacttactgcttactgcttcttggtcagtgcggtgaacactgggccgccgccgtagtcgaatgcgacgccggagactgcggaggtgctggctgcggtggcattctggttccacaacgggatagccggaaggtcctgcagcagaatctcctcaccttgctgataatacttgtcggcttcctcggtggacggggcggaaagagccttgtccatcatggcatcgaactcggggttcttgtagttgccgctgttgccgcccttgccgtcggccgaactggaatcgtacagctgtaccagatagttgtccgcggatggataatcagggccccaaccgctgcggtatgcggaggtcatcttgcctgaatccacattggacaggaattcgtcggaagtggacatcgggatgctcttggcatcgatatccagcgtgttcttgatgtagttgcagattgcctcaacccagttcttcgcagtgccatcagcattgtatgcaatgccgaactcaccgctccacggggagatggcgttggccttggcccacagttccttggccttggacgggttgtacttcagtacttcatttcccttgagttccttggagtaggcgctgattggggctgcaaggaagtcgacggcgggcgtggcggtgccgtggaagatcttctcggcgacggtcttgcggtcgatggacatggaaatggcctgacgacgcaggttgccttcctcgttctggccgaagtgttccagccattcaggaatggtgaaggtgagcgtattgccaccgggctcgttgtatgccttcagcgacttgtcggattggaaggaggtaagtgcggtgtcaggaatcgtgttcgtgaagtccaggttgccaccgcgtaggtcggcgtatgccgaatcaggcgaggtatagatcttgaagttcaggccatcgttcttggcgacacgattgcccttgtagtcagggttcttcaccatttcgatgctgtggttgtgctgccaggacacgaacttgtatgggccgttgctcactgggtgctgaccgaacttcttcgggtccttgaacgcggattcgggcaacggcatgtaggcgtggctgccggccttgaccgggaatgccgagtcgggctggctgagcttgacatcgatggtgttgtcgtcaacaacggtcaggccgctcagcgtggccttggggtccacgtccggcttttgcagatcatcatagccttcgattgtgctgaagaagctggcgctggcctgcttgttggcactgttggcggtgtaattccatgcgtttacgaaggagtgcgcggtcaccggagtgccgtcggtgaacttccatccgctcttgagcttgatgacgtaatgcgtggcgttgtcgctggaggtgatgctgtctgctacctcgttgtggatgccgcccttcgcatcgtaggtcaccagacctgcgaacagctggtctacaaccttgccgccaccggcctcagtggtgttgccggggaatagtgggtgtgccggctcactgccgtacacggaaatgatattggaatctgaagcattgctggaattggaggtaccggtcgatccgcagccgctgagcagcatgacgattgccgcaccggccgcgaccagtgaagtgacatgacgtgtgttcatgaatctctcccaaatattctggcgtcatctttttggcgacgaaagacaccataggagcttcatgttaaccatgtatgcaatattctcgaaatataaacattactgaagactcaaggcagtaattaatcccagaaacgcaaaaatcccctcatgaagaagggattttcatgtttctgtttggaaagtattcagcgaggcagcatcatcggacgctggctggccttgatcggggccggcagctcgctcttttccttggagaggtactcgtccacggctgcggcgcaggagcggccttcggcgatggcccagaccacgaggctctggccacggccggcatcgccgcacacgaacacgccatcctgggaggtggcgaacttgtcattgcgagcgatgttgccacgtttgtcgagttcgacgggcagctggtcgaggatggtctcggtgtccggatgcaggaagcccacggagatgaggaccagatcggcgggcagcacgcgctcagtgccaggctggcgagtgaacggaccattttcgccgggagccacggagacgaccttcaagccggtgacatgaccacgctcatcggccacgaagccttcggcggtggtcgagttatcaatggtgaccttggccttctcctcttcggtgccctcgaagttcacggagtcggtggagtagatgtactcgccgccctcttccatggaggaggtcttctggtaggtgcgggcgaaggtcggccacgggctgttgtccggacggcttgacggctctttcggcatgatctgtagcacggtgacgtccttcgcaccctgacggatcgaggtgccgaggcagtcggaaccggtgtcgccaccgccgatgacgatgacgtgcttgtccttggcggtgatgtcgtgcaccggcttgacgccgaagatacggcgcgtggcgtcgggcaggaagtcgagggcgaagtggatgccgtcgagctcgcggcccggaatcttcatatcgcgcggcacgcgggagccgatggccactacgacggcgtcgtaacggtcacgcaggtcatcccacgtgatgtccttgccgatttccacgttggtgcggaagcgggtgccttcggcctccatctgcttgacacggcggtcaagcagacccttctcaagcttgaagttcgggatgccgtaacgcatcagaccaccgatggcgtcgtccttctcgtagacgacgacggtgtggccggcgcgggtgagctgctgtgcggcggcgaggccggcagggccggagccgacgatggcgaccgtctggtcggtcagacgctgcggcggcagcggcttgacgtagtccaaatcccatgcctgatcgatgatggtctgctcgtcaagcttgatcatggtcggcggctggtggatgccgagcacgcaggcctgctcgcacagggccgggcagatgcggccggtgacttcggggaagttgttggtcatggacagacggttgtaggcgtcttcccacttgccctgacggaccaagtcgttccactcgggaatcaggttacccagcgggcatccggtcatgcagaacggggtgccacaatccatgcagcgggccgcctgcgtttgggtccacggttgcaggccggtttcggcgtgaacgtcgaaccagtccttgatacgctcctcaacggggcgttcagccaactctcggcgggtacggaccttcaggaatcctctcgggtcgcccatgtcagcgcgctccttccataacctgctcgtacaccttttcccaggtgccgggcgcattgaaatctacattgttggccttggcttcttccatggccttcgtcatggccacgaactgcttcggcaccacgtgagtgaaccgcttgacggtttcgttccagtcctccagcagggccgcggcgaactgggaaccggtctcttcggcatgctgcttgaccagtgcgtacaccagcttggaggtttcggcatcaagcgacttgaagagcagtgcaccggacttgatggcacccgggttgaccttcttcatatcaaggtcaagcacataagtgttaccgccggagaagcctgcaccgaagttgcgtccggtggggccgagcaccacaacagtgccgccggtcatgtactcgcagccgtggtcgcccacgccttcgaccacgaacgtggcaccgccgttacgaacgccgaaacgttcgccggcgcgaccggctacgaacatctggccggaagtggcgccgaaaccggtgacattgccggcgatgacgttgctgtgcttgtcgaaggtgacggtgtcttccgggcgcacgatcatgcgaccgccggacaggcccttgccggcgtagtcgttgacttcaccgtagatgcgcatggtctcgccgcgcgggatgaacgcaccgatggactggcctccggaaccgtgcagggtcatgtcgatggtgtcgtccggcagaccttcctcgccgtaacggcgggtgatctcgtagccgaccatggtgccgaccgtacggttgacgttgcgaatcgggatttcgatgcgcacgggttccttgtgttcgagggccggctgggcaagttcgatgagcttgttgtccagtgccttctccagctcgtggttctgctcgatggtctggtgcaggatcgtgccgggtaccgggccggcctgcttgagcacgttggtcaggtcgatgccgccggacttccagcgcttgatggcctcgtcctgatccaaacactcaacgtggccgatggcctcctcaagagtcctgaagccgagctgggcgaggatctcgcgcacctcctcagcgatgaacatgaagaagttgaccacgtactcgggcttgcccttaaagcgggcgcgcagctcaggatcctgggtggcaatgccctgcgggcaggtgttcttctggcaggcgcgcatcatgacgcagccttccacgatcagggccgcagtagcgaagccgaattcctcggcaccaagcagggcggcgatgaccacgtcacgaccggtcttgagctcgccgtcgcactgtacgacgatgcgggagcgcaggccgttcaggatcagcgtctgcttggtttcggacaggccgatctcccacggggtgccggcgtgcttgatggcgttgagcggggctgcacccgtaccgccgtcatagccggagataagcaccacgtcggcatggcacttggccacaccggccgcgatggtgccgacgccgaactcggaaacgagcttgacgtggatacgtgccttcgggttggccatcttcgcatcgttgatcagctgcttcagatcctcgatggagtagatgtcgtggtgcggcggcggggagataagctccacgcccggggtggcgtgacggaccttggcgatccacggcgggaccttggcaccgggcaggtggccaccctcaccgggcttggcgccctgggcgagcttgatctgcaggtcggtggcgtgcacgaggtaatcggaggtcacgccgaagcgagcggacgcgatctgcttgatgcggctgtagcgctgcgggtcgttgatacgatcgtcggattcgccgccctcaccggagttggagcgtgcgccaatcgaattcatggcgatggcaagcgtctcgtgcgcttcctgtgagatggaaccgtagctcatggcaccggtggagaagcgcttgacgatctcggaggccggctcgacttcggagatgtcgattggcttgcggttgttgttgaacttcatcaggccacgcagggtcatgagtcggttcgacgtgtcgttgatgtggtgcgaatacttcttgaacatctggtagtcgccacggtgggtcgactgctggagcaggaagatggcctcgggatcgttgaggtggtcctcgccggtacgacgccacttgtagtcgccgcccgtgcgcaggttgcggtgcggggatgcgctccactggttcgggtaggccacgcggtgacggatggccacttcttcggcgatctcgtcaaggcccacgccacccacacgggaggtggtgccggtgaagtattcgtcgatgacttcctggctcaggcccacagcctcgaacagctgtgcgccacggtagctcatgatggtggagacgcccatcttggacatgatcttgagcacaccggtggaaagcgccttggtgaggttcttcacggcggtgtccgcgtcgaccttgaggtagccgttacgggccaaatcctcaacggattcgaaggccaggtacgggttcacgcaggcggcaccataagcgatcagcagtgcgacgtggtgaatctcgcgcacgtcgccggcctcgacggccatggagatctgcgtacgggtgtggcggcgcagcaggtggtgctgcacggcggaggtcagcagcagggacgggatcgggccccacgtgtggttggattcacggtcggagagcacgatgaagttcttgccgtcggcgatggcctcatcgatttcggcaaagatctcgtcaagtcgctcttcgagggccttgccgccgccggcgacctggtagaggcccttgaccacgtacggacgatagtagccgccgaggatgcgggccttgtcaaggcgcttgagctgggccatctcatcagagttgaccacgggcagcgggatgaggatcttcttggcgtgcagctcggaatcggccagtaggttaggctcggggccgatggcggattcgagcgaggtgacgatctcctcacgctcccagtccagcggcgggttggtgacctgcgcgaacttctgggtgaagtagtcgaacagcatgcggctgcggctggagagtgcgggcataggcgcatcgttacccatggatcccagcggttccttgccggtgttggccatcggagtgagcaacagcttcagatcctcttcggtgtagccgaaggcgcgctgacggcgctggacggactgtccggagtggctcacgtgctcgcggcggggcagatcactcatctcgaccgagttgccttccacccacttgcggtacgggtgctgggaggcgagggtcttcttgatctcttcatcggggatgatgcggccttcggcggtgtcgaccaggaacatcttgccgggctcaagacggcccttggacacgatgtgctcctgcgcgatctccggcagaacgccggcctcggaggccagcacgatgtagccgtcgtcggtgagctgccagcggccggggcggaagccgttgcggtcgagcagggcgccgacctgggtgccgtcggtgaagacgatgtcggccgggccatcccacggctcgataagcgtgttgttgtactcgtagaaggcgcgcacgtccggatcgagatccgtgttcttctcccaagccggcggcagcatcatgcagatggcgtgcggcagggaacggccggcgagatgcagtagttcgaggcactcgtcgaaggtgccagaatcggagtagcccggagtggtgatgggcagcagcggctcgaactcgccgagcagttcgctgctcagacgaccttcacgggcggagagccaattgcggttgccctgaatggtgttgatctcgccattgtgggccagcagacggaacggctgggccagcggccagctcgggaaggtgttggtggagaagcgggagtggacgatggcgatggtggccttcatgcgctcgtcgttcagatcctcgaagaagtgggtgagctgcatggtggtgagcatgcccttgtacgtgatggtacgggcggacagggaagcgaagtagacgcctacctcatgctcgacgcgcttgcggatgcggaaggtcttgcgatccaagtccacgccggccagagcaccgtccggagaggcgaccacgagagtcttgaatcccggcatggcggcaagggcctgcaggccgaggccgtccgggttggtgggcaccacgcgccatgcgagaacttcgagtccctcctcgcgcacgattttggcgatggcctgttcctgctgaccggaggtttcgatgtcgcggtcgaggaaggcgatgcctgcggcgtagtggccggcttcgggcagttcggcgggcacggtggcacgcatgaactcatccggcatgctcatcagaatgccggcgccgtcacctgtgttctcctcggcacccacggcaccgcggtggtcgagattgaccagtacctcaatggcgtcagtgacgattttgcgttcaggacgcttgttcaaagtggtgaccatacccacaccacaggcgtcatgctcgttggcgggatcatacataccgtccggagcgtggaccgtgagatcgagcggggctttgaatgtcaccggaatcacctcaattgcttgtgggcacgtaagggaatcgtgcctcttcgttcattgctgttgacacagtaccgttgctccatgtcattttcgtttcgcgtgtccatataccgagtcgccataaaagtcaatagtgattctcaagcaattgtttttatggccagttatgggggtatttcgaactttttcgcccgaaatgtctatttggccacacgaaaatacgatacggaaacgtccgtatcgtgaaatgctgcgttgggtgatgttacggattggcggctgtggaccaccctcagtcatgcttcgcatgacagctcccgccagcgggagcgataaatgcgaactgccagtcaacggtaaggttgactggcagttcgcatttatacaaggcgcaatagtctataagcgtttgttgccccgtctggagggtttctcgcctcttgatgctggtgccggactggccggtgaccggagcgatgccggcgtgggcggccaggtgggccgcgcttttgaagttggcgatgtcgccgccgatgccgagcaggatgctgcttgcggtcctgacgcctgtcccgggcgattgtggcatcctgtgcatgtctgacaccatagcgatcggcgcgctccgcgaactcaccgaacatggcatccgcgtgcccgacgacgtacggctcatgggattcgacggcatccccttctccgactgcgccaacccacccattagcactgtgacgatagacgtccccgcaatggctcgtacggttatcgatcgcatggtgacgctgatcgagtcgaacctacggcatgaacggcccgatgacatcacccatgaccatatccagttccaggtgatgccacgcacgtcgactctggccgcctgataccggccggcacccttatgagtgccggccttcatccctgaaaatatgggtctatgccacgtacagcgcggcgggatacgtgagatatgaaatttcatcgagctgatcgaccgtcacatatccggctggcgcgttgagcacgtccggaatgcggttgacgattgtggcgcacgtatgttcgacggtcgccggcttgaccacgtggaactccacgtccggttcaccctcgatcttccaatcgcacatatcgccatcatccggcccgtacaccttgccgatacaggcagtttccaacgtgatgccctgattcgtttcggtggttaccacggcggacatgccgatgcatttgccgaccgaaatcgtctcgtccatcgtctcggaatacacgtcgacatcgctgaaatacggcacactggcctgggtctgcgatgcgatggtaagcccaagcttctgggccagcgcttcattggaattccatacatacgagggcaccacggtttcgggatgcgcaagctcggcctcgaactcctcggcggtcagaccgcagccgtgcgctttggccaaagccaggccgtaatcctcgacgttgtagctcaccgcaccggtgatcttcttgatgctgtggcatccggcggcgacggtggagaccatgttcacccagtagatgtcctgcatgccggagccgaccatggtggcaccggcttccttggcgatgatgtcgagacggttcgtggtggccggatcggtggtccacgggtagatgcattcctcgcaggtggtgatcacgctgatgccgcgggccaagcactgctcgcacatggtggcgatttcgttctcgaagctgaatagcgtgactaccgcgatatccgcgtcgcactcgttgagtacagcctcggcatcggcgcgaatcggcacattgatggggccgatgcctgcaaacacaccggcatccatgcccacgacttccggattcacgtcgatggcaccgacgatttgaatgcctttctcgtgcatatagcgaatcgtgtacttcgccattttgccgcagccgtattgaatggctttgattggttgcataccgcatactcctttgcaacagtgcatattggccattggagaagtctcaccgtcgagaccaagccaatagccttaactctaccaacatcaggctgggcattcactgatatcggcggcactggagcgtcgggaagagtcggcgtagcggtaccgctaccgagcagaaggactgggccagtacaggtcctcccgccgaatcacggcatctcggcatccgtcagttcctgttccgccgtatgggagaggccgatgactatcgtaaaaaacggcatatcagcaacttataactacccttcctgtatccttaatgtacaagccccgtgttgaccgccgtttttcatgtcaccggggcattgcaatacgaggtaagggggcctcgtgattcatgcgttacaatcatccattattaccaatccgcagtggattgaggagtggctttccgccccgcgattccgtacataccttgactcttgccaccaagatgcgcttacagccttactttatacgagtggaatgttgaccttggtcaaatcctcgtgaaggatgtcgcctttttcgagatcgctctccgaaatgcttatgataggaacctcgctaaccattggcagaagggtcagcattggctgtttgaccaacaatcaccggtgaatcggcccattccacgccgaacgagctccggcaaacctttcgacgcgaatgctctcagcggccgcgccaacgcctgtcgaacgattcctagccaaaactccatgcccagccattgcgcggtagcatggtgccactcgacttaccatctacttccggttacgcagggcgtggagcatggcgacgaacacgataacgataacgatgaccacagccatgatcgcgtagtcaatctatgcgccggtcacggtggcggcggcatagccggcggaacccaccttgcccgagccggactggaacacggagatcacggtagcccaccacagtggtgccggccgcacccgtgaactgctgcagcgtggagaacatcgcgttgccgccaggaagatgctgcgctggcggaagcgacggcgcagccatgcgctgagcggcacagtaatcgacacgaccagagatagccggtggtgagccattggatggtggcctcgctgatgtggagcacgcccatcagctgcgggaacagcacattcatcacggtttcggtcaggatgccgaagaatgcgagtgagccgacggccacgatcgcgcagatgagtttgccggggatgcgttcgtcgcgggccgattgcatcgcggcgtctgccgctgagatagtgcccgaggtctggggctgagtcttcagagttaccgattgttcaaaagtcacactgtaacaataacactacggaaagcgattaccataaagcgtgctcacagtcgcccatcatgcggacttttcgaaaactgttgataaatagccattttccacaaggaatccttgcataacactatgatttagaacatctattagtatgacgtaaatcacattacgaactatttaaggtaagcgcttacagttcggcatgggagactcctcgtcacgatatgaatgcgctacagtcactatcgattgatacgcacgccccatcgactacgcgatttcgccgtcgccgtacgcgcgttcggaggcacgcagacacggcttgccttgcaccacttcgacctgcgagggcggcgcgtcatcgccggcacgcttggcctgaatctgttcgaacagcatccggaaggaccgctcccccatgtccaggaagttctgggtgtaactggtcagcgccggattccacatggcaccgaagttgcggtcgtcaaagcctacgacgctcacgtcagcaggcacgcggcgaccaacctcccttagacctcggatcacagcgatggcggtctcgtcgttgtcggcgaaaatcgcagtcacatcaccacgacggcccaaggtgcgcccagccttgaccgactcctccaaatcatcgtcgggcacgatgattgggtcaggtaccgtgacgccgcgctccttgagcgcgtcacgccacccattggtgcgggtgttatcggtcggtccttccgggcgccccacatggaacacggtgcgatggccgagatccagcagatgcatggtcatccaacggccaccatccctttcggcgttgatgatctggtattcgccgtcgccgaagctgccacccaccacgaccatcggcatatctttgggaatgtattccagtgcggcgatgccggcccggtcgtactcgtagacgatcacgcccgccggcctgatcgacaaacccatgcgcacacgagccttgacggagtccatgtcggactcatccaaagaaacgatattgagcaggaaccgacgtttacgggcggcggcctcgaccccatggttcgtttcggacgtggagaaggcggaaggattggccgcgaacaccaccacggagtccatctcccggttcgacagggcgcgcgccacaatgctcggctcatagcccagctccttgatggccttggcgatgcgttcacgcttgtcttcggtgacattgacggtgccgttgagataccgggagacggtcggtgccgagactccggccagtctggccacgtccttgatcaccggtcgggtgcggcccgcacttctcgccatccttgtctcccctgttgttgtcagttgttgttgttgcgtacgtcaaggagaaccggcatcaccatggcagtcatccagtcacacccatatccgttcagccgcgctccgacttcggttccccgtttttcgccgcgattcattgtagttcatgacggggaacctatatccaaatcaataacttcgcgaaaaccgtacgctgagttgcggtgagtgtacggtttccgcgaaatcatccctaatttcgtgaagaacgtacactgagtcattctgagcgtacggttttcacgaaatggcagctgatttcgtgaagaacatacgctgaagatgccctcggtgtcactgatgactgttctcggtatggaaggcggcgcagcaaggtgtcctaggctaatatcgcctccgacaagaccgtcggcaaagccgtcgacgtcgattcaagttatccacaccaacaattcgcgtgacatagtattcacatttgccggttgagcttgtgcaacaatcaaaatcacccttagcgtcgagatatgaaagaacacaaggaagtttctgcactgctgcagcaggcgaagcaggagcgtcgctgctgctatggcaccagtgatgcgcaacggcgcgccctgaaacgtcgcctgcatgccggggagctggtgtcaccgtataagaacctgtacgccgaccgaatactttggaacaccatgaccagagagcaacagtcattgcaggtcatacgtgcgctgtccgcaatccaccctcagtgggtatttgcggggttgagtgcggcgtgcgtatacggactgcagcacaactattccctgcacgacggcacagtgcacatcgcctcgaagtccggcatcggcggcggagacgaggcgcgtctcaaccgcatctatatcaatcggattccgacgcggaagcataatggcattctcttgacgactccggcgcgaacgctgctcgactgcgcggcattcccattcccacaggcgctgcccatatacgattcggctctgagaaagtccctgacgaccatcgaagaggtgcagtcgctgatgattcaaagcgtctgcgacgaggtctccgtgaccaagctgctgaagtacgcggatcccctgagcgaaaacggcggcgaatcattgatgcgtggccagatcaccgaattgtctttcggcattcccctgctgcaggtgcagttcatgaatcccgacaatcccgcaatgccatatcgcgtcgatttctgttggaagctcgcagacggccgcatcatcgtggcagaatacgacggcatggccaaatacgccgacaccagcaacaagaatcgcgcaagcctccaggcgaaaatggagtacgaccgcagacgtgatcggcatctccgggaacagggcgtcaccgaaatcgtccatgtgttctatgaggatctgctacgccccatcaatcttgagaccaagctgctcaaggccggtgtgcccaaaatccggtgaagataggccccatttcgtgaaaaccgtacgcccagaacgactcagtgtacgttcttcacgagatgagaccccatttcgtgaagaccgtacgcttacgacgactcagcgtacgatttccgcgacatgaggccatttcgtgaaaaccatgcgcccagaacaagaccgtcagaaagtcgactagacagcctcttaactaccgaacggtatctatagaacggcgatattccgccagaaacgccgagagcggaatagtccccttgcgtttgtcatcggactgcgttattctgaaaccggtttcagaaagaaaccgataaacaaaactcaaagccacaaggttttgaccaacgaaaggaaacatgatgtctctcaaggattccatgattcgcggtctggctatgtacggtgccacttccctggcccagtccggtcacgccaactcccagatgattctcgacatcatcaacgacaccgataagaacgctcgctgagcctcttccctgactcgccgctcacacacggcccgtctcataacgtaaacaacaacacatcgcaaagcccacggctttgcaagtcaagacaaggaacacattatgtcattcatggattccatgattcgcggtttcaccctctccggtatggacgccatcgcccgcgccggctacgccgactccaagatgttcgccgacatcatcaacgccgccaacaaggacgctcgctgaatctagcgaacgatcccattcatgagattgcacgacacatacgaaggcaatcccccgcaggccgcaatcggccggcacaccacaataattgaataacgcaataattcaacacagtaataactgaacaataaccgggacaacggggtccatatattctttcttttcccatcgtgtgtacgccgtgccagcacaggttcacatacgatgcacacggccaccaatacacgatgcgtcatcatcaacgccctcaccgcatcatgagatactttccccgcccgttgtccacactgttgcctctacaatgcctgtgatgcacgccgaacggcatcccgcgcagtgactgaagaacgaaaacaccaagggacggaaatggataacgaactcttcgaaaaggcgccgattccgaaggcgtatttctcgctggcgatgcccgtggtgctcagcatgctggtcaccttggtgtacagcatggtgcgcatatcttcctttccgaattgtgtggctccctctgacgagggagctgtcagcgcagctgactgagggagagaagcagacgaatgactgtatcggctgaaagccgatgccattttttgcggctgcgccacaagtctccccctcagtcacggctttgccgcggcagctcgtcccgcaattatggagccttcggctggcttgactgtcgtcaagccctcgcctggaaacgcctccggcgtttccttcacggctcggcccatcagagggagcttgtgaagctgcttcagttgtagggttcgtacgacttgttcggtggtgcgggtcacgttggcggccgcgtcagccagcagttcgctgaggctggcggcaccgggggcgatgccgaataccgcgtcgatgccgacctcatgcagttcgtcgatgcccgtgccgatgtgtccggcgacggcgatcacgggcttgccgtggcgcttggcggtttcggccacgccggccggggttttgccgaacttggtctggaagtcgatggagccttcgccggtgaacaccacgtcagcccattgcgcggccgcatcaagtccggattgttcgatgacgatggcgatgcccggacggaattcggcgtcaaggaagcctttcagcgcggcgccgataccgccggcggcgcccgcgcccggcacgtcgttcacagcgacgccgagccggctttcgatgacctgcgcgaagtgcgccaacgcggcgtccagtgtggcgacgtcggcctgggaggcacctttctgcggtccgaacacggcgctggcgccggtgggaccggtcagcgggttggtcacgtcgcaggcggcggtgatggagacgttcttgagagccgggtccatcgtgctgatgtcgatggtggccagatcagcgagggccgctcccccgtgcttaagatcgttgccgttcccgtccagaagacgaacgccgagggcctgcagaagtccggcaccggcgtcgttggtggcgctgccgccgagcccgacgatgatgcgcttggctccggaacgaacggcggcgagtatgagttcgccggtgccgtaggaggaggcaatcaacgggttgcgttttttggcttcaagcagtgcgaggccgctggcttcggctgtctcgaccacggcggtcgtgccgtcggcgagcaggccgaagtggccttcgacaggtcggccgagcgggtcgtggaccggcacggcgtgcatcgatccgccagtggcgtcgacaagcgcacgtgcggtgccttcaccgccgtcggccatggggaggcaacggacctcggcatcgtggtcggcattctcaatcccctgagccatcgcccgggccgcctccatggcggtcaggctctctttgaaggagtcaggggcacataagtatcgcgtcatgcttcgagcataccgcacgatacgcggaacggtaatcgctttccgtaattcgcgtgattatttttgttcaaaattcaggctttccaatccacaatgctactattgcaagcaaaactgcggtatcattgcggtaagcgtttagacatgttttccgtttcagggaagaaaaggaccgattcgatcgtggctgtacagaacgataaggcgcaatcgccagcgacattgatggacgtcgccaaagaagcccaggtctccatcgccaccgcatcccgtgtgctcaacggcagcacccgcaaggtacgcaaccaatcgtatgtcaaggtgatggaagcagccaccaagctcaactatcgtcccaacgcctatgctcaggcagtggccaaaggcactgcaccgaacatcgtgctgctggtctccgatatctccgatccctacttcgcatccgtgtcgcaaggcgtggtcaaggcggcggccgaacgcggcatctccgtgaccatcggcgtggcagccaccccgcacgaggagttggaggcggtgcgtaagtccgtatccaccaggccgcgcggcatcatcatctccgaaagcgaatacaccgacacgccggaacgccaggcgttgcagacggaactcatccagtacgaatcgtccggcggacatgccgtgttcgtactcaaccgcaacctgcccttcccggccgtggacgtggcgaacgacgtcggcgcgcgtgccatcgcaaagcttatcgtcgattccgggtatacgcgccctgcgattctcaagggcgatgacgcacaccgctcctccaaagaacgactggccggtgtgatggaagtgttggacgaggcaggcatcaccgtggacccgaaagccgtggcaaacggtaagttcagccgcaccgacggctatgcggccgtcatgcaaatggcccgatccggactgctgaagccgggcgaaggcgcactgtacgacggcaaaggcatcgattcaatcatcgcgctcaacgacgtgatggccatcggtgcgatgaccgcgttgcgcaccaacggcatcgagccgggtcaggaaatcggcgtcaccggtttcggcgacatcccctactccgccgacgtgttcccaccactgaccaccgtgcatctgccgctggccgaaatgggccaggccgccgtggacagcatcctgtccaaccgcgatgacgcggaggccaccggcggcactgccaaccgcctgatctacgtgcaaagcgccccggacgtagtcctacgcggttccctcccccgccggtaaaacaaaaaagctccctctgacggtgtaaccacaactagcgaacgggtaatggcgactgccgcgcaccataccaccgactcatacaccgacgtaatcgaagaactgttcgattaccgagtcattgagcaaccggccacgacgagtgggcaccactcgatgattatcggatacggtaatcaggccttcgctgatcatgggggcgagttggtcaaccgaaacggttcggagagtctggggcgtgctgctcatacctgcatcgttgatggcgcggttgatgcggtcgaggccaaggccctcgtgcaggcgcagcccgagcatgatgagctcttcgaggttttcctcgggagtgatcgtctcgctatcggcccacggcacacggttctcgttgatggccgtgccccacaaacgcgggtgcgcgatgtcccagctgcgcagaccgtgtgagacagaaaccacccccagtccggcatccgccggacagcccccgccagcgggggcatgaatttcttgggagttgttcccatgcgcgttgatcatacctagttcggcgttggtttctccaagttcggcgttggcctgtccatcagctgaggcagaggcaatggcttcggacttgcccccgctggcgggggctgtcagcgaagccgactgggggtggtcagcctcggtcaccgcgttgtagtgggagtgggcacctggccctagaccggcccaatcgacgttgcgccaatagccgaggttgtgctggctctcgtatccggggcgggcccagttggagacctcataccattcgaggccggcggcggcgaacaggtcgtcggcgatttcgtatttggctgcttcgtcatcgtcattgggtttgggcagagtgccggccgcgatttgacgacccattttcgtggtgggttccacggtcagtgcgtaggcggagatgtggttcacgccgaggtcgatggcggtcgtgaccgaggtgcgccaatcgtcaaggctctcccccggtgcgccgtaaatcagatccacgctggagcgcaggccggccttattggcggcattaacgcctgcggccacgttggccggcgtatgcgtgcggtcgagggttttgagcacgtgcggcacggcagattgcatgccgaaggaaacgcgggtgaagccgccggcagcgagctcattgatgtaatattcgttgaccgtgtccgggttggcttcggtggtgatttcggcgtcgggcgcgatgctccagatcttgcggatggcatcgagcatggcgaccagatcgcgggcggcgagaatcgtgggtgtaccacccccgaagaacacggtggagaccggtggctcctcgatgccgtggtcgagctgccactgcttggtcagggccatttcacgaatgaccatattggcatagttgccgcgcgaggcccccgcaccaagatccgtagccgtgtaggtgttgaagtcgcagtaaccgcagcgccgcaagcagaacgggacgtggatgtagacctcgaacactagccctcggtcttctgagcggcgcggatcttgtctttggtgtcgcggtcgttggagtcctcgccggtggacagggcggcgatgaacgcctcctgcggtacctccacatggccgagcatcttcatacgcttcttgccggccttctgcttttcgagcagcttacgcttacgggtgatgtcgccgccatagcacttggcgagcacgtccttgcgcaacgcacgaatgttctcacgcgcgatgatacgcgaaccgattgcggcctgaatcggaatctcaaactgttggcgaggaatcagactacgcaatttcttggtcatcatcacaccgtacgaatacgccttatcgcggtgaacgatggcactgaacgcatcgaccttctcgccctgaataaggatgtccaccttgaccaaatcggcggactgctcgccatcctcatggtaatcgagggaagcgtagcccttggtgcgggacttgagctgatcgaagaaatcgaacacgatttcagccagcggaatgcggtaatgcatctcgacacgatcggtggagatgtactccatcgtgcccataatgccgcgatggtcctgacacagatccatcaccgcaccgataaattccttgggtgtgatgatgtcggcggcaaccatcggctcgacgatcttcttgatcttgccgtccgggaactcgctcgggttagtcacgtggtgttcgctgccatcctcggcggtcacgtcgtaggtgacgttcggagcggtctggataaggtcgaggccgaactcgcgggagagtcgctcgttgacgatctccatgtgcagcagacccaggaagccgcagcggaagccgaaacccaaggccacggaggtttccggcgtgtagatcagggcggcgtcgttgagcttgagcttgtcgagtgcatcacgcagttcggggaattgcgcgttgtcgatcgggaacaaaccggcgtagaccatcggcttggggtcgcggtagccgggcagcggctcggtggccggtcggacggccgaggtcagggtgtcgcccaccttggactgactcacatctttcgcaccggtgatgatgtagccgacctcaccggcaccgagtgccttggtacgggtcatatcggggctgatcacaccgatctcgatcggatcgtgggtcatgccaatgcccatcatgtggaccttttcgcggtcgcgcagttcgccgtcctccatacggatgtaggtgacgatgccgcggtagggatcgtagacggagtcgaagatcagcgcgcgggcaggggcctcggggtcgccgtgcggggc

SEQ ID NO: 2339 - DNA, 100782 bp, Unknown
  R119_18m  MAG No. k141_56452
atggtcaccggacagaccgtggccaatatgctcggcgtaccggcgggcaccttgatggctgagttcctatcctggcgcctcgcattcggtattctggctgcatgggcggcaatgaccatcgtgctagttctggcatggatccccttcgttgcgccgattaaggacgccggcatcgccggtcagttcaaattccttactcgtcgtggaccgtgggtgattctggccgccgtattcaccggcaacgcaggcgtgttctgctggtggagctacgtctccccttggctgcagaagaccggtggctggtcgtctaacctggtaccgctattgatgatgcttgccggcttcggcatggtgataggcggtcttatcggcggtcgcatcacagataaatggcgccacgccggcactgccgcgctgggtcagacgatttcctgcatcggcttgctgatggttttgctactgccgggaaaccagggcactactgctttgctgaccttctggatcgccttcggcctgttcttcatctccgctccgcaacagctgttgatgaccgaagccggccaaggcggcggcgagctcatcgccggcgcagccgtgcaggtggccttcaacttcggcaatgccatcggctcgattgtcggcggcgcgatgctcaccaccttctcgatgaactatcgctataccggtctgggcggtatgccgctggccctgcttgccgtagggctgctggccttctactcgtggcgctgcgaaaccgataccgacgccattcaccgcatgcgcgaaatcaaggtggactgagaccggacgtcacattcacgcataatcagcggaatgtgacgttgctctcttcttactgaagttcatctgcggttcgttttcattacacacgtattccaccttgcctttctaagttctcactatgaaagagcatctttcctgatgcctcatgaaggaagggaatacagtgaaacccatcaggttcacggcgaggatgattgccacactcgtcgccgcagcgacgctgtccagcgttgcgattgcgaccacgacggcttctgcagatgaatccgtaccggcagcgtccacggtcggtatcggcggcatcgccgccagcggcgccacggatgcgttcagtgaaaccaagtacgcggccaccaccgaaggccgttacgaagcctcggtcgacgcgaatgacgtcaccggctatgcagccgttccgcagacgcgtgcggccaagccgaatcttgtgcagctgcttggcgaatatgacagctactggcagccggccaccgaaaccgctggcggcaaggtgctcaacaagaccgtgctcgatcacgatgacgcctacatccaacagatcaacaacgccgccgccgaagacggagacggcacgaccgctaccgcacagcagcagcgcgctctggtggacgcggatatgagcgccgatgagaccttgccggactccctgggcccggtgctcggcgaatatttttccgccggtctggccgacggcagcctgaagaaggtcgcggacatcttcaagtacgatacaatctccacctctaccgccaagaagcacttccagcatcctcgtcctttcgaggatcgcaccaatggcggcaagaacgacatcacgaacatcaacgagaacatcatgcgcgtccccgactggactgacgcccaaggcaacgcgcattccgccgaatacgacgggctggtcggttccggttccttcccgtccggacacaccaccggcgcatactcctggggcgtggctctggcaggcatgctgccacaacttgctccagagatcctgacacgcacctccgaagcgggcaacaaccgcatcgtgctcggcgtgcactatccgctcgacatcatgggcggccgcatcgacggcgaagtggcaaacggctactactggggcacttactacgacaagtacgtcaagccggcatccgaccagctgcagtcctatctggcagccaagtgcgtggcggacggccacgccaccaaacaggacaccgattacgcgactgtgaccgaatgcgtgaacaaccttggcgcgaacgcctccaacggttaccagaacgcctttgtggatgccgtgagcaaggagcccgtcaccgaccgcgcctcggcgttgcgcgtctacacgaaccgtctgacctacggtttcggcaagaccaccgccggcaccgcattcaccgcgcctgaaggctctgccgacttgttgaagatcgcgtacccgaagttgcaccgcgaccagcgcgaagccatcctcgccaagaccgcgattgacggcggctacccgctggattcctcatccgacggatggcagcgcatcaacctagccgcagctctgagctccaccgtgacgttgaacgagaacggcgatgtcgtcaaggtcgagcccggcgcggccaccccgtccgtgatcggcgaggaatacgccgacaagggcaaccacccggattccgacaacggtggctccggcaaccccagccaacccggtaaggacgccaagcaagtgaccgtgttcgacatcaccgacttccacggacacatcgaaaccggccagtgggtcgaagccgcttatcagaagcttgccgtgcagcacaacccgggcaacagcgtgttcgtctccagcggagacctcgtgggtgcttccccattcgaatcctcctatttccaagacactccgacgctgaacatggcaaaggcatgggatctgagtgtgagcgccttgggcaatcatgagctcgacaagggcactgcagacttcaacaaccgcatcgccgaaccgaagtacggcatcgactgggtcgccgccaacatcaccggcggctcgctgacttccgaccgtctcaagccgtataccatcaagaccgtcaacggcaaaaaggtcgccttcgtcggtgccatcacctccgatctgaagaacgtagtctcccccagcgtgatgcaaggcgtcacggtgaccgacccggttcaggctgtgaacaaggtggccgaccagctgtccgatggcgatgagtccaacggcgaggccgatgcggtcgtggccctgatccatgaggatggcgacaccatcgcctccgacggcgacggtctggacgctaacgtcgatctggtctacgcaggccacagccaccgcaacgagtacggcaccaccaccaagtccggagcgccgatcatcgaggccggcaagtacggccaggatgcagctgtccaggatctgtacatcgagggttccggcaaggattccaaggtcaccgtgcagaacgcctcccagtatgacgtgacgtacgtgaccaacaaggacggcaccgctccggccaagggattcgagggtgacgacaacggcccggccgccaaggtctacaagcaggctcaggcggattccgccgaggctggtaagaaggtcgtcggcaccatcgacaagtcagcgaatttcgccaagggcaactggagcgccgaaacccagctcggcacgctgaacgccgatgccgcactcgaatccgccaagaagacgcccgtgggcgagaaggcctccatcggcttcatcaatccgggcggtctgcgcaccgacaacctcgatcttgacggcgacaagcagatcaccgtcaaggaggcgtacagcatgttgccgttcggcaacgataacagcgtggtcaccctcaccggcaagcagctgaaggacgtgctcgcccagcagtggcagatcaaggacggcaagtccaatgtggtccgtctcggcatctcctcgaacgtgaccttcgtgtacacgctggtcgaggacgccaacaccaaggcaccggtcgccaccgtctccgacgtgttcgttgacggcaagcagatcaaggacaccgacaccgtgacggtcgccggcaactccttcctgctgaccggcggcgacggcttcaccggttttaccgcgcagggtcagccgcagctgaccggcacggtggatgtgcaaggtctgatcgactaccttgccgatcacaaggatgtcaaggccgatgactcgcctgcaggcatcgagctcaagtcctcctccgttgaaggcaccaaggcatccctgaccttcgacctgccggtctacgcgaatggccctaagccaatcgccctcggcctgtatgtcaacggcgtggacttcggcgtgaccaagctcggcagcgccaagccgtctgagttcaccgtggccaagacgctgagcgccgatgaagccaagacgttcggcggcaccgtctccaccgtcaacccgcagctgctttacacggacgccgagatcgccgccgccgaaaaggagcgcgccaacggttccggcgaacaaggtgggaacaacaaccaaggcggcaacaacaaccagaacggcaaacccaacgccgacaagaagccgacggccaagccgaacaagaccgatctgccgggaaccggtgcttccatcgctggaatcttagccgcagtcagcctgctcgccgccgccggtggcgtgaccatcgtgctgcgccgtcgccagcaacgctgaacgattgtccgacgcctgtacaggtacggcaataaccgataactgaataccgaggaatagccccgcacgtcatagcatgcggggcttttccatgcctgttgagcctatttccactgaggacgacaacggggaaaacgacaagcacatacaccagctccggcagccgccgcacactgtaacgacactcacatcggcggtctccaaatcgttcacagtacgctggaacctagcaataatcggtatctcacgacgaaggagattatgtatggccgatgatgcgatggacgcgcggctggagcaggcactgctcggcatgcaggcgaaacacgcacatgatttcgatgcgcctgaaaacggcccggcggctcagggcggcaacgaactgcatgactttgacgtgaacgaattcctccacggcctcgacgccatcttcgacgcccacaacgccgcagaaaaggcgggcccgtatcttgaacaagcggcggtcgacgcggaaaacgccggagacgaagccggactgctgaccgtgctcaacgagacgatggggttctaccgctcgcaaggccgtcacaaggagaaccagtggatcgtgcagcgcgcgcttgagttggccctgcacatggggcttgagggtaccgaaagctgggccactacgctgatcaattgtgccactgccatgcgcgcggccaagcggtacgatcaggccgaggatctgtatcatcaagcgttggattgcgccaataagaacttcgctcccaacgaccgacgcctggctgcgctgcataataacctctccatgttgtacagcgaaacgaaccgattgccacaggcggaaatcgagctcaggcaggcgttgcacatcgtcgaggcggcgagcgtgaatcctgatgccgacatcgacgtggcctcgtcgaacaccaatctggctctggtactgctgcaggagagcaagctcaaggaagcgcacatccatgccaccaaagcgttgaccatctatgagactggcaagctgacgcactcggcgcattatgcctccgcattggctggctgtgcgcaagtgctgtatgtcgaacaccgatatggcgaggcggcctctcattaccgcagcgctttggcggtgatcgccgaatgctatggcaaggacaccgattactatcgcgtcaccgaggcgaacctgcgcgaagccgaggcgcaaatcggtaacgatgacgtgcatgcagcgaacagcgccgatgcaaccagcaccgaaactaataccaacatcgatgctactgccgaaatcgctgtgtccggtctcaaattggcacgcgcgttctggacacaggtgggcaagccgatgattacggcacagtatccgcaatacgtgggccgcattgccgccggactggtggggcatggttcggaatgctatggctttgacgacgcctattctcaagaccatgattttggcccacgcttctgtctatggcttaccgatgatgattatgaggcaatcggcgagcagctcgaggccgattatgaagcactgccacgcgggttcacgatggacgcgcaaggccgtgtgacatttatcgatgcaccgttctcccccaccacgccccgcgcacaaggtgccaaccgccgtgacggcgtgttccgcatcggtgacttctttgagtcgatcaccgggtatcgcactgcgcccgcgcagaccgcgccgcatgagtggctgatgcttcaggaatcgaccttggccgccgccaccaatggcgaggtgttcgccgatcccaccggtctgttttccaagacgcgccaagggttcaaaaacatgccagacgatgtgcggctcgcgctgatctccaagcgactcggcatgatcgcccaagccggtcaatataatctgccgcgttcgttgaagcgcggcgacggcgcggccgcatggctgtccatccacgagttcgtgcaggccaccgcctcgttggtgttcctggttaacgtgccgatggtggtgggctatatgccgtattacaagtggcagttcgcagcattgcgcaagctgtctggctcgatgttcgcgctgttgccgaacgtgggcgaacagttggaaaccgtgatgcgattgagttcgacagcctgctatggcggggccggattcggcgaaggcggcaagggcgcggctccagcaatcgagaaaatcaacgatgttgtggagcagattgcggtggatatcgtcagggaactcaaacgcgaacacctgaccacgtccggcgagaccttcctcgaatggcagcgcccgtatgtcgaggaccacatcgtctccgatgatccggtgcttaaaagtttgtagattcaagctccctctgtcacggcttcgccgtgccatctccctcatcagagggagatattagtgaaaggaacgtcgatgaccaacgaactgactgatgatgaactgcgcgaggctattgtgcgccatgaatgggatcagttccagcgcaccaacaatgagggtggacgcgcggcatgccaaggcaactggccggtgttccaccagatgcggctggcccagttcctcacatgggagcggccattactcaccagctatgccgctgatcttgacgcggccgaccacgtgggccgcaacctcgtgaccgaaaaatacggccgcatgatggcctccaccgcgccggaagatttcacgaagaacatagagccgtatattccgcgtccctctgaagagcgcgtggcccgtcaggaacaggtcatcgcccagcaggtcgcctgggccaaggatttccgcgagcgctaccccaagctcggcgaggcgatgcgcgtactcaccaccgtcgaagacacaccatctgccacctcattcgaaacctatctgcgcggcgagcttggtacgtattccgaacggaccttccagctctacgaggtgatgattagcgagcgcgccgcagccagcccgcaacgcaatatcactgaggaaaccttgttgcacacagtccagctcggcggtttcgacactttggatgaggctgaagccgctcagcgctgacgacagtgcctccacgccgtcacgccccatccaccttcccgaatttgtgacgctcacggcgactcagtggcacatattcgggaaggagccggtaacgaccgtgaatatcacagactgaacaacccccagaaagacaatatcgtcaatgtgacaagtgcagccagtgtcaccatcacgcaaatgacacgacgcacgccgataatgctggcgcgataccgccacatacgttccagttcccacgcgaacagcacgaccaacagcacggtcagcacctgcaatgccctccacccaagggaaaacaactgcggttgaggcataaccaatacagccgatacgcctacggcgctcatatagccatacaacagcacggtaatcaccatcaccgctgtgccgataccggcagataagccggcaatgccgtgcaacgtacgctgttgggcggctcccagcccactcggcgtcgcatgcatggcacgcacagtcgccacactacgtcgcccggccagcaacgtctgtagccaagaaaacacagtcaagccaatacccaatatcgccgccatcacgatcagcacgggccctgccaccatcagaccggccagcacgccgagcgagccgacgataccggatctggtacgttgcggcgcggcgaagcgctggtgaggtgtcgcaccggcgacttggggcgttgcccatccatcggctttggttccggcagtcacaccgttcacccaattttccagcgcttgcgtatagccttcggccaatggcaggttcggggtgaataagccctcaccagcccgcatctgatggttgccggcaaaatagcgtacggtgacgttctcgttgccggacttgttggccgtggcgatgatccgctgcgccccctgttcgatgggcatggccgtatcgtaggtgccgtagttcaccagcaccggcatggtgagggatttcagataccggtcggcatcaaagtcggcataggccagatcgaatggcgcgtagtccagcgacatcaatttggccatgtctttgaccacgggcttgggcgcgccggcctcatgcgtataggcgctgacagccatggccatttgctcacgtccattgaacaccggtgcggatgtaagtatggcaaaggcaatgtcttgccgtttcgaggttagaatcgtggcgatccaggtgccttcggattcggcgtagatgccggttttggcggggtccacgccgcttatgccacgcagcacgtcgagcgaacgcccgtattcgcgagcaaaacgcgggtagtcgcgatgcagcacggtgtagttgtcgttgcgcttggccggcaccaaggtcacgatgccggcagaggccatggcgttggcgatatcgccgaaatcctcggcaccgctggtaccggacccgtgaatgaacagacaagccgggcgtggcccgggagcgtcgaccggttcacgtagtacggcgggtagcgtgacgccgtcgccggtcttgatggatagtcgggtttcacgcgtacgatatcgcccctcgtggggaatgttcgcatgggcaggggtgatggtggtgtcggcagaagcgatagcgatgtgcttggtgtagggccgtgtgttccattgcggcatcatcgcccagccaagtgtggcgaataccagcgtcatcgccatcgcggtggcgatgacgctcgctacccgccgcgccgaaatccgtttcatagttactatgcctccccccatcagcatagaacggtcggctcccgtcataatgtgcttctactgggaccgtaatgcaatggttgtaacgctattttctcttcttgacggcaccgactatggcccatacaacggccactattaccagaataagtcccactacggcgcagataatagccgtcagcaattgcggattcggcgagaacagcgaaatcatccgatccggagatatgtacccgaaaaccagcgcgatcacgccgataatcacgcctaatagtccgaataccacagtaggcgcgctggtgctctgtttctggatgttcttggcactcttgacatccttagcactctggacgttcttggcgatcccctcagtttggcgtggtttgccggcggtctgagactgctcataggaaggttgtgctgaagatgctgcgtacatcggtacatcatcggcagatggaatcggcccgccatccccctccacggcatcggcaactgtttccagggcaatccgatctgtggttggttcgatgggcgatggagaggcagctgttgcctgcgtatccacatccgagaccgacgcatccgcatgattgtcggtgacgggcagcacagccgtttcgtcatcatcagctgcggatggcagcaccgtggtatcggttcggtcatcgacggtcaccatggttgttgtcgcggtggtcgcgtcggtttcggaaggtatggccgtggtcggtgtcgcatcctcgatggaggcgaattccttggtttcatcagtcatgattccatctcctggttgtaacggcttgatcattccgattgttcggttgtgttcttgcttgtgctgttgccatcgtatatatcggcaagcggctggaacgtggagcctttccaatcggaggcgtacaccacgttgacacgtgcttccaccgcatagggaatattgatttttaattctgggccgttgtccggcatggcggatcccttatccaaccattcgtaatcaggcccattcatgggattggtggcactttcagcttcgaagaaaccaaagcttagacccatgtagttgttgtataccatctcgtatttgccgccaacgccactcgaagtgaagtaggagtcggcggtgccgaaggcgtaagtgcaggaatccggcagaacgatatgcacttgcgcctgtgttgcggctatggtgatggtaccgaccgggcaattactgatggaagttttgccatccagcatcttcaccgtgtgcggcccatgtgtcttgccccaatcggaccaatcaatgatcgcctgatcggtgttgtagttttcaccgctgaacgccacaccttgctgcaatgtttcgaacgtggcatcgctggcatcggcaacgaagatgccatccttttgcacatcgttcatgccatcgctgtttctcgcactgacagattggctcagtgaaacaacagtattgatgccgctggcaccaagatcacggtagtgcacgccatacgtgcctgaaacgatggtcatgcagagcgcgcatccaccggcaaccagtccgagaggaatcagaccaccggtacgccgccctctgaatccgagaatgatgaccaccagccccatcactatgcatactgcggcaatccagatggtgctcagacgcataatgccgataatgcccatgtcgtttacccaaatcagtcccatcagaccggcaaaggagaggaaggtaaggcccagtatgctcaagaccacgattgggcccgccggcttgcggcgcttggactcggtgggggcataagccgtcgcattcatacggtcgggggcaaacggcccgttgggtactgtgccgggcatcgcgctgggcactgtgcccggcatcacgctgggcatcgactgatagacaggctgtgaaacaggttgtgaaacactaggcgcggttcgtgaaacagattgtgaaacaggttgcggagctgaatacaaaggagatagagggaccggttgcgcggctggatatgaggcaggctgtggagctggatacgacacaggctgtgaaaccggtcgcggcgcagatgccccgaatccgtacccttcctgctggcgaatgccgcttttggccaacaaccatagcgctaaggcggcgagcgcaatacaaacccaccccgcacctggaatcacgattgccacggctaggaacaggaagcatccaagacaattccagtcccattggccggcaatgaggtcctcggccaagatgtgcccatcgcgtacatccggcatcagaaaccagccgagtgcgtacagagctgcgccaaaaccgaagaacaatgtacatacaatcaccaacgcacgtactaatgtggggctccagccaagccgtaaagcgatgccgctgcatacgccaccgatccaccggtcgtcgccgcgaaccagtccactggatcgcacccaagtgaagaagcgtcgcgatgtcttgtttttttgcggaccaggctgcggctgtggctgatacggattcgcgtttggattgctcatgattccattacaccgcccgaccactgccacaacgctcggggaacaccctgattgttccctgaacaccgggtaaaaccccggccgcaacgccctgagcgcggcacaataggagtatgacgtcatctcccgaaccattgctgcccgcgcgcatgccgctgatgcgcccccggcagggccgctggctcaccggcgtgtgcaagggcatcgccctgcacttgggcatcggcgtgacatgggttcggattgcgttcatcgctctgaccttcctctacggcgcaggcatcatcgcttatgtattcctgtgggtgttcatgcccgccggagacccggtgacggctgcagctcgcacagtgcccgttgatcaggcgccgcttgcgcgaggcaatcagccacttgccgctcatgacgacgaatcggctgccgcaccggaatcattgtccgaggccatccaacgtgctccgaaaccggccgtcgtggcattggccggtttcgcgttgatggccaccggactgctgctcaccagcaccggtgcggatgtccagattgtgcttccgctgctggtagggttgggcggcatcgcactggcatggatgaatcttagtccgcgaggcacgcagctgttgtctatgttgggcggcatcgcactgattttcatgggatgggcattgtatgtgcataatgtcagcattcccgggtggggcagctctcctcgacgcattgttgccagcggattcgtgatgatcgtcggtatcgtggtggcggtgatgccgtgggcgaacgcgatgctgcaacgactcacccacgagcaggcattgaaggaacgcgaagaggagcgcgcggacatgaccgcccatctgcatgatggcgtgctgcaaacgttggcgctgattcagctgcactccgaggaaccgactaccgtattcgccctggcgcgtagccaagagcgcgagctgcgcgaatggctgtatcaggaacgttccacatcggatcgttcggtgggagccggattgaagcagatcgccgccgaggtggaggacgagcacggcaaaccgattgaggtggtcaccgtgggcgacgcgcggccgagtgcccagaccgatgcgctgctggacgccacccgtcaggcgttggtcaatgcggtcacgcatggcggcgagccggtgtctttgtattgcgaggccagcgacacgatggttgaagtgttcgtgcgcgaccatggcgaaggcttcgatatggacgccattccgcccgaccggctgggcatccgcgaatcgattatcggccgcgtcaaacggcgcggcggtacagtggagatagtgtccagggccggctggggcaccgaggtcagaatgcatatgccgatcgcgctgaaagcggcgcagggagaacatcgatgagcgagaatgagacagccaagattcgtgtggccgtggtcgatgaccatgagatgttccgtgcgggcgtaatcgccacgttgcgtgattccttcgatatcgtcggccaagcggcggacgtgcccggttcggtggcgatgatcgcacagaccaagccgcaggtggtgttgctggatgtgcacgtgcccggcggtgaaggtggcggcggtgccgagatcctcgccaaatcgcggccctactcccccactaccgtgtttctggcattgtcggtttcggatgcgccgcaggatgtgggggcggtgattcgcgccggcgcccagggctatgtgaccaagacgattaccggcgctgatttgatttcatccatcaagcaggtgcatgagggctatgccgtgttctcgccaaaactggccggttttgtgctttcggcctttcagggtgtgccggcggcggggtctgatggcggcgctgatggtgcggcacgggctcatgatgaggagctggaccggctgtccgcccgcgagcaggaggtcatgcggctgatcgcacgcggatacacgtataaagaggtggcggccgaactgttcatttcgatcaagacggtcgaaacgcacgtgagctcggtgctgcgaaagcttcagctttcgaatcgcaccgagctcacccgctgggccgccgataggcgcattgtgtgataaacgacagatgagctccctcatcagagggagctcatctgctcatatcactcggcgtcgcggaaaccgttggggttcttggtctgccagttgagggaggaggcggccatgtcgtcgatggtcagctcggccttccagccaagctccttctccgccttggaagcgtcggcgtagcaggcggcgatgtcaccggggcgacgcggcttgatcgtgtacggaatcggatggccggcggccttctcgtaagccttgatgacctcaagcacggagtagccgtggccggtacccaggttgtagacgaacacgccttccttgtcgatgtggtcaatgacggccacgtgacccttggccaggtcgaccacgtggatgtagtcacgcacaccagtgccgtcgggcgtgtcgtagtcgtcgccgtagacctggacttccttgagctcgccgaccgcgaccttggccacgtacggggtgaggttcgccggaatacccttcggatcttcgcccagcaggccggactcgtgtgcgccgaccgggttgaagtagcgcagcagcacgatggtccaggacggatcggccacatgtacgtcgcgcagaatctgctcctggaacagcttggaggtgccgtacgggttggtggtgccgccggtcggcgtctcctcggtaatcggcagttccttcggcgtgccgtacacggtggcggaggaggagaagatgatcttcttgacgttgtgcttcttcatcaccttgagcagcacaagcgtggagtacaggttgttgtcgtagtattcgatcggcttggccacggactcgcccacggccttgagaccggcgaagtgaatgacccaatcgatgttgttttcggtgaagacgcgttccataagcgcctcatcgcgcacgtcaccgtcgtaacgcttgaccggcttgccggtgatctgctcgacgcgctcaagcgccacgggagacgagttgccgtagttatctacggaaataacgtcgtagcccttgtcgagcagttcgatgtcggtgtgggtggcgatgaatccagcaccgcccgtaaccagaacagtagtcatatctcctcctttggaaggacttgccttcggttttccttcagtattgagcttacttcacttgacctgtttcacctagcggcaaaaccaagactttcgaggaatgtttgcgtggtggctttctgcttgaagacggccgtgttgccgaggatgcggtagcagacgctgccgagctcgtcacgtacggcttggtggatggcctcgcggtcgcggtttccggccaatgtttcagcgagttcgccccattcgagactgaattcgctgacttcatcgggcaaatcgcggccttcggcgagcgcctcctcgacgatgccgagctggtcgacgagccgtccgggcaggatgaacaggccttgggcttcgatcagtccaatcggctcctgcttgaccggccagtattcggggtgtgcatggaaaataccttccgggtactcgtcgctgatcgcattgttgcggaagatgagactcatctcatagccacgttcggtgatgatcgcgctgggcgagagggcggattggcggttgccgtccgcgtcatggctggcgatgccgttcgccgcgtcgtcataaccgacccatgcctcgcggatgatgtcggatacgtcgatgatgctctggcggtttttcgacaccacacgcacggcggtaccgggccagtcgaggatttcgaccacggcgtccggatagtcggcgagcgtgaaggcggcccaagtggcggccttgtgcatcggcagcagttcgccgccgccctggtagtggtcgtgggcgagcaccgagccgccgatgcgaggcagcgcggcgttgcatccgaggaagtatccggggaagcggtccacgaagtcgagcagatggccgaaggtgtcgcggtccacatgcatcggcgtgtggtcggtgttcacgcagatgccgtgctggtcgaagtagccgtagggcgagaactgccagaaccatgactcaccgccgagcgtgaccggcagggtgcgcagcgtgcgcttgtcacgtccggcgaagccctcgttctcatggcagatcgtgcacttcgggtagccgccggacacggcgttgccggccgccgccttcttcatgttcttgaattcgggtttggcgaggttgatggtcaccgtcagcccgtgcgagtcgaagcgcgggttccggtcgagctgggcacgcttgacataattgttggccacacagtagtcgtagaaccattgcatggcggccatgccgccgtccctgtgctcgatgagcaggaaccggtcgtcgagatcggcggggttggcggagaggatgcccatgatggtgtcggcgtaggccgggccttcctccggatcgaagaggccggcggttgtggcggcggcgcggaaggcggcgagtagggggtcgggggtcttttcgtcagagggggcctggcttcggctgccgacaatgtcttggactgcgtctgacactgacgccgccgacgttgtggttttgggtccggggtaggaatccaggtggaagagggcgaagatttggttgcgggtccagtctgcgttgcgtggatcgaggtcgagatgatccaaggcgtaatcgactagggcgtcgatgctggcgtatacctcggtcagctgatcgctcattgctcggcccccatcatgctggttcgggtatggttcgactgacggctcacttggcagcctccatgatgtcggctacgatggcgtgggtttcactggccttctgctccatctcctgcacgagtttgatctgggtgcgggtgcgcaccagattgtgctcggggtacttggtggcaaagtagatatcgccttccaagtagtcggcgagaaagcgcatgccgcattccatggtgagcaggttgccgctgaacggcagcagttcggcctcgcgcgcggtgatgctgccacgtagttcgcccacgaatccttccgtgtaggcacggaacagctcggtgctgaaatgcaccttgctgaggtccttttcgtcttccagagcagtggacgcaccaaagcgtatggaatcgccgaagtcgaacagcatggagccgggcatgatggtgtcgagatcgatgaccgcacgcgccttgccggtggtggcgtccatgaggatgttgttgagcttggtgtcgttgtgggtcacgcgcaacggaatcgaaccgtccctgagcccatccatcacgacggcatactggtcggcgtggctcagatagaagtcgatttccggctggcatgcggcggcgcggccgagcttgtccgcggcgagggcggccttgaagtcctcgaaacgatgcggggtgtcgtggaagcgggcgatggtttcggtcagctggctggcgtcgaattcggacaggaagttctggaagtcgccgaatgcgctgccggcctcgcggaacacgtccgggttcggcacgaggttgtacgacacggtgtgttcgatgaacttgtagacgcgccatgcgccgccatcgatctcggcccaggtggcgccggaggtggtgggcacaatgtccagcgtctctttgccctgagccttgagagtggaggtgaccagttcgacattgcgcatcagattcaccgtatcggggaagatgctggtgttcatctgttggaggatgtagcgggggccgtccgtggtcaccagataggtggtgttgatatggccgtctccgtaaggttcgatgccggtcacggcaccttccagcgcaaaatgcgaggcgatgccgaataaaacttcattgctttcggtcatgatgggtccgttctccaaaacgcgggaatcaggcttcacgccatgcgatgccgctgtcgggcaggtcgaagtcctcggtggtgccatcggccagagtcaccgtggtccgctgcggctgatcggtgttgttgattacgcagtacaacccttgctcggggaagtgcgccacctcgcactccgggttggacgagctccaagccgcatacttgtcttcgttgtgggaggcgtagaacagcacgcgttccagcagtcgggcgttggccgccgaatagggcagaccggagatgtacacaccgcggccttcgccataatcattggtcgcgagctgcacctgcccgccgtccgcgcgcagcagggtcacgttttcattgaccggatacgtgttgagcacgggttcgccgaagtcgatgccgcccaacggcttgatggactggccaccgccgcaaccgctcagcgggatgcggtagccggcctgttcccaagcctcgcgggccgccgggtcgaccggcacatcggcggtgatgaagtggtccggcaccaccggtgggaagtacttgtccacggagagggtctgatagcgctcctcgtccacgccaatcacgtcggccagctggaagaaccggcccgcttggaagcgcggtgccgagctcggctcgcccacgcccacgaacgcgccgccaccacgcacccaggcgcgcacggtttccacgagcttcgggttggtccacacgtcgccgccggtgaatgcggtgtcgaccgggccgccgttgatgattacgtcgatatcactatcgatgccatgcgcgagtacgtcgtcgaagctgatgaaccgcacgttcacgcgcatgccggacagggattccagaatgccgtagtaggagtaggtctgcttgttgggcagggcgtgtgccacggtgaacgccatccaggaacgcatcttgccccaggaattcagaatcgccacgttgagctcgccttcggcggccaccccaccggtgcggtcgtggatgtcgcggaattcgtcggcgatatgggtcaccgtgtccacgaacttcgggaacttggcggccaaggagaggtagccaccgtagcccatacggccgatcggcgaacgcaggatcgcgcggcgggccttacgccagttgtcgaggccttcgatgctcgggtcgttgccctcgtagaacgtgtcggggaagaagtacggcaggaagcgtccttccgtgtatttgacgcccggaatgtccgcgatcatgcgggtggtggtgccgtctccgatggagccgacgaccgcatccaaacccagcttttcgaacccgtccttatacggttcggtaccgatccactggtcgccaaggaacatcatggcttccttgcctgccgcgtgcgacatgtcggcaagccgcttgacgttctcgcgcacgaatccggagaggaagtcaatccagtcgcgttgcgacttgcggggcacgcgccacgcggagttgtaggcaccgccatccacgaaatcctccggacgcagacggtaaccgtactccttctcgaaatcgtccaatgcgcgcgggctcacggtgcaggcgcaaccgaaccagtcgaccaccttttcgcgacgcttggcatcgaacaggagcgtgaactggtagaagaacgtggtgaaacgcaccacatccacctgcgggctgtccttcagccactgctcgaacgtatcgaacacgaacttgcgggtggccggatggtagatgtcgaacggaatctcgtgttccttgtctccccaatcattggtcaggtggttgtacatctcgaccgggtcccagatgatgtaggccaggaaactcaccgtgtattcgtgcatcggcacggcagcggtcacgtgcacggtgtcctcgcccgggtcgagcgtccagccggacgggtccacgacctcgcccgtggtgcggtccacgacttcccagtacttatgagggtcggcgtcacggttaggcttgagctgttcctcgaagaaaccgtccatcagcggcacatccaccgcgttggactcggccaggatacgggcggtcagcaggtagacctgcggggtctcgtccatgtgcagggtgatccactcgttgtgggcgcgggtcgggaagtaggcgctgtagattttcttgccaagagcgagcactgcctcgtccagatgcgtgccgtcggagttgcggatggcgtccgcaccccacaattcggcgagttccttggtcttttcggcaaaattctcttcactgggcagcgtgaagcggccggtgctggtcatgagtgctcctttgtggggttggtcatcaaaaaactacaaagcgacgaattcgtcgcatacaaaatgaccggcgtcatcgcgggccctgggaccctgactgcgtagatccttgacgcttacggtgacgccggacgattggaatcgtgtcactgaatatgggagggacgttgcccggcaccggaaggagtgacacgacatgccgggcagcggattggttagcccttgacggcaccggcggcgaggccggactgccagtagcgctggaggccgaggaacagcacgatcacgggcagcacaccgagcaacgcacccatcatcagggcgccgcgatcggtgaacgtggccagcgagaccatgccgtacagaccgagggtcacgggcttcaaggtgtcggaagacaccatcatcaacggcagcaggaagttgttccacgtggccacgaacaggaacaggaaaatcgtcaccatggccggggccaggagcctcagcacgatggtgaagaagatcctcgcctcgctcgcgccgtcgatgcgggcggcttcaagcagttcgtccggcaccgaactctgtgcgtacgtgcggcccaggaagaagccgaacggcgaaacgcagcacgggatgatgatcgagagcatagtgttggtcaggtgcaacgtgtggaagatcgagtacatcgggatggtcagcagggcggacggcatgagcatgcaggccataatgatgccgatggccgcgttcttgccgcggaagttgaattttgcggtggcgtagccagccatcacagacacgatggtgccgatcaatgccgagacgcccgagtagatcagggagttcagcacccagcgccagaagttgccacgagtccagccaagcagcttggaatagttagtggcgatggcattgggcagctggtcaagcggcacagcaaaccacatgccgttgctaccggtcatctgggccggcgtcttggtggacgcgatgatggcccagtaaatcgggaacaggaagtagatcaacaccagtaccagcagcaccacggtgagggtcttcacggccgcggacggtcgcatggagcgaggcaaatcgtgttgcgcagcctgacgctgcttttcgagcttgcgctcggcctttttgcgggcgcgttcttcaacggttgcggagctcattactcgttcaccttcctttcggccaaggtgtacagcacggcaagcacacctgcgatcagagccatgacaatggcgatggccgaggccggaccgtcaccagacggggtaatggtgccctgagaagtgttcatggccatcatcatcggtgtatacgacttggaaatacccggatcagccgtagacatgatctgcggttcgttgaacagctgaatggtgccgacgatggaaagcagcatggccagcagggccgcgccacgcacgttcggcagcttgatcttcgtggcaatctgccaaccattggcgccgtcgatacgggcggcctcatagaggtcatgcgggatggcctgcagtgcggcaaggaaaatcagcatgttgtagccggtgaaggtccatgtggtgatgttggccatcgagccgagcacgatgttcttgttgaagaagtccacattgacgccgatggcggcaagtcccttgacgatcggcgagatttggccgttgtacaggtagacccagataatcgaggccacgacgccggggatggcgtagggcaggaagtagcccagacggaaaccggtgacatgcttgaccacgaacgagtcgatgacgatggccaacgccagtgcggcgatgatcatgatcggcacctgaatcagggtgtagagcagcaccctgccgacgccggaccagaagttgccggaagtaatagcatactggaagttctggaatcctacgaatttattgaccagctcgccaccgccgtatgcgccaccgccctcggtgacctgacggaagaagctggaatagatggcccagatgatgggcaagatgaacacgaaagtgaacaggacggcgaacggtgccatgaacgcccagccggtgcggttctcgcgcttctgagcgccggaccgcttcggcttggcggcggcacgcctaggtgctttgcccttcgcctgagtagtggatgcagtcataatacaaaacctgtcttcgcaaagaacagtaaaacaaatgacaagggccacagcgcccctgcagcaataccccccaaacaatacggaaggccggagtatgtgccccggcctttcgctatggtgatgcgaggcatcggaggtcttggacggccggctatttcaagccggcccgttgacaagacctagtgaggtcactccttgacggacagaccgaggttcttcagcgtatccaccgaggtcttctgagcggtgtcgaacacatccgaaaccttggcagaaccatcggcagccttggcggcggtctgtttcattgcagcgccgactgcggagaagccaggcatgtaggtgaagtcacccatgttgtcgttcgcggtcttgaactcagccatgacatcctgtccgctgaagtagtcggaccacttctgcggggtcttggcatccgcggtggtggcggccacgacaaggccctgggagacaaggtcatcaacctgggtgttgaaccagtcaaggaactccatggcttcggccgggtgcttggaacccttgagcacggccacaccggaaccaccatcggcgccggtcttggtgccattgccgaaccagtcaccgagctgggtgaccttccactcaccagcaccagtgccaccggcggaatcgatgaacagtggggcttcccaagcggcggccacggtgccgatcagctgaccggactggatggagttatcaaacgatgcatcccaacgcgggttggtgagggcggccttgttgtcgatcagctgctggtagacatcggccacggccttggagcccttagtctgggtgttgacgacccaggagttgccgtcgaccttgtaccacggaccggaagcgccggcctggccggacatcatcatcatggcctcatcaggttggaaggtcatgatgtacttgccttgggcagcggtcttcttggcggtctcaatgagctcgtcagcggtcttcggcacggtgatgccgagcttctcaaattcagcggcgttgtagaagtaagtcagcgggccggtgtcctgcggcagaccgtaggtcttgccgtccacctgcatcagtgcgaacgggccggaagcgaaatcgtccttgtacttggcggcctcatcggtgacatcctgcagaaggcccttggtgaagacctcaggaacctcggagtaaccgacctgagccagatccggcgcattgccagccttgacgtcggtctcgagcttcttgatcatgtcggcggcattgccatcgaacttggtggccttgacctgaatgttcgggtgctccttgttccacttggccacaatgtcgttgaccaaggtcatgccttcggaatcgggcagacgatgcatataggtgatgttgaccacaccgccatcgctgccggacttcgtgtcgccggcagtgtcgctgccgccgcaaccggccaaaccaatacccattgctgctaccgcggcaagagcagccacgatgcgcttgttgtgcgataccatatctctactccttcctagtgaaatcatcacctcagcgtgatgactgattgctaatttaggcctttgctcttttattgtcaacttagctaacaattaccgcgcgtcccgttgaggtgagtggcattaaaccgattcgatgctcgattgtgcgggtttgttcatttcattaactccccttacaaagcaacgtacttttggtccaccggtagacctaatgagatattggatagcggcaacaatccaagacgtcagcttgcaatcgtccaccacaaattgcaagcacttgccaacattatcggttttcaggttgccggcgcgatacccgactagggggggcaccgcgccttaatgagacgctacacgagcagtctcagcaactggtagagctgccacaggctacgcacgttgaagtgcgtgccgtcaaccgtggcgttcgcctcgccatcgcccacatggacgatcacggtgcgcccgttcacggtcagactaccgtgcatcgtgatatgattcatcttgcaaccttgttgattaaaggcgcaagccggtaatcaacgcaaaggcccgatgccgcaaacgtcgggccttttcttatcggctcacgccgattggcccgtcatatcaacggggacaccgcatgttacggcatcacaaaccaatatatcagcaccccggtggcgatcaagaagacaggttccagaaaaagaaaaagggcctgggcatgttgcccaggcctcggttcgcggacagggcgagattcgaactcgcggagggttgcccctcaacggttttcaagaccgtctctttaggccgctcagacacctgtcctgatgcgcgttcacacgcgcaagtattcattatacagaagggagggatgttgatattcggcagtgcggtcggtcttggattcgcctgctggctattagcgatctctccctcagtcagctacgctgacagctcccccattaaagggagctaaagcacgatgagactcaggcctcccacttagtgggctcgatgacttccttgccgcccatgtaggcgcgcatggcctgcgggatctcgatggagccgtccttctgctggtggttctccatgatggcgaccagccaacgggtggtggccagcgtgccgttgagcgtggagaccggacgggtgccgccatcttccatacgctcgcggatgttcagacggcgagcctggtactcggtgcagttcgaggtggaggtgagctcgcggtagcggccctgggtcgggacccaggcctcgcagtcgaacttgcgggcggcggaggagccgaggtcgccggctgcggtgtcgatgatgcggtagggcacttcgaccttggcgagcatctcctgctccatggccagcaggtgctcgtgctccttgtaggagtcctcctgcttggcgtagacgaacatctccaccttgtcgaactggtggacgcggatgatgccggaagtgtccttgcctgcggcgccggcctcgcggcggtagcaggaggaccaaccgcagtagcgcagcgggccgttgccgaggtcgaggatctcgttctcgtgcatgccggcgagcgccacttcggaagtgccgaccaggtactggtcgtcgggctcgcgcagacggtagatctcgtcggcgtgggagttcaggaagccggtgccgcgcatgacctcggggcgcaccagcgtcggggtgatggccagcgtgaagccgtgctcctcggcctggtccacggccatggtgagcatggcgatctgcatacgggccacctggccacgcaggaagtagaagcgggagccgccgaccttgacgccgcggcgcatgtcgatgccggccacgccggtgccgagggtcaggtggtccttgggctcgaagccttcggccgcgaagtcgcgaatctggccgaccttcttgacgaccacgtagtcgtcctcgccgccttcgggagcttcgggctccacgatgttggagagcttccacatggcggtggtgtattcctcggcggcggaatcggccttggacttgtattcggagaccttctgggacagttccttggtctcggcgatgagcttggccttctcgtccgccggggcggaggcgaccttcttgccgatttccttctgctgggcgcgagcctcttcgaaggccttcagcgcctcacgacgtgcggtgtcggaggagagcacttcgtcgacgagttccacggactcgccgcgcttgcgctgggattccttgacgatatcggtgtgttcacggatgaattgaatatcaagcatgggcaccagactagccgcgtaagcagacaccgacaatggccgaatgcgcgggagtcacgcggaaatcacagggaagcccgggaaagtccgcggacgggtccacccggccaatttcgtcagatgagacgcgattgaaccataatcgcgccccacggggctgttgcgtgcaggaaatgttcacgtacggcgcaccatggccgcaaacgacctccccaccgataacaataggagccatgcctcagcctgccctcaccgtgtttctgatcatcgccgcaatcgccattgtggtggtgctcatcgccgtcatcgtcatcgccctgcgcgcgcagcgccgccgcaagctggctcagacgctggagaagcgccgggacgacgaggtgcagtacgccttcatcgtgaatccgtccaaaccgcaggccgaagcccgccggctgcatatccagaggttctgcgaggccaaggggctcaatcgcatccgcttctacgacacccagcttgacaaggacggcagggtctgcgcgcttgaggcgctggaggacggcgccgacgtggtgatcgcggtcggcggcgacggcacggtgcgcacggtggcgagcgccgtctccggcaccggccatgcgctgggcatcatccccatcggcaccggcaacctgtttgcccgcaatatgggcgttcccgtggacgatatcgacgccgcgctgaccgtggccacctcccacggctcccgcctggtggacatgggccgtctcaccctgctcgaccacccggaggacgaccacggccacgccttcctcatcatcgccggcatcggcttcgatgcggccatgatcgacgacaccaaccccgagctcaaggcgaacatcagctggctcgcctacttcgtgggcggcgtgaagaacctgttcgcgccgaagttccgcggcacgctgacagtcaccagcgccgacggctcgacccacaccatcaagaatctcgatttccgcacggtgatggccggcaactgcggccagattcccatgttctcgctgatgccggcggcatcctatgacgatggtctgctggacttcgaaatcatcgacaccaccggcggcatcctcggctgggccaacctgttcggcgacgtggtgcaccagacgatcatcggcaagcccgaacagaacccgctgtccacgaactcgaccatcgaacaggtccagggtgtcagtgccgaaatcacattggaaaagccggccaaagcgcaggtggacggtgacatgctgccggaaacccgccacatccgtttctcggtggatcaccgcgcgctgatcgtgcgcgtgcccgacgcctccgcgctggaaaagaccgcgcaggccgctgcctcaaatgccacctcgaatttcgccgaaatgaccggtacactcgagccgattcgctgattcgccaatccgctaatccgttactacgatgcgtggccggtgactcgggcgacatgcatcgccaaataagcgatttcgtcgtcgctgatatccgtgtcgaggcgcagttcgagcagggaggcgatggttcgcgcgcatcgcagcgcagcggggtaggactcacgaatcaccttcatcaccggtgccggctcgtccgtcagttgctggtgctggtggatgcgtacgaacaggtagcgcaggtgggtgatgaaccggcccacgttcacggaactgcggtccaacgtgatgccgtagctgtggtcgatgatgtcaagcagttgctggatcacgcccgtcatcgtgtacgtataggacaggtcgccggtggcgaagccggcgttgaccagatgcatggcaagcgcggtggcctcgccgtccggcagcgtgacgtcgagccgtgcattgagcgatgcgagcatcgcacgcccctgcgcgtattcctgcgggtacaggttgctcacctcgccgagcagcgggtaggtgatgtcgatgccgcgccgcacccgctccaccgcattcgccacgtggtccgacagggccatgaccagcgtggtgctgccggtctcgcgctcccccagtccggtctcctgcatggattcgacgaccacgcggatgatttcgggcggaatgtccgccagcatctgcgccagatggtcagggtcgcgcccgtccgatggcacgaaggtgcgcacaactttcgactcgtcgaccgtctgccccggcttggcctggaaccccagtccgcggccggtgagaatcacctcaccgccgtcgccgcctttggcgagcacgacgttgttgttgaacactcgcagtatttccatggcatcctttcgcaacgtcattgttccacatcgatgatcgggctgccggctgatacggttttgcagtcgccgccgttgtcgtcgccgctaccgtcgccgatcaacggcgtgaccacggtcagttcagcggcgttgaccaccgtcaccaccaccacaacgctgtgcccggccgccgcgactttgccgaaatccacggtggccagtggctctcccgccgcgatccgctcgcctttgcccacggccacgacgaatccctcgccatccatattgacggtgtcaatgccgacatgaaccagcacttcgatgccgtcatcggttttaatgccgaaggcatggccggtccgggccacggttttcagcgtgccactgaccggtgctagcacggccgtctcgccggccgtctccggcacgacgcctacaccctcccccagcgcgcgggaggcgaacaccggatcgccagtcgcttccagattcatcaaccggccggcgaccggcgacaggatggcgttggagtcaggagtccgatcggaggcaggccgcgatggggaatcttccgcagactccgcatccgacgatgtcgcgccaatccctctcaccgcatcctgcgagcgtacgttctcgcccgccgagaccatctgcgcctccgtggcgcgcggcggcgtacggtacccgaacagcaccgtcagcaccatcgccattacaaacgcaacggcgatggacagcgcgtacacccacattctgtcaaacaccgaaatcgtcagcaacgaggagaaggcgaacgccgtagtcgtgacgccccggaccatctgaccggatggcagcacggacgggaacagccagccaagcaccgcgctggtcacgccgccggccgcgcagccggcgagcagccagcggtagacgcggcggtgatgcagatggatgccgtacaggctcagttccgaaacgccactcagcaatcccgcgagcaacgcccccaccgcggtctgccgcatggccgaatccttgccgcgtacagccagcacgagcacgccagcggtggcaccgaagcaggcaaagttccatacacccatcggaccttggacgaaatcgtagccgagcgcctgaatgttcatcagcatcagggcattcaacggccagtgcagaccgagcggcacgagaaacgggtagagcatcgggatgatgagcgcgaataggaacggcacgtgcgcgttaagccatgctgtggccgctcccagcccaccgccgagccatattcccagaggcccgatgaccagtatggtgagcgcaaaaacgacgaccagtgagaggaatggcacgaacaccagctgtacgctgtcgggaatgacgcgcttcaacccgtggtagaccacggcgagcacggcagccatgagcaacggcacgaagacgttgccgccgtagtcgttgagttgaatcggtatgccgaacgccgacacggtgcaggtttcggcgccgaatacggcgttggccgagcattgaatcgccccggagagggcgctggatacggacgtcccggacattccggacattccggacatcacgccagtaaactgcggggtcatcagcgcggccataatcgcgccgccgagccaggggtcgacgtccagtttcttggccgcattgtaggcgatcataatcggcagaacggtgaacacaccctcccaaatcgccttgagtagtatccagccggcggaggtctcgccgtcaggcacgatgccgagtgcaacgatcacgttgacgatggcgatgaccagcgaggcaccgagcagtacacccagaatcgggcggaacgagtcagacaggtagtcgaaaaacgcggcagcccaagcgcgggcggcactgccccactcgcggacggtacgaggcgtgaagtgacgggatgtattggatgggccgcaactttgttcggcgtcggtggcagtatcgcgcgatggtgcggcatcgtcggaaaggtacggcgcggactgcgcgggttgcgtgggctgtgtggattgcgctgactgcgcgggctgcgctggctgagtgggctgcattgactgagtgggctgcattgactgagtgggttgcgttgactgcgacgctgactgcatcactgccgatggcaattgcgctgccggcatcaatcgcgccgtccgcagccgaacgatctgctcgtacaccgaggcgaccgctccgccgatgatgacctgataacgattgccggctcgcgggaatgcaccgaggactccggggacggattcaagaccgtgctggttgacatggccggcatcggccagttcgaagtgcagtcgcgtggcgcaatgggtcaggctggtaatgttcgcggggccgccgacggcatcgacgatgcgcgccgcaatcactgcaggcgttgcgttcgatgcgttcgccacggttcctccttgctgccgtatgccactgtgttccattatcggcgctgggtgccccaaaagcacggcaatgccggcaaagcatcgcgaaacggcaactatgcgctacggtgctccgcgatggtgtcccgccataatgttccgcgatgatgcttcgccacacccgttctccgtatttgccgcagcgcccattccgacatcattccaccatgcagaatcctgcaatcgttgtcaaaaatcatcgttttttgccgcctattcggagtgtcgcgactgcggaagtcgtattctatctttcacacacgttgcgtagcagggttgttactcaaaacgaggcaagacctggagcgacgtggaatttgcgtatcgtgatatgcgaattccacgttgttccaggtctttttttgttttcgggcgactgcagacaatcgaagcctgaccttgcacgcggcagaggggccacgcaacaggcgcggtccgtcaacggcgaaaggacaaggcaatgacgacgacaacggcatcacccgtatcgaaacagacggcatccgcggcgcaggaaaccagcgcaaccggtgcggcggccaccgcaatcgaaaccatcgaaaccggcgtggccggagtggcgggcgcggccacaaacgcggcagccaacgcaatcgaggacctcgaagccgccgaatcgcacggcttctccacgcgcttcccgctcaacagcgcattcatcttcaccttcggcgcgctcggcggcatgctgttcggtttcgacaccggcatcatctccggcgcctccccgcttatcgaatcggacttcggcctgagcgtctctcagaccggcttcatcacctcctcggtgctgatcggctcgtgcgcaggcgcgctgtcgatcggcgcactgtctgaccggttcggccgcaagaagctgctcatcgtctccgcgctgctgttcctgctcggctcaggcctgtgcgcctcctccaccggattcgcgatgatggtgtgcgcccgcatcatcctgggtctcgccgtcggcgcggcctccgccctgaccccggcgtacttggccgaactggcgccgaaggagcgtcgcggctcactgtccacgctgttccagctcatggtcaccttcggcattctgctggcctacgcctccaacctcggattcctgaaccacaacctcttcggcatccgcgactggcgctggatgctcggttcggcgctggtgccggccgccttgttgctgctcggcggcctgttgctgcccgaatccccgcgttatctggtgaacaagggcgacacccgcaacgccttcaaagtgcttacgctgattcgcaaggacgtggatcagacccaggtgcagattgagctggacgaaatcaaggccgtggccgcacaggacaccaagggtggtgtgcgcgaactgttccgtatcgctcgtccggcgctggtggccgccatcggtatcatgctgttccagcagctcgtgggcatcaactcggtgatctacttcctgccgcaggtgttcatcaagggcttcggcttccctgaaggcgacgcgatctgggtgtcggtgggcatcggcgtggtgaacttcgtgagcaccatcgtggccacgcttatcatggatcgtttcccgcgcaagggcatgctgatcttcggttccatcgtgatgaccgtttcgctcgcggtgctcgccgtgatgaacttcgtgggcgacgtggccgtgctggcagtgccgacgatgattctcatcgctttctatatcctcggctttgcggtctcgtggggcccgatcgcctgggtgcttatcggcgagatcttcccgctgagcgtgcgcggcatcggctcatccttcggctcggcggcgaactggctgggcaacttcatcgtctcccagttcttcctcgtgctgctcgatgcgttcggcaacaatgtgggcggcccgttcgcgattttcggcgtgttctcggccctgtccatcccgttcgtgctgcgcttggtgcccgagaccaagggcaagtcgctggaggaaatcgagaaggaaatgaccaagcgctagacaaccggcacacgattcgcacaaaagttgacaactcttaacataagagtacccaaagtggcgaaaaacgtggcagaatagggaacatggtagcaaacaatgcgggtcagcccgccaccccagcagatctgattaatgtcgatgaggttatcggcaagtactatgacctcgtccccgatcccgaagtccccgagcagcgtgtcatcttcggcacctccggtcaccgcggatcgtccctgaagacctcgttcaacgaggcccacatcatcgccatctcccaggccatcgccgaataccgcaagaaggccggcgtcaccggcccgctgtacctcggctccgacacccacgcgctgtccggcccggccaagaagaccgccatcgaggtgctcgtcgccaacggcgtgcacgtgcgcgtcgactcccgtgacgacttcgtgcccaccccggtggtctcccaggccatcctgacccacaaccgtgcggtcgacggcacccagcgcttcgagggcgagggcctcgccgacggcatcgtcgtcacgccgtcccacaacccgcccaccgacggtggctttaagtacgaccccgtcaccggcggcccggccccggccgagaccaccaacgccatcgccgctcgcgccaacgagctgctcggcgacttcaagtccatcaagcgtgtgccctacgaggaggccatcaagtccgagtacgtcgagggcttcgacttccgcgagcactacgtggacgacctggagaacgtcatcgacttcgacgtgatccgcaactccggcgtgcgtctgggcatcgatccgctcggcggcgcttccgtgaactactggccgctcatcaacgagaagtacggcctgaacatcggcgtggtgcgtcctgaggtcgacccgacctggcgcttcatgaccatcgaccacgacggcaagattcgcatggacccgtcttccccgtacgccatgaagggcctggtcgacgagctcaacgccggcgcttgggacaagtacgatctggtcggcggcaccgacccggacgccgaccgtcacggcatcgtctgcccgaactggggcgtgatgaacccgaaccactacatcgccgtgtgcgtggagtacctgttcggcggcaaccgtccgggctggcctgagggcgcagccgtgggcaagacgctggtctcctcttccctgatcgaccgcgtggccgcatcgatcaacgcgaaggtcatcgaagtgccggtgggcttcaagtggttcgtggacccgctgttcagcggcgaagtcgccttcggcggcgaggagagctccggcatgagcttcctgcgcaaggatggccgcgtgtggaccaccgataaggatggtctgatccccgacctgctggccgccgagatcactgccaagaccggcaagaacccggcccagcttcaccaggagcaggtcgagcgcttcggcgagtcttggtacaagcgcgtcgacaccccgaccacactggagcagaaggccaagttcgccaagctgaccggtgatgatgtggccgccacgcagctggctggcgaagacatcaccgccaagctgaccgaggcaccgggcaaccacgccaagatcggcggtctgaaggtcaccaccaaggacaactggttcgccgcccgcccctccggcaccgagaacatctacaaggtgtacgccgagtccttcgtctcccccgaggctctggacaaggtactcgacgaggccaccgtcgtggtcgacaaggccctgagcgagtgaaatcgctgcgttagtcgcgttcaccgcaaccaataaggctctgcattggattcatgcaatccactgcagagctttttttagcgcatatgcagttcgcgaccactgaaacacgcaggtcaacggttctcctcatgcaccgtgactgcattttctcaacatcactgcagggcaggacggccagatgaccgcgaaacgttcgcctgcctaccatcatcattgtggggtcacagcggccagatgaccgccgaagcgttcggtcggcttgcatcatggtcgagttttaacatcgttgtgggacgccacgacgaatttgcccattccagagctgccatcccacaaaagcgtgggacaacagctaagtcaatcgttttacatttcccccatcccacacactcaaactggaaaccccggaaagacgccattcctgccacacccgtcacagccattacccgaggggccgtgggacgccacgcaaaaatcggcaaaacatgcgtagcgtcccacacccattggcgcaaatccacgctcaatgcaccgacaacacccccaatcgaccactatgacacatttccctccacaatcgaacactagtcattcacgaaatccatcactacgaggcatcgcaatcgaacggcatgcaatatcaagcacacaccacaacaacaggtcgtacaaatattgcctttacatcagtccgtttcgaacatcatggtcacagcaggctctgcgccaactcttcaagagacatggcaactacatgaaactcgaatacggcaccgcgcgaagcaagcgccctcgccacgttgaaagcgaattcagcacgagcgtcctcgttagcgatacttgccgccgtggcgacgaagaccagccatctccgcccgaccagcacaccccttttctcttggtcacggcgccattgagccttactcgtacgatgatgatcgccatcatattcaacagcgaccttgaactccggccacgctaagtccaacgttatgggagctccagatgcaaaagccgcatccggcaccacatagttcgcaaccggctgtggaatcccatgcgctaccagagagagtcgttcttctgattctttgggcgaatcagcaccaggtgatatcagaggcaatgctcgaacgcaggacgggcgccctctgaatcgggtaaattgctccacgaacttcaccagatcctgatagattgcagcagcatcacgatccttggccaatactggctgtttgctcgtagcagcgatgacggcatccccgagcacaatcagggactcaaaagaaacatacggggcaagttgggcccatacgtgaaacaggtccagcgcaaacacgtgttggttcatttccacattggcggctttagccgcatgtttccaaatatgcgtttgcagtggtgcatggcgtgtacgaaaccgcttgcccttaacgctggatacagtgtgcagcttggccgagtcgaggtcgcaatcggcgggaatcggtacggattgcagagcgagggaagtggtcatgccgaaaagcagcttcttgcccgcccgtttcgcttcctcggtgcagcgtgcgaccatgtcgcgtctgcgctgggcgaggctttcgctcatggtcggtgtcgctgcagaatcatgtgcaccactgttcggcgatgacgagtcgcgagaagtcgggtatttcgagtcagtagaaaatgaccccgcaaattcgggcggaacaaaaactgcctccgattcttccggaggctgatcgtatatagagcctggcagagctccatagttggtgatgccgtcggtcatcctgttcatgacaccaccatatgggtagtgggtgcggaaacggaagccgatccgaggtatgtggtcctagcttcacttacgcacattcattgtggataaccatgtggacacctcacttatacacatagtcatccacctcttcaaccccgatttgacacactaactgtatctgatatgattacagtatcataactgtacacatcatagttacagtatcgactcggtaaggaggtcgtttcatgaacggcgaccattcactggcagtgcacgcattggtctaccttgaccatcgcgccacacacctgcccagtcagatcctggccgagaacatatgtaccaatgcggcgcgcgtgcgcaaagtaatgcgaccgctcgcctcagccggactcatcgccactaaagagggtgctgaaggcgggtacgctctggcccggcccgccgccgaaatcactttgcgcgcggtagcggaagccaccggcaccacttttgtgaaagtgaactggacaccgggcgacgtacacgaggactgtctggtgtcatcttcaatgggcgcagtgatgaacgacatctatgccgggctcaaccgcacttgcctcgaacaactcgaacacaccaccatccacgacatcaccgaacagatattcagcgagcgcaaaggctaataatcccgcgcgtttcccctagccagcatcagtcgataacgcttcggcagtcaaagaagaaaacagacgccgcacggcacacaacacatcagcacaacgcactcttatcactcgaatacgtaaggaagtaaccatgtccatcagcacacccaatgccatcagcacacccagcacctcccccactatcaccaccgacgccctgatcattggattcggcaagggcggcaaaaccttggctgccaagctcagtgcagccggccgcaaggtcgtcgtcgccgaggcaagcgccgacatgtacggcggcacctgcatcaatatcggatgcttgccgtccaagtcactgattttgtccgccgaacaggcgcggcgggatggcgcgaacagtactcccgaaacccgcgaagcagcgttcgaggctgctatcaaggagaagcgccgcgtcacttcgatgctgcgcgacaagaactatcacaagctcgccgaccaagacaacatcaccgtaatcaccggccgcgctcacttcaccggccctcatagcgtggaaatcgccaccgctgagggcccggtcgccgtgaccgccagcaagatcttcatcaataccggtgccacgccgcgcattccggatattcccggtatccacactacgcccggcgtctacaccagcactggactgatggatctcgacgatatgccgcagcgactggtgattatcggttcaggattcattggacttgagtttgcctcgatgtttgccgatttcggcacggcggttaccgtgctgcagcacaatgccgagttcctgccgcgcgaggatgcggatgtggcggccgcgattcgcgcacagttggaagcgcagggcgtcaagttcctgttcaacgcggataccaaggccatcgcgcctgctgctgacggcggcgtcaggttgtccgttgcggtgaagggtatgactcgcggcgcatcgcaagcttgcgattccacccccgccggcaccgggaacgctcataccgatatcaccggtgccaccgacgccaccggcgccaccgacactacaacaaccaccagccccactagcaacccgaccgatcacgccacgatgtcacacgttcaaacggaaccatcagacgatggcgagccgcggttcgccgagccggctgaagcccgattctgcctgaccaccgacgcggtactggtggccaccggacgtacgccgaacgtcgagggactgcatcttgaggcagctggcgtggagctcaccgaacgcggtgccgtgaaagtcgacgagcttctgcgcaccacagcagccgacatttgggctctgggcgatgtgaacggcggcccgcagcacacgtacatttcgctggatgactatcgcgtggtgtggtcgcagctcaatggttccgaccgtccgtacacggtgaaggaccgcaagcatgtgccgtcgagcacattcctcgccacgccttactcgcgcgtgggattgaatgagcgcgaggcgaaggcggccggattggattatgtggtcaagcgattgccggtggccgctgtgccgaaggcccaggtaatgcggcgaccggatggtctgatgaaggcgattgtggaacgcaatactggccgcattctgggtgcgatgctgctttccgtcgagtcgcacgaggtgatcaatatcgtcaagttggcgatggatcttgacgcgccggccagcacgttgcgcgatatggtgttcacgcatccgacgattgccgaggcactgaacgacttgttcgcgtagtttgtccgcatagcacgcccgcgcagcatgacccgcgtagcgcagcccgcaacagactcccctaatgcgcgcgaaggtcctcatcgacgtaaaccgatgaggaccttcgcgctgtcgtcatgatccgtacgtgacagcaatcacgtccgaaccagccgttacttcaagccgagcttacggtccagaatgtcggaggcatccaatcctaagcggcgtcggatgaaccagccaagaccgagcggcaggccgggagccaaggccatgccgcctggaccgagtgccacggttttggagttgcctgcgataagcatggtgcccttggatgcggccgtggccgtcgaaccatcgctgtccgcctctggtttgaggatttcgatgttgccgtcactggttttgtacagtcccttattctcattccagataccggatgcgccattgttgccggcctcacccgcagagaggaaatgtcttgtttttcttgtgagcgctcacctattcacgcgcgatggcatgtttttcaagcaaagtcaataggtgtgatgttattcacactcttcactacgttgttttgcctcgcactgggcaaccccacttcagcaagagattgcacagcttgcgttagggtggagaacatgactatcacagtatccacagatgggtccgcattagggaatccaaacgggccaatgggctgggcctgggccgatcatgagcagaacgccggcggcaagcccggccataagcacgacgaccatggttatgatgcgggcggcgcgaccaacggcaccaatcagattggtgagctgtgcgcagtgctggaagctttgcgagcgcacccgggccctgagccattgctcatcgaatcggattcgcagtacgccatcaattgctcgaccaagtgggtcaaaggctggaagaagaacggctggaaaaattcgcagaaaaagcctgtgaagaacaaagagcttattcaggcgatcgaccgtgagatctcacaacgccctggcccggtggatttccgatgggtcaaaggtcacgccggcaacgagggcaatgagttggtcgatgaactggcacgcacctatgcgggcgattgccgttcgggtgcgcgcgacggctatctgccgattgaaggctggcagtcgctactgggctccgaatacgcacatggcaccgatgtgcctccagacgtgcagttggtgctggatggcaaggcggatgcggcaagtttgcgcaagccggctgcggcgacggattcgacggatgccacaaggccagataccaagtcttcgtcgcccttagcgacacaatcagcgcaacctgtacaatcagcgcaccccgtacaccccgcaaagccaagcggactgacggtatccggtacgctgaccttctcccccgcgccgaaaacgagcccgtatttcaacgggcagccgatgccgatcaaaggcagcatcgaaatcgaaggctatgtggacggcgacggcaacctgaccatcgccaacgcaccattcgtgcgacactaacacccaaacacacgaatatgtaccgcaatcggacacgatgacacaaaatcgctcattcgcgttaggataggagataaggcttcacgccgttgatccatgcggcggaggcaaggatggcaaaggagaaaccatggataaggcacagcaggatgcgctgaagaaggcggccggcatcgaagccgccaagctcgttgaaaacggcatgatcgcaggcctcggcactggttcgaccgtgaagttcctggtggacgagctcggccgccgtcatcaggaggaaggtcttgagttcactggcgtaaccacgtctcgccgcacgcaggtccaggctgaaagctacggcatcaagatcgtggacatcgacgacgtggaccacatcgacgtgaccattgacggcgccgacgaagtcgacaagaacttcaacggtatcaagggcggtggcgctgctctgctgtgggagaagatcgtggccaccaactccaaccagatcgtgtggattgtggacgagtccaaggttgtggacaccatcggcaagttcccgctgccggtcgaggtcattccgttcggcgctggccacgtcatcaagaagttcgaggaccgcggctacaagccggtgcttcgtcttgacgccgatggcaaggaagtgcgcaccgacgagaacaacttcgtggtggacctgcacctggagcgcatcgatcacccgcaggagctggccgaagacctcatcaacacggtcggcgtggtggagcacggcctgttcctcaacatggtcgacaaggtcatcgtcggcgacccgaacggcccgcgcgtgttgaccaacgccaacaagtgatcgtctcacatcactgaacttttccaagcccgcatctgtacatcgcaggtgcgggctttactgttgcccgaacaaggcaaaggagccaaaaagagaaaccccgcgaccataacgatcacggggtttctaatgccttgattgcaggtaagactacttacgctggtggcgggtcttacgcagcagtttgcggtgcttcttcttgctcatccgcttgcggcgcttcttgatgacagaacccatctgaagcctccatttcgattaatcgtaaaagttgcaacttgcaccataatacacgtgttgccagacagaggaaaccagtatgttgtcgatagtccgcatatgccctgaacgcagttggggcatccacatcagcaatgtggatgccccaacgttcataagtttgtgcagcagctgacagccgatactagatactacatcgggaacttctggtagaagcgatcgaccgcttccttggtgccggtagcttggaagaccacggtatcgttctgccagatggcagcggcgttcttgctgttggaggcatcggccttcaccacgtacgcgcccgtgacgttgccggaaaccttgacgttgccggatgccgactcatcgccggtctgcgcagcgaccaacgcatcgtactgggtcttggcattgtccgccgacgaccactgcgcggcgaccagcgtgacatccttggcggcatcaccagtggagtaggtcagagtgtactcctcgagcggcgacgcggaattccacgtcgtggaggcatccgccttggtacgcgcgtaattcagcacgctgtccggcatggccttcaacagctcactggcatcatccggcaaagctgtggcgtcgatggtcggcttgatcggctcggatgattcggttttctgctggctgttttgggtggtagtggaggtgccatcattcttctggatggcccaacccggccacacaaaggccgaaagcactgccaggataatcacaacagctgcggcaaccaccactgcaatcaacttgccatgggattgtgtggtcgaggagttctcactattagtcatgccccgattctctcacagccgcgtgacgctagacggccgtaatcttagtcgttgtgcgcaagccgcgtgaaactcttgtgaacggtaaaaatttaccgtccgctggtgtttgggttagggtgagaccatggcgaaatcaagtgtgcagtatgtatgttccgaatgcggttggaacgggccgaagtggtacggccgttgccccgagtgtggtcagtggggcacggtcgaggaatttcacgaggctcggccggcggcaggctctcgcacggccgctcccggccgaacatcacgcacgcagtcggttacggttgccgacaacgccagatctgcagcccgtccgattaccgaagtgggcacggaaagcgtcgagcggctcggtaccgggttttccgaattcgaccgtgtgctcggcggtggcgtggtgccggggtcagtgaccctgatagcgggcgaaccgggtatcggcaagtcgacattgctgttgcagacggccggcaatatcgcgcgcgttgtggcgggagacagtacattccgaggagccggtcagcggtctgcccaacagtcgggccgggcgcagggcggcacatcaaacacggtgtcgctacagggcaacgcaccgtcggtacatgccaataccgtgctgtacatttccggcgaggaatcacaggcgcaggttcgtttgcgcgcttcccgcatcaacgcggtggagccgaacttgttactggcctccaccaccgatctgtccacagtattggggctgatcgaacagaacaagccggccttggccattgtggattcggcgcaaaccatcgtctcacaggaggtcgatggcatttccggcggttcgactcaggtgcgcgaagtggcaagcgcgctgatagataccgctaagacgcttgacattccggtatttctggttggtcatgtgaccaaggacggttcgattgcaggcccgcgcacattggagcatctggtcgatgtggtctgccaattcgaaggcgacagcgagaccgcgctgagaatgttgcgagcggtgaagaatcgttttggtccgaccgatgaagtcggctgtttcgacatgagcggtgagggcatcgaagaggtcaccgatcccgccggattgttcctgtctggagacggccctgatgcggccaacgcggcacccatggaaggcacctgtgtgacgttcacattggatgggcatcgcagtctgcctatcgaagtacaggctctggtcaccacgtcggtgctgcccacacctcgacgtgcggtcaatggcgtggaccccagccgtatcgccatgctggtcgcggtgctctaccgtcacagcaagctcaacctgctgtccaacgacctgtatatctccactattgccgggggccaggccaaggagcccggttccgatttggcgatagtggcggcactggcgagcgccgccacgtcaaaacccattgcgcgagccacgtgcgccattggcgagatttccctgaccggtcaggtgcgcccggtaccgcgtatggaatatcgccttcgcgaggccgcgcgccttggctttacaacggcagtcattcctccgctgcgcaagccggtgcatgtcgagggacttcggctggtggagtccaacacattgtccgacgccttagatgccttgggagtgcgtaaatagccctgagatatgcctcaggcggtaagacgcttggtctcttcgacgttacgcttgagttcgtcaacgagttggtcgggaccatcaaacttgacctgcgggcgcaggaaaccgacgaattcaacgcgaaccttatggtcgtacagatcaatccactcatcggtgatgcaataggcctccaccacgcgttcgttgagtcctgttttctcgctgaaggtgggtttggtgccaatggagatggcggcaggccagcggttctcaccatctaccagccaaccggcatagacgccgtcgaccggaatgtagcctgcaatgtcggagccaagattggcggtggggaatccgatggtgcggccgcgctcctcaccgtgtaccacttcgccttcgatggcgtgcggagcacccagaatggcgttggcatcctggattcggccatgagccagcaggtagcgcacattggtggagctccaggcgcgcattgccttggcctggttcttcttgctccatgcgcggcgctcggccttggtggcattggccagcgggtcgacgggctctccccattcgctcggggcttccggcttgaaatcgcgcggaatgcgcacttcacccgggccacggtcatcgaccacatcaagttcgaatacaccggtggcggcggcaagattggcgatatgcttcacatcaccttctcgccccttgcccatggcggcatcctgcccgaggaccagcgtacgcatgcccagcttgccggtgagtctgccaaggaagaaaatgtatgacatggctgcgaaggccagcgtgtagtgcaccaccaacacatggtccacgccgaactgttccatgcggtgcagtcgatcatccacactggtcaaggcttcggcatccacgttctgcaccgcgggttcctcgccatggtgcgaggcggcccagccgtgcacgaatgcggggcgcgggtcaaacagaatcaccacggaaaaagcatcatgctggtgcgcgagttccaccacacgcttgatcaccgcctgatgtcccaagtgcatgccatcaaatgcgcccaatgtcaccacggccttcttgtcgttactgaacgagggccattcaatcgaaccttcggcgtcaggggtcaggtgcgtgatatccatcagtgtgctgttccttttatccgtgcgatgttattcatgcaatataggcgttgttgtgcgcggcctgtatcaagctgcacttttcaccgcgtctactttacgcgagggggaatacggtgaccggcttggcctgatgagcgttggcacgctcgataatcgccgccacatcatgcgtttgcggcacaatggcggcagtgggctcgctgattgtacgctcgatacggcggccgaagcgcaattcgctggcttcctcaggtgtgatgtcaagcgccggcatcgcgcctcgagcggcctgttccatggtgagggcatggtcaagcagccagttgcggcgctcgtcaccggcaagaccttcaggagtgttcaatacgcacttgttgcgcgtgacggtttgcccttcccgattagtgaacgtcttctgatcggtatgtgcggtgacggtatgggttcgcgtgtcaagcatcgcctcagaggcgataagtccgctggtatcgtccggcaacgcgaatcggccgactcgcgtacggcgcaaacgggtcaggtatccgccgacgccaagttcattgccgaggtcgcgggcgagcgcgcggatataggtgcccgatgaacagctgacccgcacgtcaatatcaagtgcgggaatcgttcccgtgttcgcgtcttcccgcaatggttcagcggcctgctcccctgctacgaatccgctgcggatatccagcacggtgaattcgctgatggtcaccaggcggggtttgagttccacatccttgccttcgcgagccaagtcgtaggcacgctggccgttgattttgatggcggagaacgtattgggtacttgttcgatatcgccggtgaaattggtggcgatggtgcgagtgagcaggttttgccatgaggcagttggtgacgccgttggttcgccgctctggccgccctcagtcagctgcgctgacagcgtttgccagcgggagcgggcttcatcatcgacaagcgcctcgccttcggcatcgtcggtagtggtgcgcaggccgaggcgtatggtggcctcgtaggttttgtcatgcgccacgatggcgttgagcagtcgcgtggcgtggccgaaggcgatgaccagcgtgccagtggccatggggtcaagggtgccggcgtgaccgaccttcttgatgtgcaacgcgccgcgcacggcggcgacggcgtcgaaactggtcacgccttgcggcttgtcgatgatgagtaggccgctgggtgttgtatgaagcacactactcctcgtcggactcgaactcatcgccctcggcttcggcctcgtcgtcgtgcttgtacggatcggcgtcgccggcgtactgggcggtggcgcgggcgcgggcgagttcttcgtcacgcttcttggccacggcgagaatgtcttcgatctcgtgagcctcgccgggcacttcatcgaacacgaattggagctgtggagtcaggcgcaggccagccttgtggcccaccagagaacgcaggtgacccttggcctgatcgagcgcctgctgggcgcgcttgcgttcgccttcctcgtggccttcgtggccgagctgggtccagtagaccttggcgatctgcagatcgttggtcacacgaacttcggtgacggtgatgctggcgagtcgcttgtcatgcagttcgcgctcaatggaggaggcgacgacacgctgaatcaaggccgcaatacgtgcggcgcgcgggttggttcctgccataggaatttccttttctagacttgagccccctctgacgaggggctgccgaacgcagtgaggctgggggagagaaaatcatggaactaccatgtctctcccccagtcagcctgcggctgacagcccactcgtcagagagggcttaacaatgactacttgcgctcgacttcctgcatctcgaaggtctcgatgatgtcgccgagttcaatgtcgttgaaggtgccgaggttgataccagcctcgtagccttccttgacggactgaacgtcgtccttgaagcgacgcagcgaggagatctcgaggtcgttgaccgtggccacgccgttgcgcaggatacggcacttcgtaccacgcttgacctcgccgtcctgcaccatgacgccggcgatgttgccgaacttggaggagcggaaaatctcgcggatctcggagtgagaggtgacgacctcttcgtattccggcttgagcatgcccttgagggatgcctcgatgtcttcgatcgcacggtagatgaccgagtagtacttgatctccacgccctcgcgctcggcgaggtccgccacctgacggttcgggcgtacgttgaagccgatgatgacggccttgtcgaccgtggccaggttgacatcattctgggtgattgcaccgacgccgcggtggatgacctggatgccgacctcgtcggatacctcgatcttcatcaaggaatcctcgagcgcctcgaccgaaccggacgaatcgcccttgatgacaatattgagcatgtcgatctcggactcggcgaacttcttcttgaagtcctcgagggagacgaccttgcgacgcttggccaactgggcggcacgctcggtggcctgacgcttctcggcgatctggcgagcggcacgatcatcggaggcgaccaggaagaggtcaccggcggtcggcacggaggtcaagcccagcacctgaacaggtgtggacggaccggccgcttccatcggctgaccgttctcgtcgagcatggcacgcacgcggccgtacgaagtgccggccacgatggcatcgcccacgtggagcgtaccctgctgaaccagcacggtggccacggcaccacgacccttgtcgagtcgggcttcgacggtggcaccacgggcgtccatgtcggggttggcgcggaggtccagctcagcgtcagccgtgagcagcacggcttcgagcagcttgtcgacgtgcaggttctgcttggcggagatgtcgacgaacatggtgtcgccaccatactcttcagggaccaggccgaactcggtgagctggccgcggaccttctccgggttggcaccgggcacatcgatcttgttgacggccacgacgatcggcaccttggcggcctgagcgtggttgatggcctcaacggtctggggcatcacaccatcgtcggcggcgaccacgaggatcgcgacgtcggtgagctcggcaccacgggcacgcatggcggtgaacgcctcgtggccaggggtatcgaggaaggtgatcttgcgcggttcgccttcaaggttcacggtgacctggtaggcaccgatgcgctgggtaatgccgccggcctcacgtgcgatgacgttggtcttgcggatggtatccagcagtcgtgtcttaccgtggtcgacgtggcccatgacggtgacgaccggcgggcgaggcttgagatcctcgtcatcctgcagttcttcctcgtcaaggttgatgtcgaactgctggagcagttccttgtcttcctcttctgcggagacgagctggatgttccagccgatctcttcgcccagaatctggaaggtctcctcatccaaggactgggtggcggtagccatctgacccaggtggaagagcacggtgaccagcgcggcctggttgacgttgatcttctccgccagatcggccagggaagcgccctgacgcagacggatggtctgaccgttgccgttggggatgcgaacgccgccgatggtcggtgccttcagctcctcatactcatggcgctttgccaggcggttcttacgggccttcgaggacttaccgccctgacgtccgaatgcacctgcggcaccgccgcgaccgccgcgaccgccgccacgtgcgggaccgttgctcggtgcgccgccgccctggaagttattgccgccgccttggcccccacggaagccgccgcgtgcgccgccctgaccggcaccctgggagccgccgccctgacccggacggttgtggccccactggccgggacgaggaccgccctgaccaccttggcccggacgaccgccacggaagccgcggccttgcccctggccttggccgggacggcccggacgaccgccacgaccgctatcagcagtcggacgagccatcggatgcggacgcggaatatcacccggcgtcggggtgtgcataccctgcttgcgggagaacgggttgttgcccgggcgcgggccctgagcgtgcgggcgcggaatcgcgtttgaagcggcattgccgccattggcaccggcgccgccctgagcgtgcgggcgcggagccgaagcattgtcgcggttgttctgatgctgccccggctggccattgttcggacggccctggttgttacgacgatcgttgttacggcgatcgttcgggcgactctgacgaccgttctcgcggccttcgcgattatcgcgaccattctcacggttgtcgtgctgaccgtggcggccgggggtcggcatgccggggcgtgcgccgccctgcggacgcggtgtcggtgcgcccggagtcggagcctgctgatgtgccgaggcgggcgatgcctgacgtgcgggagcggccggagtcggtgcggaagatgaagtggaagccggggccgaaggtgcggccgggcggcgctgctgcacgggcttggcagcaggcttttgtacggaagatgcgggcttggaatcgcccttggcgttgtccttggcgaactctgccttcagacgccgggctaccggcggttcaatcgtagaagaagcggacttgacgaattctcccatgtccttaagcttctcaagcacggttttgctatcgacattcaaaaccttagccagttcgtatacgcgtggtttcgccactaattactcctattctgtgaccacgcgcgtgcatgggcgtggtcagttggtgatgacggcaagcctaccctgtctcatcgtgcgaccatgatcgtgttacctcgtctctggtgtgggcgatttcgcgcacactgcaccagcccacatacgccaatcaagcatactcatagcgctggatagcgtagacgcagcgagccgcgccattgctgacgcggctcgtatcaggaaataatgcgccctgaagatcattcgccttcgagcccggcggcctattcggcttccggagcagcagcctcggccgcagcctgggcggccttttcagcggcgaccttcttggcatgggcctcggcggattcgatgccgatcttccagccggtcagcttggctgccagtcgtgcgttctggccttccttgccgatggccagggatagctggtcgtcgtggatgaaggcgatggcggtcttgttcttctcgctgatcacctgtacgccggtggccacagccggggacagcgcggctgccacgaacttggccggatcgtcggagtagtcgacgatgtcgatcttctccgggccaaggttctccataacggcacgcacgcgagcgccgccggggccgatcagcgcacccttcgggttcacgccatcggtgttggccttgaccgcgatcttggtgcgggcgccggcctcacgagcgatggccatgatggacacggcaccggagaccagttccggcacttcacgctcgaacagcttgcggaccagctccgggtgggagcgggacaccacgatttccgggcccttgatgccacgggccacgttcaccacgtacacgcggatgcgttcgccgtggcggtaacgttcgccgggcacctgctcacggcgaggcagaatggcttcgacatcgcccatcgcgacatgcacgttggaggggtcggaagcatcctgttggatgatgccggtgatgagcttgcccttctgaccggagaacgcgccgaataccttctcatcttcggcgcggcggaacagctgggtgatgacctggcgtgcagtggcggcggcgagacggccgaagtcacgcggggtgtcgtcgtattcctcgcccagcttgggagcggggtgcgggtcgtcctcggtgggctcgaccgggatttcgtcggcggcccagacggtgaagttgccggaacgttcgtcaagctccacacgcgcgtgcctggcggcgtgcggagtcttgaggtaggcgaggcgcagggcctctgccagcgcatcatccagggttccggggtcgattccttgctcggcggcgagcttgtgtattcctgtcaggtccagttccatcgatccgtacctcctatgaagttatgtggcgcatggcctatgagtggtcacagttagctattagtgtaggtttccatgcagacacgcttctcttcaggacggtttacccggcgcttggcatccgcactatgcgcgagcgcgatgctgtgttcgctttcggcgtgttcgatgccgcgactggccggacgggccgaggcggaagctcaaatgagcccttgcgagaaagcgatgacgttggcggactacgccacccatccggctgaaggcacgccgttattagagcagtatgccaccggcctggccgctcccctgacttggattgacgttgccgggtattgttcgggtcgttttgccgagggaacgttacgtgacgcgcagaccaagcaatggctggcttttctggccgataaattcgggcagtccgcgcctgaggtgacgccggcgcgtcttgatggcgtcacgtccgccaacgttgaccgaccggtattggatgcgatggccgtggccgaggatcgcgccggattcgctatcgaggtcttggccgcacgaggacagaccgctggggctacgttggcgttgagcgatatgcataagaccgccgggcagcagctggtgtcgctggcgaacggcaattttgatgattccggcgcacagtccagttcttccggccagagcgacccccgccaaaaggtctatgccatcgaccaactactggccaaccccaccaccatcgccgacaaggcaagcggccagaccgtaccgaccgccgccgccatcgaaatggactgcgcccgcgcgcagatcaaggccgtgaccgaatcgaaatcttccaccgagagcgatacgctgctcatcctcgccgcactggccgccaagcacgcctacaccgcgttccaacttggctacccagcgactgacgccgcattgttcgagtagacacacactcctcacgaagccgatgcgaacttgttggaggctagtgggcaagtcgagttgaggcacgttccaccaatgtgaaatcggtggtgtacgtacgggccgggcctgagtatccttcgatgcggtcgataagtatgtcaacggcatgcttggcataatcgtcgtcggtacattggatatcttgcagttcgatgaggagcgggaatcaggagccgaataatgacgatgccggtggccccgacgggaaagaggaggaaaaccgtcggaaccaccggcatacgggtgctcagagcctatcgttcaacgttcacgacaccgaatcgggactcatcggcgcgatcacgccacccgttcccatacggaccataaatcgtcctgatgttgactccgacaggcaatgccgggcattcgttttcgccgttcgtaccccagttgacccagccggattgaggcctctgcacgatctggaacgccgaggacgcctccgaggtgatccagatcatgcaccggttggtattggtgtcgtattcggcgctgcaggcagacggcccggggaagatggtctcctcctcctgtgccgacacatcgaccgccccctcggggaactgccaaggacgggaggtctcatcagctgcgcggtgggcaagcgcccgcacatgcccgagcctctcatcgagccccttgggggtaagggcattttcccatcgcgagaacaaacgccagtagagatcccagtgagcgttctccagatccctgtcaagcagagtggagaaataggcgaaccttgatgtcgtttccgtccgctccgatagcacgttccgcacttcatccttgaggaagccggcgtaggggtcccctccgcggaaaggaacaggctggtaggtgtcgaatcggttgaagacaaggtttccttcgccgctttcgaactcgtcaccgaccgtgatacggttcacgacgcttctgccatcgacctccgtcacaaacgaatccacatggtagacacgatcgaagaaatcgacgttccagtagaacgtgaactcgatggagaaggtcttgccctgcagttcaggtcgaagaccatcagggatgcgcccctcaagcaggtaacggcgcatgacggggccgaactcgataagacggacatcggcgatggcatgttcgggcgggttgatcagaccgttttccggagtgaagaaagggccgtagaacccgccaatggcgttgttcccgctcttgagcagatcgaatccctcgtccttggtgaggaaatggcggatgccccatttggaggcgccctcgcccttgccggtgccacgacatagttcaatgtcgaaatatcccgtatcaaggtggcagaccgcatcgctttcgagcgtgttgtcgtcggcgacgatgcctccttcaaacgtctcccccgggtccgggtcatgtagggacaggacctctccgtcatgcggcaccagaatgccgatgaacgtcgtcgaggaaccgtcggaatcccccagcaccttctggaacggcgaagactgtcccaaatcggtggtaccgagaatcagatcggcctcaactttttccggcacggtcaccgtgaccggctgtggctttgtaggatggtggtggctattggtgatggtgaatcgtggatattcgtgcgtcattgtcgttctcctgtttcagttcgcagccttggcttgtgtggcacctatgcctttgaggaacccgaacgagaacgagttctccttgagaccatcgatgagcacggcgatgatgatgacgatgcccttgacaagctgctgggtgaagaacgggacattcatgagcacgaggccggtggtgagcacgccgaagatgatggcaccgatcagagtgcccgggatcttgcccttgccgcccatcagggaggtaccgcccaggacggccgctgcgatggcatccatctcataaccgtcgccggcagtcggctgcgcggagaccacacgcgccgcgaagatgcagccggcgagaccggcgcacagtcctgcaatcacatagacggatagcagtacgcccttgacattgatgccggcaagccttgcggcttcggcattgccgcccacggcgtagacatgcgagccatacttggttttgtcgagaacgatccacatgactacataaacgattatcatcacgatgaacggaatcggcacatggaacaggtatccgttgccgagggcgcggaagttcaaaccgttgtctacgatcggcagaccgccggtgatggtgtatgccaatcctcgcatgaaggtcatggtgccgagggtgacgatgaacgcggcgagattgcagtaggcgatcaggaatccgttgatcaagccgatgagcgcaccgatcaccatgccgagaaggatggcgagcagggggttgagcccctgctgggcggccagaacggcgatgcaaccgctgacggcgatggtcgaaccaacggacagatcgatgccggtggtaatgatgacgaatgtcatgcccgcggcaagaatcgcgctgatggagatggacctcgccacgttgaacaggttgctcaccgtgccgaagttcggggccttgatcagcatgaatacgaccagcaccagcaatacgaacggcatgccgaccttctcccaggtcgccgccaggttcatctttttcttttctttcattggaagctcctctttatcgttgcgctccgtcgcgcgtttcggaatcctcggattgcgccttcagcacgcccgttgcgtaccccatgactttctcctcggtagcttcatcctcggggatacaggcagcgatgcccccctgcctgacaacgaggattctgtcgctgatgcccagcacctcgggcagatcggaggagattacgagaatcgccttgccttgcgctgcctgggaactgatcagctcgtagatctcctgcttcgcgccaacgtcgacgccacgggtcggctcgtcaagaatcagcacgtcggagttcttcatcatccatcgggcgaacacggccttctgttggttgccgccggacaggttgatgatggaagtggtcaacagacgttgcgcgatgttgaccagtttcatcgattcctgcacatccttgcggatgcggtgcttctgaagcagacccagcctctcgtattcgcccagcgaagagacggagatgttgtcttcgacgcttctgacagggaagatgctctgcgttttcctgctttcgggaagatacgcgaccccatgaccgatggcggccttcggggatttgaacgacaccgccttgccacggagccggatctcaccggaatcatgcttgtctgctccgatgatcgctctggcgatttcggttctgccggcgcccaccagcccggacatgcccagcacctcgcccgcatgcacggtgaaggataccggcggagagtccggcgaaagcctgagattcttgatctcgagcacgccctcccccggatgacgcttgccatggtcgtaaagtttctcgactttgcgtcccaccatcttggcgacgatgtcattctggtcggcatgctcgatgtcggtggtcatcaccgtatgcccgtccctgagcacggtgattctgtcggcgagccgccacacctcctccatgcggtgggagatgtaaatcaggcccgtgcccttctcccgcagcatgttcaccagcgtgaagaggtgctccgattcggctcgggacagcgatgccgtgggttcgtcgaggatgaggatcctcgcgtcctgcgcgatggccttggcgatttcgaccatctgctgctcaccggtgcccagatcaccgaggaatgtgtccgggtcgatgtccgccttgatgacatcgagtttacgtacggcgtcctcccgcatgcgcttcttgtccagcagccccgacttctgcaacggttcgttgccgagtgcgaggttctgcgccaccgtcatggtgggcaccacattgagttcctgatggatgatggcgatgccgaggtcgtcggcctgcttcggcgtggagacgtctacctctttgccatcaatgagaatgcgtccggagtcccttttcagattgcccgaaaggatgttcatcatcgtcgattttccggcaccgttctcacccatgagggcaagcacctcatgttcataaaggtttaggttaatgttgtcgagtacgaccactccggaaaagctcttgacaatgttctcgagctgcaataggggcagcaactgaggcatgctcaccatcccttgtaatcgttgacgttctcacgagtgaccatgacactcggaatgagaatcgtggacttcttgggggtatcgcccttggcgaccttctgggcgtaggcgacggcctgcttgaccatctcgccggggttctgcgtggaggtccccacgaacggggagccggcgcgcttcagctcgtcgacgccttcgggacttccgtcgatgccggtcacgatgatttcatcggtcctgccggcctgctcgacggcgagcgcggcgcccagagcggacggatcgttcataccgaagatgccctgcacgtccttattggcggtgagcatgtcggtggtcacggacaggccggtggcacgatcgttcttggaggattgctgtccgacgaccttgatgtcaggatagtccttctccagggccgccttgcaacccttgatacggtcggtgatggtctggatcggggttccgtccacgataaggatgttgcccttgccgccgagctgctcggccaggtaagagcacgacagttcacccgcctgcacgccatcggtcgttacgaccgcatcagcgcccttcgcaggagtgtccacggcgaccacgatgatgccggcggccttggcacgctcgattgcgggcttcaaaccactctcatcgacggcggagacgatgatcagatcgaccttctgctgaatgaacgaggagatctggttgtcctgggtggccaaatcgagctgggcgtcctggacattgagcgttgcaccgatcttcttggcttgagccttggcttctttgtccatggcggtgaagaacgggttggacatatcctgcaccatcaggccgatgctcttgatttccgtgggcttggagacctcggcggcatcgttgtcgccattactcaccgcgctgcagccggacagcagcagcgacgctgcgagcagggtggaagcggcggaagcgatcttcttgatgttcatggttgttttctccattggaaatagctgtcttgcgttcggatgcggcctattgcccaccgcatccgcatgactccctgatcttcagggatgtctcgatcatgtcgtggatgggattcggcctcatcgtcgccccatccgggtttttattcacctcctcctttccttccatctgtccaagcaggtagttcgccgccttggcaccgatgaatcggctgtcttcggcgacaagtgttatcttcggcgataccaggtccgaccaggcgaagtcatcgaacgcgaccagcgccatatccccgggaatgtcgacggatttccgattaagagccgacatgacgcccaacaggatgggattgttgccggcgatgatcacatccggataataatcgttctggtcaagaaaacggatgacttcggtgcacgcttccacatcgttgttaccgcattccagcacgcgaatctccgccccacactcctcggcggcggccctcaggccgctctcgcgagcgaacctgctgttccaggtgtccggatagatggcaagcagccaacgatggaaatgatggagtttcagatgacgcccaagcttggcggcggcatccacgttgtcggtggctacatacgagaaaccatcttttatttcctcatcatcaccgtatccgggagtggaatcgacgaatacgacgggaatgttccagttcttcagctggttcctgctgtattcgctgagtcccaaggtggagatgatgccgccaggacggttctccacgacctgacgcaacagatacgcctcgttctccttgctgtaccggccgttgacggccatatcggcaatgaacaggctctccttcttgtcctgcaggacgctctcgatgccgtcgatcagatcgagataataggagttcgacattcccgcggtgagcagggtgatgaaccggtgcgtgcccgtgcgcaggtcacgcgcattgacgttggggatgtagcccacctcgttggctgtttcgcgcaccgatgcacgggtgctctcggatacaccgctgagaccgttaagagcgcgagaaaccgtataaacggacagtcccatccgctttgcgatatcggtgatagtaacgtcgtgtcgtttcatcattgaagtcctaaacgtttatgttctgatgtattcagaatacacacgacccaagacgttgtcaacacaggacatgcagacggactcaaaacgagtttattccaatggttcacaatgaactcggacggatatcccgaatccgtcacttgcctcattctgtctcattccgatgaggcacgaggtatcaggcatacccggacacttcgtatcccatcgggatgaggtgtcgattacaatcgacatccaccggcacggtcccgatatgccggacgcatatccgcgacagtcagatggcccctcacgccgtcacgtactccacgtgcgcgaattcgggcactttgtaccacttgaccgggtagccggcgccgtaggcgcagaacacagaatcggacgtgttctccagattggcttccggatcgtacgcggcctcctcgatcacgcgccgttcgtcgtggcagggccggtagccgccgaacgaggcggagaagcgcccacggccgtgcgtatacgcgttcacgtccatcgcgtagtcgcgcatctcgctcaccggtgccccgcctgcgatgacggcgtattcgccgtcgtccgtaggcgggtcgaacgtgccggacattcgttgcacgtcggtcatggcgtgaacgacatgcaccaaaggctcgtcaaggcgcggcgcatgatccgcaggcgcatccgggagggccaaccgttcatgttcctcgacgaggggctcgcggcagccggcccagtgccgtccacgaacaacctcgtcgaatcatggaacgcgcgcctgcgcgacatgccgcgccgccaccgcggactgcggctggtcagacggctgaaggcgatctgctggtggtgccaccagcacacggaacggcccgaaagcgacgcgtggctcgcggccaacgcgatgaccgacgaacgactcgagcgcctctaccggcgggcatgggagagaagcccgcagagcatgcacgagacgttcggcattcccatgagacacggcaccggcatcgactggaacgagttccacaccagggtcgaatggcagtcgaacgactagaccgccggacatacattttggcctataaccccgaatacggacgttcgcatcaaaaacaaaaagggttccgggacaaaccccggaaccctaaaggcggataaggcgagattcgaactcgcggaggctttcacctcacacgctttcgaggcgtgctccttagaccgctcggacacttatccatgctgccaaaatggcaacttgttcattatgccacattctgccgacctggcaaatcggagtttcgctgagcaagtctcgagtgtatgccgcttgagacatgtcagatcacaatcccggaattcgcccgaagcgctggcattgcgtttacgcgccaagcactccgacaggaattacatacactccatcatcgcgttgatacgcgaactcgccgacccccaccaacaccgccaagaactccggttcacgggttcgcgcactcggatttctcagcagcttatctttcagtctgcatagatttgccgatgcctcagggactttatcctcactggacttaatttcgatgccgccccaccgtccatcggacaattcaataatggcatcacactccagaccggaatcgtcacgataataccgaaccggttctatcccaatatcgaggagagatctcgcatacaccaacagatcacggatgcatagattctcaaacagaaacccaaaagtctgccaatcgccgataagagcggcaggactcatgcccaacattgcggccgcaatggaaggatcggcaaaataccgacgcgccttggtctggagtcgctttggatcccgtgccggcgggacccagccctttatcggatcgatgacgaacatgttctcgaacatggccgtatacccggataccgttctctccgaaatgaaatcgtcaaggttttcttcagtaccgtacatatccttacgtaaggttttgaatgtcacagcttgactgatattgcgcgcaagcgaatccagcagacgacgagccacatcaggatccttgccttgcctgggcacactctcagtcagcgtgagtcgcatgtattcccgaatcagaatctgtgcgtcagatacaggcagagccaccgcctccggccatccacctcggcatacggcatccaacaacatttgtgtacttatctctgattttgcagcggcgaacttatgttcaaacagtccactgagacttaccgcacctgtcgagagtccggactcatataaagtcagaggattcatacggatacgtccgattcgtcccgcaccactatggttcggccgattctcattgagaggagtggatgaaccggtcagaatccactgacctttattcgcggaatcatcgtcgacgcgatgacggacttcatcccatatagctggagcgagttgccactcatccacgatacgagggcgataggctttcggcttgatgtcgctcgccagagaatcggccattccgcgcacctcccgttgtttcacgtccgccatcgcaataatccgaatttctcaactaccaaaatccgaatgttgcaacgacgaaaatccgaatattggtggtggtagaagcggtgacgggaccactctgcattgagcggtctctctcagtctcgctacgctcgacagctcgaacgcaatttaaggacagctttccagctgccattttatttgctcactgtcattcgccttcgcctaaaaacgcctccggcgttttcttcacggctcagctcatcagagggggcttgaaattttgtttacgccacctgttcgtggacggaggcattgacccattgggtctgctggacgttgtagccggagaagatgccgatgtcgagcatgcagtcgcggtaatcgcggccgtgggcgatggtgatgtagctgtcgtccaccaatcggttatgcgtgggatccagtccgacccatcggccatcctgatacacctcgacccaagcgtgggtcgcgccctctcccccaagcaaaccggcaatgtagcgcgcggtcaatcccacatgccggcacacggacagcattacatgggcataatcctggcatacgcccttgcgctgggccaaggcctgttcggcggtggtgcgaatcgtggtggaaccgggcgtatacacaaacgccttgtagacctcatccatcacttcggcggcctgctgcaccggagtggcgtcggcaggcaacgcagccaagcgttcgcggcatacgtcgatcatcgcctccacgttcgggccgggaatggtgagcgctgaattgaatcggtacagcggtttataggcttccttatggatatgcgcattgtccacgaaggcgatgccggtcaccgaatagctgaatatgtcgtgcggctcggggatgaatccggtcatcaccacggagccaaaggagtcgatggtggtttcgagttcggtttcgggctgaatcttcacttccacgtcaatcacctgttggcgagggccagtggcgggaatacagcgaagctggaacctgtgatcggtgaccggtgcgctgaaggacagcttcatctcatagtcgaacacgagttttttcacaacgtctcctgcacttacacacgagccggcaaccggcacattctcgggataacgacactacagccatggctgaggtatggtccgcgcgctcacagtccacgcatatattccggcaattcgccgatacgcatcggccggcactcgggcgcacggtttttcgccataccaccatagcatttgaacccgtcagggcgaacgtcgggttaggggcgcttggcatccatgttcatggagctcagtgagcccatgtctttgatggccagggcgctgacacggccggaataatcgtcaaggtacttcttcagcaggtcggcgacttcctgatacccgcgagacggcagctgaccgaccagccagctcagcccatcggcgaagcaactgggcaacggcatgccgtcgaggatcatcgagtaggaggcgagcttcctaagcggggcttccatctcctccatcgtcaggccgaagcgcgtgtacaggtcgatgcgctcaagatacttgccgatgaagatgaacgccttcagcgtggggtcgaccggcgaattctcgatgccgccccagaaggcgagcatgtcatcggtaatatcgcgctgcttgtagatgtcctcggcgtcggccgcgtatttggcggcatcggtgatattggtcatcgccaactccacgtactgcaacagacgcgagctcaattccgggcgcagaatcacggcgttgttgaatgcggaggttacggccgaccgcaccgaatcagggttggacccgtcgtacaggaagctgttcacgaacccgtcgaagtcctcgaaatcttcgggcaggtcgagtgcgtgagcgaacggacggaaggcgtccacatcggtgtccatcacacgatcgtagaacgggaagaactggttcagcgtggtgaaggcgcgctcggtgtaccgacccagccaatacaggttgtctgccttggaagcggtgaccagagacaacgagtggcggcgggactggctcagcaggttcgccacctgcacttcagcaccgtattcatgctccacgccggattcgggtgccaacacccacgtatccttgaatccgccaccctgcgacgagttgacgatcatctggccgggcaccgacgagtatcgagtcaagcccgaataccacacgtgcgtgtttttgccggtgaccacaaaggcacgcaaatcgcatttgcgcggcgacatctcaccggtcttcgggtccaccacatcgatatcgcggaactgaatcacctcttgggcgatgaatcgacgaggctcctccttgatccggttggcaagctcctcacgtgcggcagcatccagcgacgaaccgaacaccacgccgtaaccaccggcttcggccacatccttgatgaccagctcgcccatacgattcaggacttccttacggtcggcctcgtacatcggcatatacgtgggcgcgttgttgagaatcggttcctcgccgagatagtacttgatcatctgcggcacgaagtagtagatggccttgtcatcggccgcgccgttgcccggcgcgttgacgatggccacgttgcccgcgcggtaggcggacaggataccgggcacaccgatcaccgaatcaggattgaaggcaaacggatcgaggaattcgtcggacagacggcggtagaccacgcccacacggtggcgtttgccggcgtagtcgaggaagtagaccttgttgtccaccacttcgaggtcttcggggaaggccagtgcggcgccggttttctccgtcagataggcgtgttcgaagaacgcggaattgtagcggccgggggtcagtaccacggcgatgccctcagtggacacaaagtccatggccttgcgcagtaggcgcgggtattcgcgattgtcgcggatgtgcacgtcgcggaacaggcgcggggagatgcggcgctcgatgtcgcgcacgaacagcgggtagctggcgcccgaggggatgcgcaggttgtcttccagcacccaccagcggccatcttcaccctggaccaggtcttcgccggcgatgtgcgcgaagatgccgccgggaggggtcacgccgttgacctgcgggaagtagccggccgaggtgtatacgtattcctccggcacgacgccgtcatggatgatggccttgtcggagtagatgtccttcagataggcgttcagggcgttgacgcgctgcttcaggcccttctccaattcgtcgtattcgtcggattcgataatgcgcggcacgggatcgtacgggaagagccggtcatggtattcgccgttcttgtagatgccgaagcgtacgccgttgcgggacagctcgcggttgatcgcctcgcgacggtttaccagttcatgggccagtctgcgtgctgcggattcgatcatcgtgcctgctccttgctgtggcggcttctgtggcctcaagcggttaggcgtttcgagcgcacgctgacgccgcaagccgtaaccgggtttgatggttacaacctaaggcggccccgtttcagcaaacgcgcgagaatgttacaggcaggtcacttcgccgaccgcactcgtctcgccgaccgcgcgcatctcgccgaccgcactcgttacaatgaatggctatgacacgactgcgcattgacttggcctacgacggcggcggattctatggctgggccaaacagcccaatctgcgtacggtgcaaggcaccattgaagatgcgctgcacaaggtgctgcgggtgccggccgatgatgcggccgaaccgttgcgtctgacggtggctgggcgcaccgacaccggtgtgcacgcctcccaccaagtggcgcatttggatgtatccgatgaggtactgaatcgctgcgtaggtcacatgaccattccggtcaccgaggcgctgactcgcagactcaaggctgtgctgccttcggacatcgtcattcatggcattgccgtggcaccggccggtttcgatgccaggttctccgcattggagcgcacttatgtgtatcgggtcgccgatcgttcgtccgagatcgacccgcgcctgcgtggatgcgtgcttaccgtggatgaatcgctggatctggagcttatgaaccgcgcagcctcattgaccatcggcctgcacgattttggttccttcgccactccgaatccgggaggcactacgatccgcgaagtcaagaccgcctattggcggcgggtgccgatcactcccctggtgccggatgcgatggcatcgcatgaagcatatcggactccgtcgctggagtccggactggcggtgttcacgattgtggcggacgcctttgcccgcaatatggtgcgctccttggtcggctcatgcctcaaagttggttcgggacgcaaatctctggaatggtttgccggcaaaatggccgagccagtgcgtgaaggctcaagcgggccgattgcgccgcagggcctgactttggagcatatcgcataccccgtcgatgatcagctggccgcaagagccgaggccattcgagccgtacgtacgttgtagtttctatgaaacaacgcaaaagggctggaacccaaacggattccagccctttcagctagcttggcgaaacgctattcagctcactcggccttctcggcgtcagcggcttcctcagcgggagcctcagcctcagcggcctcagcctcaacggccggagcctcttcttcggcaaccttggcggcggcttcagcttccttcacaacagccttcttggcaaccggctcggtgacgagctcgatcacagcggccggagcggcatcgccaacgcgcggggcgatcttgacgatacgggtgtagccaccttcacgctgctccatctgctcggcaatctgggtgaacagaatgtgcaccacggacttgttgcggatgacgcgcatcacgcgacgacgggagtgcagatcaccgcgcttggcgaaggtgatcaggcgctcggccagcggacgaaggcgcttggccttcggcagcgtggtggtgatgcggccgttctggaacaggctggtcgccatgtttgccagcatgaggcgctcgtgtgcggggctggaagccagacgcgggcccttcttgggtgtaggcattgggtttactccttatatgtccgttcttcaggcaagcaggtgggcatatgcccgaacatccgcttgcctagtgaacgaacgattggtcaaagaggcagatcactcgtcttccggcgagaagaacgtaccaccttcgagattattggtatcgaaggccatcggcgaggacttgaggctcaggcccagggtctgcagcttctccttgacctcatcgattgacttcataccgaaattgcggatgtcgagcaggtcctgctcggtgtgggagacaagctcaccgatggtgtggatgccctcgcgcttgaggcagttgtaagaacgctgcgtcaggttgaggtcctcgatcggaacggccatctcggggttggtctcctcggccaccggggccggaccgacctcgacgccttcagcctgggcgttgagctcacggcacaggccgaagagctccaccaaggtggaaccggcggaagccaccgcgtcacgcggggagatggcgggcttggtctccacgtccagaatgagcttgtcgaagtccgtgcgctgttccacacgggtggcctcgaccttgtagctcaccttgagtaccggggagtagatggaatcaaccggaatacggccgatctcatcgttgtcctgcttgttcatctgggcaggaacatagccacggccacgctcgacggtgaactcgatctcgagttcgccatcgtcggcgagggtagcgatgtgctgctccgggttggcaatagtgacgccggcaggcggggtgatgtccccagccacggcttcgcccttgccgctcttgcgcagatacatgaccacaggctcgtcatattcgctggtgagcacgatgcccttgatgttcagcaggatctcggtgacgtcttcctggacgcccggcagagtggtgaactcatgcagggcaccggaaatacgcacggaggtcacggcagcacccgggatggagctcagcagcgtgcgacgcagcgagttgccgagcgtgtagccgaagccaggctcgagcggctcgatggtgaagcgggagcgctgcggattcagagattcctcggtaagagtcggacgctgtgcaataagcactgtggttatcctttcagcttgaactcggtggtgcactcaccggtcaggcggttttggatggatttggtattgctgagtgctcagacgcgacgacgcttcggaggacgaacgccgttgtgggcttgcggggtgacgtcggtgatggaaccaacctcgaggcccgcagactgcagggaacggatggcggtctcacgaccggaacccgggcccttgacgaacacgtcgaccttcttgacgccgtgttccatcgccttgcgggcggcggactcggcagccataccagcggcgtacggcgtggacttacgggagcccttgaagccgacatcaccaccggacgcccaggacaccacggcaccggacggatcggtgatcgaaatgatcgtgttgttgaaagtggacttgatgtgagcctggccgaccgggaccgacttgcggtcgcgacgacggggcttacgagcggcttgcttaggcgctgccattgaccctcgtttcctagtaacgaactttgttgttgacgttcgggcgatgggatgaaatcatcccgtggcccgaatcatgccaccgactacttggtggccttcttctttccggcgaccgtgcgcttcgggcccttgcgggtacgagcattggtcttggtgcgctgaccgcgcacaggaagtcccttacggtgacgctggccttggtagcagttgatctgaatcttgcgacgaatatctgcatcgacttcacgacgcaggtcaccctcgatcttgtagttggcttcgaggtagtcacgcagcgtaatcagctgctcgtcggtgagatccttgacgcggatgtccgggctgataccggtcgcggcaagcgtttccttggcacgagtgcgacccacaccgaaaatgtaggtgagggcgatctcgatgcgcttctcattggggatgtcgactccggcaagacgtgccattgcgattccttcttgttgccgtaggtcttgcacccgctcgcccggttacccggcacgggcctacgtacccgtggttcagtgtcgttcccttgcgggaagcactgtgagagagtgccttatttacttagtgccgctggagaatctgctctcagccctgacgctgcttgtggcgcgggttgacgcagatcaccatgacgcggccgtgacggcggatcacgcggcagttttcgcagatcctcttcacgctagggctgaccttcatggttatccttttcttgtgtacctttacttgtaacggtacgtaatgcgtccgcggttcaggtcgtaagggctcatttcgagcacgacacgatcctgcggcagaatacgaatgtagttcttacgcattttgccggaaatcgtggcgagcacgatgtgcttgttctcgagttcaacgcggaacatcgcgttaggcagtgcttccactacctgtccttcgacttcaatcacaccgtcttttgccatgtgcctctagtcctattccgttggatgattactatggcatatccgaagacacaccaactgtcaactatatacgcacatacccctgcacgaacactcggcgtgtcgcacaggggtatggaaacgttgatgtggtatttcggcatcactccggcttgttggccgggctgccgaacctactactcgaggtggctgatgatacggccgctgatctcgtcgatgtcgccgacgccgttgaccacgacgagcaggccacgggattcgtagatgtcgagcagcggagcggtttccttctcgtaggtctccaggcgcttggcgatggcctccggagtgtcgtcagcgcggccctgctcggcggcgcgcttcttcatacgctccagcagcacgtcgcgggcggcttcgagggccaccacgtggtcgagcggagtgtcgaggtcggcgagcatctcgtcgagagcggtgacctgagcggcgttacgcgggtagccgtcgaggatccagccgttcttgcagtcttccttggccagacgatccttgacgatcttgttggtcagggagtcaggaaccagctcgcccttgtcggtgtagctcatcgcctcaagaccgagttcggtcttgttcttgatgttgtagcggaagatgtcgccggtggagatggtggggatgttgaagtgctcggcgagcagagcagcctgggtgcccttgcccacgccctgggggcccatgatgagcagacgcatggtggtctccttttgtgtcggttattaatacggttttggctcccttggttaggggagccattgagttatatatggaagaaagattgctccgtcgtggaacagtccactggactgttccactcctcgcgcggccgcctgcccattgcgggcgaccgctgccaagcgggcgtcagccttctttgtggtccacgttttcgaacaggaagccggtgtactggaactgttcggtctgggccttggcctgacgcagggtgtcgaggcccacgcccgcgataatcaggatcgtggtgccaccgaacggcagcttggcgttgagtccgagagccatgatcagcacggtcgggatcagggccacgaacagcaggtagacggcacccacggtgttgagtcggttcatcacgtaggtcaggtaacggctggtggcgttgccggcgcggatgccgggaatgaagccgccgtactgcttcatgttgtccgcggtctcgtccgggttgaacgtgatcgaggtgtagaagaagcagaagaacacgatcatcagcgcgtacagggcgatgtaccacacggatgtggtgttcgccaggttggcgttgatccacttgacccaggactggtcggacttgccgaactgggcgatcagggtcgggatggcgaggatcgaggaggcgaagatcggcgggatgacgccggacatgttgatcttcagcggcaggtaggtggaggagccgccgtacatcttacggccgatcatgcggcgcgtgtactgcaccgggacgcggcgctggcacagttcgacgaagtcgacgaagatgaggatgaccacgagcacgcccacgacgatgccgaacttggtccagtcgccgttcttgccgttggtgccgtagccgatctcccacagctgcggcaggaagccggagcagatggacatgaagatcaagatggacatgccctggccgatgcccttgtcggtcacgagctcggccatccacatgatcaggccggtgccgccggtcatgatgaggaccatgaccacgaggttccacacggagccgtccgggatgacctggtcgcagcggtagttgaacagggcaccggagcgggcggtgaccaggatggtggtggactgcagcacggccaggccgatggtcaggtaacgcgtgtactgggtgagcttggcctctccggactggccctccttatgcagggcctcgaagcgcgggatgaccacgcgcagcagctgcaccacgatggacgcggtgatgtacggcatgacgcccagcgcgaagatggacagctggagcatagcgccaccggagaagaggttcaccagtccgatgaagttctcctgggaggcgctgccgacagtggccatgcacttgttcaccacgttgtagtccacgccaggggtcggaatgaacgaaccgatgcggtagacgatgatgatgaacaggacgaagagaatcttcttcctcaactctttggtcttcagggcctggattagtgtcctcacctagatttcctcccaatagcgcgccaatcacgcgaaatacacaaactaacgaatgagcatagtctacagtgcctacttcggccacttcatgtctcgcgaatgttacctgaattatgctccgtcgtactgaacgggggaagcatactcaaaacgatcattgtgttgagattgcttctctgcgctcagaacaacaatttttgagaaaagggaacccccgtccacctattggcggacgggggttgtacagcctattgcgctccccgtaggactaatcagtcctcggaaacggaaccgccggcggcctcgatcttggacttggcggaagccgaagccttaacacccttgagggtgaaagccacggtggtctcgccgtcgcccagaaccttcaccggagcgttgtcacgaacagcgcccttggcgatcaggtcggccacagcaacctcgccaccctcggggaagagctccacgagacgagcgatgttgatgacctggaactcgaccttgaacgggttcttgaagccacgaagcttcggcaggcgcatgtacagcggcagctggccgccttcaaagcccggacgcacgtggttacgcttcgtctggcccttggcgccacgaccggaggtcttacccttggagccttcaccgcggcccacacgggtgcggtccttcttggcacccggggcgggcttcaggtcgtgcatctgcaggatttcgttatctgccataatcagtcaacctcctcaacggtgaccaggtgacgcacggcgttcaccagaccacggttggccggggtgtcctcgcggacaacggtcttaccgatcttgttgaggccgagggtcttgacggtggcgcgctgagccggggtacggttcacgatgccgtggtgcagggtaatcttcaggttcttagccatgagtatcactcaccatccttctcttcggcggccttagcggcagcagcctcttcgcgagccttgcgagcctcggcaatgccggcggcacgggcgcgcagcagagcatcgggagcaacctcgtcgagcgccaggccacgacgggcggcgatctcctcgggctcttcgagctgcttgagggcgtcgacggtagcgcgcaccacattaacggcggtggcggagcccatcgacttggtcaggacgtcggtgatgcctgcgcattccatgacggcgcgcacggagccaccggcgattacaccggtacccggggcggccggacgcagcaggacggtgccagcagcgtcgtgaccctgaaccgggtgggtgatggtgccgcggacgcgaggcacagagaacatgtgcttcttggcgtccagctggcccttggcgatggcggccgggacttcacgggacttgccgtagccgacacccacggtgccgttgccgtcgccgaccacaaccagtgcagcgaagctgaaggtacggccacccttgtgggtcttggacacacggttgatggtcaccacgcgatcgagcagctcgtcgccgtggttttcttcacgacggttacgacgctcgccgcgacggccttcaccgcgctggccacgacgacccttgcggtcctcgttgttggattcggtcgccacagtgttctgagtttcttcagccacttgggtttccttcgtttcgttgtcgctcacagtgcaagacctccctcgcgggcgccatcagcaacggctgcgacgcgaccggtgtacttgttgccaccgcggtcgaacacgactgcggtgatgccggcagccttggccttctcggcgatcagctcgccgaccttcttggcggcctcagtcttggtgccttcgaaaccggcgaagtcggcctgaagggtggaggcggacaccaaggtaatacccttggtatcgtcgaccacctgagcaaccatgtgacggttggagcgggtgaccaccaggcgcggacgctcgggggtaccggagatgcgcttgcggatacgcgcgtgacggcgcttgagagctaccttcttgccttttccgagaatagcaacgctcatatcacttaccagcctttccagccttgcgcaggatgcgttcatcggcatacttgatgcccttgcccttgtagggttccggagcgcgcagcttgcggatgttggcggcaacctggcccacgacctgcttgtcggtgccttcgacaaccacgtggttggcgtcggtcaccttcagggtgatgccttcgggcgggttgacggtgatggtgtgggagtagccgaggaagaactcgatgcccttgcccttggcgacggcgcggtaaccggtgccgacgatctcaagagtcttggagtagccatcgtgaacacccttgaccatgccggccatgatggagcgggccagaccgtgcttggcacgggtcggacgcaggtcatcagcggcggtcaggacgatctcgttgccttcaacggcagcggtgatgccttccggaaccacgtaggagtcagaacccttagcgcccttggcggagaagttctggccttcaatcttgacttcaacgccagcagggatggcgatggggagcttaccaatatgcgatgccatgtttcagctctcctttctcaccacacgaaggcgacaatttcgccgccaatgcctcggtcgaggcattccttctgagtcagcagtcccgaagaagtcgagatgatggcgatacccaggccaccgagcggcatcggcagggagtcggacttcgcgtaacgacgaaggcccggcttggagatgcgcttgatgccctgaatggaacgctcaccgttcggaccgtacttgagggtgacctcaagagtctggccgaccttggcttccttagcggtgaagtccttgatgtagccttcgcgcttcaggatctcggcgatgttcgccttgaacttggagtacggcatatccacggtttcgtgcttggccgcgctcgcattacgcagacgcgtaagcatgtctgcgatcggatctgtcattgtcatttgggcttgttgccctttctcgctatggtttccgccgccctcacgcttcttctagaagcgttcgggccgcggaccttcagcgtcgatgtttaccaactggacttcgtaacgccgggcagttcaccgcggtgagccttctcacgaaggcagatgcggcacaggccgaacttgcggtagacggagtggggacgaccgcagacctggcagcgcgtgtaagcgcggaccttgaacttcggcttgccggccgccttgttcttaagagcggtttttgccatatcagttctccttgaaggggaagccgaggtgcttcagcagcgcgtaggcttccttgtcgtccttggtggaggtcaccacagtgatgtccataccgcgcacgtgatcgatcgaatcaggatcgatctcgtggaacatggactgctcggtgagaccaaagttgtagttgccctggccatcgaactggtggccgttgatgccgcggaagtcgcggatacggggcagcgcgagggtcagcagacggtccaggaactcccacatgcggtcgccacgcagggtgacgtacgcaccgatggcctggccttcacgcaggtggaactgcgcgacggacttcttggccttggtgatcttcggcttctggccggtgatcagggtgaggtccttgacggcaccttcgatgagcttggagtcgcgggcagcggcaccaacacccatggagacgacgaccttctggacacgggcaacctgcatcgggttggagtacttgaactccttctcgagctcaggaatgatctgctcgttgtacttgaccttcaagcgcggggtggccggcgcttcgacagtagtatcggtcatgccagctcctttccggacttcttggcgacgcgcacgcgcacggtcttcaccttgccgtcacgcgcctcttccttaacggtgatgccaacgcgggtcggctgcttggtctccgggtcgatgaccatcacgttggagcgatggatcggagcctcagtggagacgatgccagcctgctggccctgctgcgttgcacgcacgtgcttcttgacgatctgcacgccttcgacgatcagtcgatcgttggagagcacctgcttgacggtgccttccttgccgcggtccttgccgcggatgaccttgaccaggtcgccgctcttgatcttggctgccatgtcagatcacctccggggcgagggacacgatcttcatgaacttgtgctcgcgcagttcacgaccgaccggtccgaagatacgagtgcccttcggttcacggccggagccgagaatgacggcggcgttctcgtcgaacttgatgtaggaaccatccgcacggcgggattccttgacggtacggacgacaacggccttcaccacgtcgcccttcttgaccgacccgccaggaatggcgtccttgacggaggcgacgatcacgtcgccgatgccggcatagcgtcgcttcgatccgccgagcacgcggatggcgaggagttccttcgcacccgtgttgtcggcgacatgaagccgcgtttcctgctgaatcattgattctccttagccgagctggttctccccatttaccggggcatcgtggttgcccataatgccccggtaaatggcgagccttgccgaactttacttacttggcgcgctcgataatggattcgagacgccagcgcttggtcttgctcagaggccgagtttccataatactcacgaggtcgccaatgtgggcgtcgttgtgttcatcatgggccttgaccttgctggtggaacgaacgaccttgccgtacagcgggtgggtcgaacgctgctcgagctcgacggtaatcgtcttgtccatcttgtcggacacgacgtagccgcggcgaaccttacggaagttacgctcttcagccataatcacttctccttggattcggtggcggccggctcctggctgatgccaagctcacgctcgcgaagcacggtgtacatgcgggcgatgtcgctcttgacagccttgagacgggcggtgttctcgagctgaccggtggcgtgctggaagcgcaggttgaacagctcttccttggacttcttcaggaagccttcgatttccgcgttggtcttctcgttgagattcttgatggagtaatcagcggtaccgactgccatcagatatcaccaccttcacgtgcgataatgcggcacttcatcgggagcttgtcgatagcgcggcggagggcttccttagcgacgtcctcggacacaccaccgatttcgaacatcacgcgaccagggcgcacgttcgcaatccagaactccggggcacccttaccggaacccattcgggcaccgagcgggtgcttggtcagcggacgatccgggaagatcgtgatccacacgcggccaccacgcttgatgtagcgggtcatggcgatacgcgcggcttcgatctgacggttggtcacgtaggccggggcgagggactggatgccgaaatcaccgaagttgatctcgttgccgcccttggacatgccagaacgcacagggcggtgctgcttgcggtacttagtcctcttggggataagcattcttgctcactccttcgtttctgcagccggagcggcctcggcgggagcctcagccttgggggcttcgacggcctgcggggcggcggaacggttgccacggcgcgggcggcgatcgccaccacgacggcccggacggttgttctgctgagcctgctgctcttcgaactcggattcggtcatgtcgcccttgtagatccagaccttgacgccgatacggccgtacgtggtcttggcctcgaagaagccgtaatcgatgagggcgcggagggtctgcagcggaacgcggccctcacggtagaactcggaacggctcatttccgcaccgccgaggcggccggagagcttgatgcggatacccttggcaccggcgcgcatggcgtcctgctgggccttgcgcatggcacgacggaaggtgacgcggttggtcagctgctcagcgatgccctgagcgacgagctgggcgtccagcgcggcgttcttgacctcgaagatgttgagctggacctgcttgccggtcagcttctcgagcttggcgcggacgcgctcggcctcggcgccacgacgaccgatcacgatgcccggacgggcggtgtgaatgtcgacgcggacgcggtcgcgggtgcgctcgatgacgatgcgggacacgccagcgcgctcgaggtccttgctcatctccttgcggatctgatcatcctcaagcacgaagtcgcggtagcgttcgccggccttgttggagtcggagaaccacttggagcggtggttctcagtgatgcccagacggtagccaaacggattgatcttctgacccatctttagcgggctccttccttgttagccacgacgaccgtgatgtgggaggtgcgcttgttgatacgagcggcgcggccctgggcacgagcgcggaagcgcttgagggtcacaccttcgtcaacgtaggtctccttgatgtacaggtcgttctcgcggaacggctcgccggccttgtcggccttcacgcgagcgttggcgatggcgctctccagggtcttgcggaccggcagggccgcagcctgaggggcgaacttcaaaatggtgacggcttcggtcgccttcttgccgcggatgaggtcgaccatgcggcgagccttgcgcggcgtcacgcggacgtgacgagcgattgctttagcttccatgttctattccttatccttagcgacgggccttcttgtcgtccttcacgtgacccttgaaggtcttcgtgggggcgaactcacccagcttgtgaccaaccatggcctcggtgacgaacaccgggacatgcttgcgaccatcgtgaacggcgaaggtgtgtccgatgaaatcaggggtgatcatcgaacgacgggaccacgtcttgatgacgttcttggtgcccttctcgttctgctcgtcgactttcttctgcaagtgggcgtcgacgaaggggcccttcttgatgctacgagtcatcttctcgatactcccttacttgcggttcttgccggacggacggcgacgaacaatcatcttgttcgaagccttcttcggacgacgagtacgaacctcgcccttgccccacggggagaccggcggcttaccaccgcgggtacgaccgccgtgcgggtggtcgaccgggttcatggactcaccacgggtgatcggacggtggccgatccagcgggcgcggccagccttgccgagctgaatgttggcgtggtcctcgttgccgacctcgccgacggtagcgcggcagcgcgcgtcgacgttgcggatttcgccggacggcatacgcagctgagcgtaggcgccatccttggcgacgagctgaacggcagcaccagcggaacgagcgatcttggcgccacccagcgggcggagctcgatggcgtgaaccacggtaccggtcgggatgttcttcagcggcaggttgttgcccggcttgatatcagcctgagcaccggtctcgatgacgtcgccctgcttgatgcccttcggcgcgatgatgtagcgcttctcgccatctgcgaagtgcaggagggcgatacgggcggagcggttcggatcgtactcgatctcggcaaccttggcgggcacgccgtccttgtcccaacgcttgaaatcgatgagacggtactggcgcttgtggccgccgccgcgatgacgggaggtgatacggccgtaagagttacgaccgccggtcttggacttcttgcgaaccagcgacttctcaggcgtagaacgagtcagctcggagaaatccgagacggacgcgttgcggcggcctgcggtcgtcggcttataaacgcggatagccataatgtagttcttcctttaacttttctcggctagccttcagttaccaaagatgtcgatcgtctggccctcggcgacggtcacgatcgcacgcttctgggaagcgcgctggccgaaaccggtgcgagtgcgctgcttcttgccagcgcggttgagggtgttgacgttcgtcaccttgaccttgaagatctcttcgattgcctgcttgatctgcaccttgttcgcatccggagccaccacgaaggtgtactggccacggtcggaagcggcgtagctcttctcggagacgacgggcttaagaatcacgtcgtgagcgggcttgtgaatagcgaccatctaaatcaggcctccttcggctcggtcttggcagccacgaaagcctcgaaggcttccttggtgaagaccacgtactgcgaggtaatcacgtcgtacgtgttgagctgatcgacgaaaatcgggtgaacggtcgggatgttgcgcacggagagccactcgttgatgttgtcgcgagtgaagacgaccgtggtgaacttgtccgcggtgatcggggccagggcggcgacagcggccttggtggacggctcggtgataccgaactccaccacggcaacgcgaccggcgttggcgcgatcggacagggcgtagcgcagagctgcggccttcatcttcttgggggtgcgctgagagtagtcacgcggctgcgggccgaacacggtgccgccgtggtaccactgcggtgcacggatggagccctgacgagcacgaccggtgcccttctgcttccacggcttcttgccgccgccggaaaccatgccacgagtcttggtggcgtgggtgccctgacgagcagcagcgagctgagcggtgacaacctggtggatcagcgggatgtgagcctggacatcctcggcggaaacgccgaagagagcctcaggagcttcaacggtgccggtggcctggcccttggcgtcggtgacgttcagagtaacgtttgccatggtttatcaggctcccttcacagccgagcggacgagaacgatgccgcccttggggccaggaatggcgcccttgatggcgaggatgccgttctcgacatcagcggagacgacggtcaggttctgggtagtggcggtcacatgacccatgcggccggccatacgcttgcccttgagaatacggctcggagtggcgcatgcgcccacagaaccgggacggcgctcgttcttgtgagaaccgtgagtacggcggtaggacttgaagccccaacgcttgatggtaccggcgaagcccttacccttggtggtgccggtcacgtcgacctcagcaccctcttcgaacaggtcagcggccagttcctggccagcctcgaactgatcgacgtcgtcggtgcgcacctcgacgaggtggcgacgcggggtgacaccggccttggcaaagtggccagccagcggcttggtcaccttggtggggtcgatggcgccgtagccgagctggacggccttgtagccgtcagattcctcggtcttcacggcggtcaccacgttggtggacacgtcgacaagagtgacgggcacgaagaagccgttctcgtcccacacctgggacatgccgagcttcttgcccagcagagccttgcgattagacataatgcttcctcctcccttacagcttgatttcgatgttgacgtccgcaggcagatcgatgtgcatcagggagtccacggccttgggggtcgggtccacgatgtcgatgaggcgcttgtgagtgcgcatctcgaagtgctcgcgagaatccttgtacttgtgaggagaacggataacacagaagacgttcttctcggtcggcagcggaacggggccaacaacagttgcgcccgcgttcgtcaccgtttcgacgatcttcttcgccgattggtcgatgacctcgtggtcataggacttaagcctgatgcggattttctgtcccgccattgccgtccgccctttctagcgatgttcgttgtactgtttaccaacctgcttctagggcaccggcgcgcatggcctcccttggacatacgtcctctggcggtcatccgacatcagtgcgcggtttccggctgtcacttcacttgaagtggctcccggcccgcgctcgcttttttaattccaatttgcgagcccaaatcaggcaacttgtttattcaagcattgaggtgggacagcgcggaggaattcgcgcgtgtcgcgctcatgccgttcgtattacctcgcggcatagccgctcggcgtcgcctaccaacatccttctgagacttacctatatatagtggcacagctcacgttggcgaatatggattgattaattgagttggacggtaacgcgaattactcttaaggctcgtgacacaatcactggcaaagaacatcaaacctattcgtgagcacggtgccaacgtgttatatcagcacggcactttggccttactcgtgccggggctgctggaaggcaccaccaccatcggcgaattgctcaagcatggcgacaccggcatcggcaccggcgagggcttggacggcgagctcatcatcctggatggcgtggcatacaagataggccaatccggtgtggccgaacgcgtgccggacgacttcaccatgccattcgctaatagccaccgcgcggccttccagtaccagtgcgagcgtcatgatatcggcctagaagagctcaacgaaaagatcgtcaaggcgaacggccgcgcgaacacgttcttttcggtaattgtgcgcggcacgttcagcttcatcaagacacgcgctgtcatcaagcagcaggcaccctaccccacgctggtagaggtggccgaccggcaggccgtgttcctgcgccacgacgtcaagggcaccatgctcgggtacttctcccccgtgatgtttcacggcgcggctgtggccggattccacgagcacttcctgtccgacgacaagacgttcggcggccatgtgctcgatgcggtgctcgagcgcggcaaaatctacagtcaggtgttcgataccttggtgcagcatctgccggtggacgaccctgattatcgcaaccacgacttcagccaagatccgatagccgaggccatttccagcgccgagggcgatactcaacgagattagtctcacataaacacaatgtgagccaaatgaacatttccgaacaatcgcacatgttgcataatggcggaagcactggcttctcgcacttcctatgttcgattgtcgcaatgcaggtctcacatctttcttattgagaaccattcgctgcgatatcatgacagatatggcttcccgccgcaagactcttaaacgcgattggttcgacaaccaacctggcgcatgggtaatggttatgctgcccgctgtggctggcttctttatcggcgggcctaatcttgatacgctttggctgttggcgacgtgggccgtgtgctattgcgtgcagttcagcgccgcgcactggttcaaagcacactttttacgccgttatctgccgccgatgctcacttatgccgtagcgctcatcgtcatcggcttgccattcctgattacgcataccggcatactgcgttgggctcctttatatatagtactggttgcgctgtcgatgctgtcctcgtggctgaggaaggagcgctcgctgtggggcaatgccgtgtcggtgattgccgcatcggccatggccacggtgatcgcgtcgtttggcaacgctgttgagacggcatgtgttattcccatcaacgcagcacatgcctcgtgcgcagccgctgatgtcaccgccgcacgcgccgcgattcggaatatgccggatttgagccagatattcgaccttcacgcctggtggcctgcgggttcattgcccgtgaacgggctgattgccaccgtgctgtttgcgctgacgcagtatgggtcggttttggtggtcaaaaccatgatccgggaacgcgggaagcgttcgtacgtggcggcttcgtgggtatggcatgtggcgctattgctgctagccgccgtgccggctggacgcagcccgtatctgattgcgatgactgtgctgctgttggcccgcgccgttgcgttgccggtggttacacggcgcacaaccttgaagcccgtggtgaccggcattaccgaggcgtttgccagctttattgcttttggctgcattattgcggtgatttagcgacgctcagcgattccatggggcggtaattccctcatggggcggtaattagcccatggggcggacggtaaaattttaccttccgcagaatagagccgttttcgtacaccgccccatggggttttcaccgccccatgagtaggttaccgccccatgagtaggttaccgccccatggaggcacctgccggctgagggagcgccacatatgcaaaggagcccggcccctgtaatggggtcgggctccttgtgtccgctatgcagccactaagctgcaacaccgcggttggtggctactgctggtgccagcagccgccaaccgcctgcaatcagcgctcggaggcttcctcagtggcggcctcaccctcgcgctcgatgcgtagcttgtggccttccgcctgggagacgccgtagtaagcaccgacggcgatgtccttcatgtcgttgatcagcgggatgcgcgggttggccggggtgcactggtcctcgtaggcgcgcatgccgatctgatcgagcacggaccagaagtaatcctcgtccacgccgcaatcctggaagctcttgttcataccgagcttgttatcgcggtagtcctcgacagccttcgccaggttctccacggcttcggccggggtcttgccggtgtcgatgccgaggttgcgggcgatgtcctggtagcgctccggggcgatgtacttgttgtacttcggccaagaggtgggctcctcaggaatctggccgttgtagcgaatcacgtacggcagcaggatggaattggtacggccgtgggcgatgtggcacagggcaccgatggtgtgggccatgccgtggcacatgccgaggaacgcggagccgaatgccatgccggccatggtggcggcgttgtgcatcttctcctgagcgtcggtcttggccaggccgggctcgccgttgacggactcagccaggttgtcccagatgagcttggccgcgtgcagggccatgccgtcggtgaagtcgttcgcgtacacggacacgtatgcttccatcgagtgggtcagggcgtcgaagccggcgtcggacgccagcttgcgcggctgggtgcgagccagcaccgggtccacgatggccacggacggggtcagcgcgtagtcggtgatcgggtacttgtagccggtcttgtgatcggtgatcacggcgaacggggtgacctcggaaccggtgccggaggaggtcgggatgcacacgagcttggccttcttgcccagcggcgggatcttgaaggcgcgcttacggatatcgaagaacttctcgcgcacgtcggagaaggcgatttccgggtgctcgtagagcagccacatgatcttggaggcatccatcggggagccgccgccaaccgcgatgatcgtgtccggctcgaactcctcgcgcatcatctccgcgcccttttcgacggtctcgacggagggctccggctcgacgtagtcgatgatgcggaaggtcacacggttggagcgggcgcgcagctggtcgatgaccttgtcgacaatgccgagctgctccatgaccttatcgcacacgatgacggccttctcgatgccgtacatgtcgcgcaggtacttgatggcgttcggctcgaagtaggtcttggccgggatcttgaaccactgcatgttgttgttcctccgagcaatgcgcttgatgttgacgagattcacggcctgcacgttgccggacaccgagttgccgccgtaggagccgcagcccagggtcagcgacggggcgatggcattgtagatgtcgccgatgccgccaagggaggaaggctggttccagatgatgcggcaggcgtgcatacggacgccgtactcacgcacgagctcctggttgttggtgtggatggcggcggtgtggccggcacccagcttgagcatcttctcgcacatctcgaaggcctgctccttgttgtcggccttgagcacggcctgcaccggagcgagcttctcgtgggtcagcggctcgtcgtcggagacttccttgcactcggcggccagaatggtggcgtcggccggaatctcgaagccagcagccttggcgatgaactgcggggacttgcccggcaccacggagttcagcacgggcttgacgccggaaccggcggtgcagccgaacatgtactgctccagcttggccttctcttcggcgttgacgaagtaggccttacggaccttgagctccttgatgagctggtcgtagacgtccttgtgggcgatgatggcctgctcggtggcgcagatcatgccgtaatcgaagtgcttggagagcaccagatcgttggcggcacggacgatgtccacatcggaatcaacataggccggggcgttgccggcacccacgccgagggcgggcttgccggaggagtaagcggccttgaccatgcccggaccaccggtggcgaggatcgtggccacgcccgggtgctgcatcagcgcgccggtggcctggatggacgggtgctcgatccactggatacagttctcgggagcaccggcctcgatggcggcgtcgcgcacgatcttggcggcctcgacggagcacttctgcgcgccggggtggaagccgaagacgatcgggcagcgtgtcttcagggcgatgagggacttgaagatggcggtggaggtcgggttggtaaccggggtgacaccggcgaccacgccgacgggctcggcgacctcatcgatgcccatcacgtcgtcttcgcggatgatgccgacggtcttctggccggccaggtagttggtgacgtgctcacaggcgaagatgttcttggtggccttgtcttccacgagaccacggccggtctcgtcgacggccatcttggcgagaacgaggtgcttgttcagagcggcgatggaggccttggcgacgatacgatcaacttgcttctggtcgaggttctcgaattcgtcgagagccttcttggcgcgggcaaccagcgcgtcaacttcggcctcagctgcggcctgcttctcttctggggtcggattggcagcttcgactttcttctttgcttctgccacttggggtcctcctcgatcttcttggggtattatggcaaagttctgggccatcgcctcgtcacctcagttgcaccagcgggataccgcctcagtaaccgaaaatggccggtgatgcgttgtcacattgcatatgtgacttgagtcacaatataccgaacggtccggcgcgatgcatacgcacaaaatcgacggcgtttcacgtgcgatattgaacagtttttgttaagagttgtgcgaaatatcgaacaaatcctcactttattcggcgatttggtactttttgttcactttttaccgaaaatcacatgcttgcaaacaacgcaatccgacaactttcttaaatcaagtttccaaaagtactcattttccccacatttctagaaaattggtttaaaaaagtgcccaaaatcgcctacaaatatacgattgttgcctcataatctccgcgtcgaggcacatgaaagccactttcataaagtatacttacatatatctcatcgcacaaaggggtaaatatgagggcaatgccatcgaccgcagtgaaagcgcacaaccgcagtgccatgacccagtatctgtatggccatagccatgtcaccaagcaggaactggaacgcgaactcggcctcagcctgcccaccatcacccaaaatctgcgcgccctagaagatgacggactcatccgcaaaggcgaactgcaggattccaccggcgggcgcaaggcgcaaaattatgagttcaatcccgatcatcgcactgccatcggcgtagtgatgcggtccaacgaactgcgcctgtgcgcgattaacctgtacggcaacgtcatcgaaaaacgcaacgatgccctgccttaccgcaacaccaacgtttactaccagcgtatcggcggcatcatcaacaacttcgcctccgacgtcgaaaagaagcacggcaaagtgctcggcgtctcgttcgccatccaaggcatcctctcccccgacgccaccaccatcaccttcggcaccattatgggcaacacggggcttacgctcgaaaccatcagccagtcggtccattacccgtgcatgatgatccacgattccgatgcctccgccatggtcgagctatggttcgactccacgctcaccgatgcggtgtgcgtctatctggagcgacgcccgggcggcgcggtgatcgtgggcggcaagctgtatcagggtccgaatatgtgcaatggcgccatcgaacacatgacgctggtgccgggcggccgcgaatgctactgcggccagcgcggttgcatggacacctactgctcgccggagaccttgcccgaggattacgaaagtattcccggcttcttcagcgtgcttgagcagggtgaacggcatcatcgcgagcgcatggacgaatggctggattatgtggcgcaggccatcgtcaacgcgcgatccatcatcgcgggcgacgtgattgtcggcggtgaagcagcccagcatcttgaagacagtgacatcgaggatctgaaggcgcgcgtcatcgcacgcagtccgttcggcaccgaccatttcaatctgcgcaagagctactgcgccgaagaccagaacatcatcggtgccgcattgcgattcgccgagaattatctcgacgatatctgtggtgctgcggaacgcggcaggaaatcaagggcttccaccagaagtgacaacacgtctacaatggaggtatgaaaaacccaccgttgcatcgttacgccactcgcccagggctgtacttcactgacgacggtggggctgacgtcgttgttcgttccgaaactgccgatcaggtttggctgtgtgtgctggagcccattgacgagcccggcgccttcttccaagacgccatccgcctgttcgaagacccgaacgcctcgttcatccagcagatccatgagtttccggtgtgcacgcgcattatcgaacatttgtatctgcgcgagaccctgttccgcatgaccggaccgaactacggcctgtggtacgtgcacctgcccaaagcatgggacggcatgcgttatggctaccgcgtggatggcgcatgggacccgaaacacggcgtgcgcttcaatccatacaaattcctgcttgacccgtatggcaagggcatcgacggctccatggagctcacccccgccgccttctcctatgaatgcgatgtcgtggaccacaaggtaaccggctcggcatacggtgccatgagcaccgtagactcgctcggccatgtgccggtatccgtggccatcgacgatcgcgatatccataagcatgagggcgacccgcagcacccgcatgtgccgtggcgcaaaaccgtcatctacgagatgcatgtcaaaggcttcaccgccaacgcgccgtggctgcccgaagcgttgcgtggcacctacgccggactcgcccaccccacaacgctcgcctatctgcagggattgggcatcacctccatcgaactgctgccgattatggccaagcaggacgagctcttcctgcaagaacacggccacaagaactactggggctactccaccctcagctacttcgcccccgaaccctcctatgccaccaaagcagcccaagagaagggcgcggccgccgtgcgccaagaagtcatagacatggtgcgcgcgctgcacgaggccggcttcgaagtcatcatggacgtggtctacaaccacacatgcgaaggcggcgtcgaaggcccgacggtctgctggcgcggcctcgacgacctggcctactatcgccatcaaaaatccaataccggtcgactcgaagacaccaccggttgcggcaatacgctggacttcaccaacacgcatgtggtcacctttgccatcgactcattacgatactgggccaagcgtatcggcatagacggtttccgtttcgaccttggcgtcacgctggcccgcctggaaggcgaattcacccatcatcacccgttcctctacgccctgcgttccgatctgctgctgggcaacctgaagctcattatggagccgtgggatctgggcaacctcggctggcgcaccggccaattctccgtgccgttcgccgaatggaatgaccgcttccgcgacacggcccgcaccttctggcttgaggatgtggacggcggctccgatttcggtcgtatcagtttgcaggagatggccacgcgactctgcggctcggccgatctgttcgccaccgaacccgggcgcggcgctccggcctccatcaatttcgtgtcctgccacgacggtttcacgctgacggacctcaccagataccgctccaagcacaatgaagccaacggcgagaacaataatgatggctcgtcggtgaaccattccgccaatttcggcgtcgaaggcgtcaccgatgatccagacgtcatcacggcacgcgaacaggcggccatgaacatgatcggcatgctgctgctctcgctgggtacgccgatgatgctcgccggcgacgaattccgcaacacacaggacggcaacaacaacgcctactgccaagacaacgacatcacgtggctgaagtgggattggatgtattccaccaacaagacacgcgaaatgcgtcgcctgaaaaccgtgtctcgactggtggcgctacgtaaatcactggacctgtatcaccacgaggacttcttcacccgactgacccaactcggcctactcaagccctcaagccgcgtgcagtggttcctgcccgacggcaccacgccgatggagcgtgactggttcgatctgggcgtacgtagcttcaccatgcgattgctgtccaacagtgaggtggacgtgtgcattgtggtcaacggcaccgctgacgaccgcacattccgcctgccgccagacactcactggacgcctaaatggtgctcggccgaaatcaacggccgccgagccgggcatggcattcaggtcgaggaatgcgatttgaacgatgacaccaccgtttggacgcagcatgtaccggacgccagcgagacggtacgcacgctggtcgaagaagtggccatgcagcgcacggaatcctcgactgaggatgaagcggataccatcgaattcgcgatgccagcaacggatcacgccgcaaacggcacctcgtccgcgcctcgggatgaggtatcagctgatatgcctgatgcccctgtggatgatacgccggacactcccgtcgacgacaatgtctggaccatgccggcgctgagcatcacgctgatgaaacaggtgtgagtcacactcaaaacagcacgacacaaacacaaaggctctccgcggaattccacggagagcctttgcatgctcggtacaggacaagcgaaattaacgcttggagaactgcggggcgcgacgtgccttgtgcagaccagccttcttgcgctccacgacgcgagcgtcgcgggtcaggaagccagccttcttcagggcggcgcggttggcatcacgatcgatggcgttcagagcgcgggcaacgccgaggcggatagcgccggcctggccggtggtgccgccgccgtcaacgaggacgatagcgtcgaacttgccttcgagcttgagcagaacaatcggagagttgacctcacgctgcagcagcttggaggggaagtactcctccagggtgcggccgttgatggtccacttgccgtcacccggaaccagacggacacgggcgacagcctccttgcggcgaccggtgccgtagcccggctcgatcgcggaggtgccggtgccagcgccagcgttggtctcggtggtgtagttggtgagctcctcttcggtctcgacaacctgggagtcgttggtgttttcagccatgattcttatctcctctcaggtttcacttggcctgctgcgagacctgggcgatctcgaagacctggggcttctgcggggtgtgcgggtgctcggcgccgcggaagacacgcagacggtcgagctgcaccttggccagacggttcttcggcagcatgcccttgacagcgttcttgatgatgcgctcggggttcttctcgagcagctcggcgtaggagtcacgacgcagaccaccgggacgaccggagtgcgagtagagttccttgcccatcttgttgccagtcagagcaatcttgtcggcattgatgatgatcacgtggttgccggaatcggcgtgcggagcgtaggtcggcttgttcttgccgcgcagcaggattgcagcctgggtggcgagacggccgagcaccacgtcggtggcgtcgatgacataccagtcatgagtcagatcagctggcttcggagtgaaagttttcactggattaccttttctatattgtgttccgggtctcagctgcttggcgtggcttggtcagggccgcatccaagaggcatcgaacctcattatccgtgggctccctgaaagtcctcgatggcgagtgggatagcgctttgaaggaccccttagggaaacacaacaatccactagtatatcgccgggcttgacatagggcaactggggacactccattgggtttatggcttctcttcccctatttatggtttctcttccacccacttcggctaaccgactcgcctacggtgaggcaattccctgccttctctcagctatcgcttcgttcaggcctcgtctacggacagtccactggactgtccgcttaacgactcggctcgtcagagggaggtaaagtgggtcaggaattgaagatttgggcgaagcgttggacgccgggggtgtcgaagagggtttcgagcggtaccacgttgcccttggcgtcggccagcgggatgcgccagttcgggtattcgttgttggtgcccggctggttctgcgcgcgcttctcccccaccgcgtcggtgatcgaggcggcgagcagcttgcacggcgaacccttcagtgcgcggtacagcgcgtcgatgatatccgcctcgtgatcctcacgatgttcggcgaagtcggcatcaagatagccctgctcgaccagcatgaccagcatcgcatcctgctcggcctttgcggaggcttcgaattcctcagccgggccggtcagcaagcccagacgctcacgaatcttgacgtgctcgtattccaggtaaccggcggtcggcggcaaatcgtgcgtattcacggaggccaatgcgtacggacgccactgggagggggcgcggaacacgccgtcgcactgctcgaaccattcaacggcgcaaccgagaataccgtggctcgacagggaatcggccacatggtccggcaccacgccgaggtcctcacctacgaccacgccgccggcgcgagaggcctcgatggccagaacgcccagcatgatgtctgagtcgtagtacacataagcgccatccatagccgaccggttctcgggaatccaccacaggcggaacaggccgagaatgtggtcgatgcgcaccgcaccggcacgggcgaacatgccatgcaccatattgcggtaggtctcgtagccggtggcctccagattgatcgggctcagcggcggctggctccagttctggccttgctggttgaacatgtccggcggtgcaccgaccgtggctcccttggcgaagcgctcgggattccaccacacgtcagcgccggaggggtgcacgccgacggccatatcggacatgatgccgatatgcatgccggcgtccttggctgcctgctgggcggaggacagctgctcggcggcaatccattccagccagcggtagaagtccaaagtgtccgggtactgcttgcgcagattggcgatttccggggagttgcggttgaacttgcgctcccagttgctctcctcgccgttgggtgctccccacttgtcgtagcacaggcaccacgtggcatacgcctccaagtcggaaccgcagtccgccttgaattggtcgaacgcgctttggcgttcggcggtacggccggccttgaagataatccacagggcgtgcatcttgctgcgccacatggcgtcacggtcgatgagctgggaatcaccgttcagcggttcggtgtcggcatgcagtccgtcgacggcgttcttgtcgcccgcgctgagcgtggcatattcggcgatcgcctcggggcggatgtacgtgaagttgatcaggcgacggcttaccggcagatacggcgacggggtgagcggggacaccggctcggcggcatgtaccggattgatgagcacgaagtcggcaccggtcttctgcttggcgtccaccagcatggtcttcagatcctcgtaatcgcccacgccccaggagttggaggagcgaatcgagtacagctgggccatccagccccacagactgccgcccttcatcgggtcaagcagatcgacgcgatcaggtgcactgatcaaagtggcgtcttgcacacggtcggcgaccttgacgtgcagcgtatggtagccaatcggcagatcggcgggaatgaccacagccgcattcgaaatgaacgtgccatccaagtcgtaggcctgggatccatctccaggaccaacttcaacggtgccctgatatggctcgccgttctccagcgtgatgctcgccgaaggcacgtccagaatgccggtgttcaccagcacccggtcctcgctaccggcgatatgcagcacggtgggtgccaccaatcgggagtaacgctcgttcagaatgcgtcggatggcgatgagttgggcgttctcgctggaggcgtcgatgcccagcgctgccagcacctcgatcaggacgtcatcgtctatctcgtggtagtcatggctcatgcccacataactcgtgccgacaccgaccaacttggccagtcgaatcaacggacgggccagacgctcttcactctcggtaatctcactcatagccccagtctaacgccgtttgattgcgccacaccgtaagcaaaatgccgtgattccgccaaattatgtactttttaccctcacatagtgagatgtgagcgctcacaatggtggatagagggtgattgccggccaaatttgcacggcaaaacacagcaatagtgtgcttagcggcggctttccacggcgtgccgcacctcggccgaggggtcgttggccaatttggcaagcatcgcttcggacgtattggggttcagcgccacggcacggcggaccatcgaggaaagcactgccggtgctccctcttcggattcggtgccaagtacgcccaagaaatccaatgtctccgcatccgcagtggggtcctgcgcaccctcaagccgcatcttccagctggtgcgcttgtttttcaacgccgtatcccggaccgcaggtaccggatccttggtcaggcggccgaccagccaattcttgtcatccccgttggcggccacggcttggcgcacggacggttcggggtcttcggagagtttgaccaatacgttcgggaacggcatggtgtcggcgaggaacacgcgatcggccaccggggtgtgcgggttgccggccacagcctccaaaagtgcggtggcgcgggagaacgccgcctgatcggcacggtcaggcaacggccgacgggcgaattcggacagttcggccgggtcggtggaatgacgcagacgttcgtatgtagcggtcagcggttcgaaatccaccggagcggcggactcggctgcggcctgcgcgccttggtcccgctgctgggcgcccgtgtcggttgcagtctcggttgcggcctcggtgggctgggtccgctggctggtggtgttctcgtcggtcatgatgcccagcttagtcatacaggcgtcacgcgaacggaatcggaatgttgaccacgtcaatcgggtccggcaccaccgcggcattgaacgcttcccgcacacactcctcgaatcgcgcgcaatcatcctgcggcaccaccgcggtcaactcgacgttcgccgcatacgattcatcctcctgactgccaccgagctgcgccagaatctgctggaatcgtgccagctgcgggtattcgaggcggacccggtatcgcttggcggtcatgatgcgggcggcgcgggcggctttcatcgccaatgatgcggcggatgagtacgcgcggaccagaccaccggagcccagcagaatgccaccgaaatatctggtgacggcaaccacgcaatcggtggtgccggactgcttgagtacgtcgagaatcggcttgccggcggtaccggacggctcgccgtcatcgctcatgcgttcggacagtcgcccatccgcgcctccgcacacggcggcatacgccacgtgtcgggctttcggatgctgctcacggatcgcggccacgaacgcgagcgcctcgtcgagcgtatcgacatgggcggcgtcgccgatgaattcggactttttctcgacgagcgaatcgtgggcgggatcgtcgggcgtgttgagaatcgtctgcatgagcgtgttccggtggtcgactggctgggtgttcgactgagcgcgaggccaggcagggctatcagcgttcggagacgacgacgttatagtcctcgccggcgaagtaggcggtcaggcaggcgatcatctggcgggtgagctccttgaacgcgccgtcggtacgccagccgacgtgcggggtcaggacgatgccgggcacatggcagatggcgtcgtcggcagtcagcggctcgtggtcgaacacgtcgagtgcggcgggaacatcgcccttttgcagtcgggcaagcagcgcaccggattcgatgacttcggagcgggcggtattgatgaacagggtgccgggcttcacatgcgcaaggttctcggcggtgacgatgccgcacgtggcgttgttcagcggcagatggacggagatgacgtcgctggtttcgatgagctcgttgagatcgtcgaccggagtggcgccggagcgttcgaaatgttcgggcggcacatgcgaattccatgcggcgacctccatgccgaaggcgcgggcgatgccggccacggtggcgccgatgccgcccagtccgatgatgcccatgcgacggccggcgagttgcagtccatcgccgccggcccacgcccagttgccggccttgacatccttatcgagttggccaacgcggcggatgagctcgaacaggagggcgaaggtgtgctcggccacggcgtgatcgccataatgttcggcgttgcagacgcggatcttcagctcgcgcgccttatcgagattgatgtagctggcgacgccggtaccgcagaacacgatgcacttgacgtgcccctgctcgctgatggtgcgcagcagatcatccgaaatgtggtagccgcccaccagcagggcgtcggcatccttcagacgctcggctatggtcgcctcgtcggacgtgaattcctcgaacatacgcacgcgggcaacgtcgtggagcgcggggaactgggccttgatgggctcgatcatcgcgtcgagcacggacggcatcacgacgaggggcagatcggtgcgttcgctttgggtttcgtaaatctcggtcatgggctccacattaggaggccgacgggaaaagcgtcaccttgcggcttcccctccttgagaccaagccgagcaactattgctttgccgcctgctcctgcgtgatgttccattccttgacgacgttctggtccgcgcccatcgaatagatgacatcccagatgcgttggcgtatctgagcgtcgtaggcttcgtcccaacatgtgcctatgggatggtcgctggatatcgggcaccattggtagttgccttgatgcacgttggcggtgggcacccagtcgatgcggttgacgcgccacgaccccttgacgcccttcttgccggcgaactggatgcgtgcggtcacaccctggttgttgaccaaggtttccggcgtgttcgccgactcggtgacggtgttgcccagaccgtagacaatccacgtgccgttatagttctcgatgggctgcgcacaatggcagccggcaccgtagataacgtcgaaggcaccagtgtcggcaagctcatgggcttccgaaatctgccaggaatcggcgtaatcaaggtattcctgcaccgagtgcatggcgatggccaccacatcggcaccttgctcgcgggccttgttggccttgtctaccgcgcgctggatgtcgctgccgtgattcgggtcgccgtcttcgcgcagacgatccacctgccagtcctcgtcggcggtcatgccgttgagggagaccgtgccggtgaccagacccagcttgccgccgccggtcggggaatcgatgactaacggtttggtggagtcggcttcggttttgtacgagccggtctgggcgatgccatcggcctcaagcgtgtcccacagacgggcgatgccatccgccccctgatcccaggaatggttggtggcgtgtgtgcaggtgttgtatcccacgttgcgggcggcatccgccacttccggcggaatgttgaagatcgggtacgcggcatatgggccgccgcgctgggcgatcggggtttcgaattcgcacacggcgatgtccgaagcctgaatgtactgcttcatcggcgcgaacagcgggtcgaagttgaaggcggtgccatccgtggcgttggggttcgggccttggaaatggctccacaatccctcatggaacaacaaatcgccgttgaccagcatggcgatgcagtccgtatccgggcaatccggtgaattgccgtgatgttcggtcaccggtttgggcgcgttcttcgctttattcaacgcgacgtccgacactccggcgcgtgcggggccattgccgtccgtgcgatgggttgcgaaccatgcgccgatgcccagcgtaacggcgagcgcgatcacgaacacgataatcagcgccgcacggttggttcgtgtcgagttggagcgatgttgcccctgcccagcgatatggctcatctttgcccgcccttcggaactcttcttctctctctagtgtaccgcccatctcagtcaaacactgcggggaggaaggcgatgggcaagcgattggacaagcgacataaaccggttaatcttcaatcaccattcacgaacaccacgcaaaagtctcacttagtggacattcttctttcgtttgttagccttttccccgaggtgccgcactcgttcacccgctaaaatggcggtttggaggcggacggacaatggcgtacctccgactccgcttaccacaagcggagaccgaccgccctcggttatttcggttatttctagcgacacattcccaggaaagtttcgcaaaacagatccccaagcaacccactagaaacacattcccaggaatgcgtcgcaaaacagatatccggacaacccaccagaaccgtattcccggggttcgaatccctctgactccgcgaagtgcgaacaggcccatcatcaggagtttccggaaaacaaaaaagattccaagctttcacccggaaccttaatcggcggagtcagagggattcgaaccctcgagccgtttacacgactaacaccttagcagggtgcccctatcggccactcaggcatgactccacgttacgcaataatgcgcaacagcaaattactgtaccacgtcctgcggatacggcgtgccgaacgacacattattgaccgtccgcgggcgcggcatcgccggagaacgtaacgataaccgcgcaaatcaccaacgccacaccgatgatttcaccaacgccgggaatctcgccaaacgccagtcccacggccaccgccatggcgggattgatggattgcattaccgaaaatgcgccggatgtggtgcgtcgcagcgtgatctgctccaccacatagggaatgaacgaggccatcagggaaatcacaaacagcagagccagcagcttcagcgagccgccgggctcaagcgcccacgtggcatcggccttggggtgaaccacatgagccacagccggcacgccaaggaacagggactggaccagccagccgatggtcacggcgatgcacagattatccagcgaattgccgccagccgccacgcgccggccggtgatgatgtacatgccccacatcgaccctccgatcaaaatcgcaatcagaccatacaaaaacgtgcccttgccggacggattggccaatgatatgccggccaacagcaccacaccgaccgccgcgatgccgataccgacccgctcacgccagcttttgccggtaatcaccgccaccgaaagcggtcccaaaaattcgatagacacggcaatgcccatatccatattgctgatggccacataaaacagggtattcatcagcaccagcgagcagccgagcagtacgaccagcccccagccgcgggcgtcgcggtgaaacagctgcgctcgcttagccttgctccagggcctgcaccacagcagcaacagcaccgccatgaatcccacgcggtaccacaccgaatacagcgggtcgagctgggtgaacgcaagtttggcgacggccgtagccaaataaatcaccagtgcctcaccaatcacgataagcaccacgggaacacggttgaggataccgaccactgccttcttcacgaggtttacgctactcggagagtcgggacagcgcgcagcgacttggaaggcgttacggacagtgacgcaatgtggacgattccgtggaatcgcacccaccatgcgaaacagccgcacagtgcgcaaacccttggaattccggcgatatttggcattacgacaatgagcgccgcgccatgcgcgccacatagtgagcatgacctcgttcggcattcctacaatggtggcatgagcaccgcaccgagacttgaggccgccaaacgcgattggggccacgacgagaccggatgcaccgtgctgcatatcgacatggatgccttctatgcctcattggaggtggcgcgcaaccccgggctcaaaggcaagccggtgatcatcggcaccgggccgcgcgcggtggtgtccgccgcgagctatgaagcccggaaatacggcatcaattcggcgatgccggccgcgcgcgcccatcagttgtgcccgaacggcgtctttctgccggtggatatggcgtattaccgcatgatgtcgcaccgaatcatgcacgaggtgtttttgaccgtcaccgaccggttcgagcaggtttcggtggacgagggctatatggatgtgtccgccgcactgctggagtgggggcggccgagcgcgatcggcgcgtggattcgcgctcaggtggccgagcgcttccacgtgacgtgttcggtgggcatcgcctgcaacaaactggtggccaaaatggcctcgaccaatgccaagccggacggcatgctgctgattccggcggcccgctcggctgagttcgtgcagatgatgccattgcgcggcattccaggcatcgggccgtctttggagaagcggcttaatgcttggggcgtgcattcggtggctgaattggctcagctggatgaagctgcattgactcgcgccactggctccccggctgcggcacgtggattatgggcggcctcgcacgggttggattcccgtgaaatcaccacggtgcgtgaggagaaatccattggatccgaggaaaccttggccgaggatacgcgcgatatgcgcgtggtatgcggtctgctgcgttcggcctgcgacgatgtggccagcacgctgcgacgcaagggactggtggcgcgcacgctgacggtgaagctgcgttttgctgacctgagctatcagacccggtcttttacgatggagcggccgaccgatacggccggcgtgctgtaccccgaatgcgtgcggcagctgaaagtcatgttggggctgccagcctcggcggagtctgccactcccctgcccaaa

SEQ ID NO: 2340 - DNA, 50288 bp, Unknown
  R119_18m  MAG No. k141_57010
ccctcaaaaaacctcacccctcatcaaaccctcccgggtacccgaccaccacgacaggcaatcaggcgaggaatgaactggcaatcattgactataaagaagtagtacaaacacgctcttgagttctcaaaccaccaccacaccagcaagacaggaaaccaaccagaagaaggaacccgccgcgctgagcggcaacaggtgaataacttacacgcatgtttggattcgcgcaaatcaaggcgcgcaaaagcctcaggaatcgttgcaatcacacggttccttcggcgtgtcgcaaacagcctatttgcgctgttctgataccagaataatccgttttgcattgccgatgcgtaacaaattcatgcgttcaccggcgtgttgcaagaattcgattgcgtgaccatccaggttcaccttctcgcaaccggtcatcgcatatgcaaaaagggacttccctttacgggaagtccctttcagtagctattgaagctcgctagcctcaggccaaggtgttcgggtcaaccggaacgcccgggttcatcgtggaggtgatggtcgccttggtcaggtaacggcccttcacggtggacggcttcagacgcttgacttcgtcggccacagccttgaagttctcgtccagagcggactcatcgaagctcatcttaccgatgaggaagctcaggttgccgttcttgtcgacacggaactcgatcttgccgcccttgatgtccttgacagccttggtgacatccatggtcacggtgccggtcttggggttcggcatcaggccacgcggaccgagcacacggcccagacggccgaccttgcccatcatgtccggagtagcaaccacggcgtcgaagtcgaggaagccgccctgaacctttgcgatcaggtcgtcatcaccgacgatgtcggcgccagcctcggtggcctcggtggccttcgggccacgggcgaacacgaggaccttggcggtcttaccagtgccgtgaggcaggttgacggtaccgcgcacgagctggtcggccttacgcgggtcgacgctcagacggaacacggcctcgacggtctggtcgaagttgtaggcaggcatgctcttgagcagagcgatggcctcgttggcggtgtagaggttgttgcgatcgacgcgctcagcggcttcgcggtacttcttggaacgctttaccatctgtccttctccttatcagtccgtaaccgtgatgcccatcgagcgagcggtgccctcgatgatcttcatgccggcctcgatatcgcgagcagacagatcttccatcttggtctcggcgatttcgcgaacctgcgccttggtgacagagccgaccttgtgggtcagcgggttctcggtacccttctcaatgccagcagccttcttcagcagagctgcagccggcggggtcttgagaacgaaggtgaaggaacgatcttcgtaaacggtgatctcgacagggatgacctgacccatcttgtcctgcgtctgggcattgtatgccttgcagaagtccatgatgttcacgccatgcgaacccagagccgggcccagcggcggggccgggttggccttgccagcctggatctggagcttgatcagcgccgagactttcttcttgggagccatattatggttcttctttctataacgcggttcgaatggtcgccgtcctcagatccgcttgcctgctatcacgctcggtcttgactcgttatttatccgtgcatgctgtaggcaatcggcctgtggtcggtctcctcccgcaacttatattgctgtgctgtgctagcgggtcttccctccagacacaagctttcctattatgcaaatccacccggacaacgcaaaaagcccgaccacgatggtcgggctctgcaaagtttggggttaatccagcttctgaacctggtggaagccaagctccaccggcgtatcacggccgaagatggacacgagcacggtgagcttttgggtggtgggctccacgtcggaaacaacggcggccatggtggcgaaaggcccatcggtgacggtgacctgatcgccaacggcgtaggagacttcgaccttgcgcttcttggcggcggcgggcttgtcgccggcggccttgagtgcctcggaagcgatcatcggagccatcatcgccacgacttccttgcgggagagcggcgccggatccttggtcgggccgacgaagccggtcacgccttcggtttcgcgaacgatacggcgggcgttctcatccggccacatacgaatcagcacgtagcctggaacacgcacgcgggtgatgaccttcttgcccttttcggtgtgcttctcgacttcttccatcggcacctcgacctggaagatctggtcttccatgccgaaggaggcgacgcgggactcgatattggtcttcacgcgcttctcgtagccggagtaggtgtgcagcacataccacttgccatcaagggaacgcagggacttggagaattcgtcaacggcctgctgaccggcatcggtttcctcggcctgctcggattcgttgacttcttcctcgtcctcatccagagaaacggtctcggtctgagtggaagcaacgggagcggattcagtcgcggccggagcggcggactcaacatctgcattgtcgacggatgcgtcagattctgcggaaaggtcagcaaccggttcagccggggcagctgcctcatcggcagcaacttcggaagcctcgacaacaggctcctcagccggcacggcgtcgagattctcgagattcagttcatcactcatgcgttgttattcaccttaggttgtgcggatcagccgaacacccacagcacgagcttgcccagaccgaagtccatgcccgtgacgagggccatcagcagcagcacgaagataaacacagccagagaccagaagaacagttccttggcagtaggggttacgaccttgcgaagctcgtcgatgatctgcttgataaacagaccgatacgcatgaagacattcggcttgactaccttttcgctgttgttcgtcttagccattctgtacctcgcgtcagctgcttgattattgaaaacttggcagggaaggcgggactcgaacccacaacctacggttttggagaccgttgcgctaccaattgcgccacttccctaggtgaaaatccacctcggcgtgcattccgtagagaacgcttcgccacggcgaaaccgccaagttgttatagtaacggctccggtggattatcgcaaatcgcgtgtcgcgcgcgtggcatgtgcgcggcacacgactcttctcagttagctcagttagcccattccttgaatcgacgcatgccttcggctaggtcttcgtcggccagtgcgtaggagaaacgcaggtaaccgggagcaccgaaggcctcaccagggacggcggccacgtgggcctcatccaacagtgcggcggcaaaatcagcggacgtatcggacacagtgccgttgggccccagcggcttgccaagcaaagcggtgatgtccgcaaaagcgtagaacgcaccggtcggagtcgggcagttaacgccctcaatatcgttcagagcagccacgatcgcgcggcgacgtgcatcgaacgccttgcgcatctcatgcacctcgtccagcgggccagccacggcggccagagccgcacgctgggagatgttggccacattggaggtcatatgcccctgcagcttggtggcggccttggccacctcaagcggcgcgaccatccagcccacgcgccagccaggcatcgcataggtcttggccacgccgttcagcaccagcagctgcccgcggcattccggcacggcggcaccaatgtaggtggtgcgcgcgtcgtcgtagttcaggtgctcgtagatctcgtcggagataacccagatgtggtgctcgacggcccaacgaccgatcgcttccacggtttccggcttccagacggctccggtcgggttgttcggggagttgacgatgattgccttcgtacgctcggtacgggccgcttccagcgcctcaagcgagggctcgaagttcacgtcggcaccggcgaatacttcgaccggcacgccacccgccaatttgacggcttcaggatagctggtccagtacggagcggggatgatgacctcatcgccatcgttgagcaagatctggaaggattcatacacggcctgcttgccaccgttggtcaccacaacctggtcggcggacacctcgtagccggaatcgcgcagcaccttagccgcaatcgcttcgcgcagctcgggcaggcccggcgtaggcgtgtacttgtaattctttgggtcaaggcaggcatctgccgcagccttgaccacgtttgcgggggtcgggaaattcggttcacctgcgccgaagccgataacgtcaagtccggcggccttcatggccttggccttggaatcgacggcgagcgtagcgctcggtgccacagtgttgatacggtcggaaagagtctgccattgcgccatagtcatggcttccatgctaaacctacagcacgaaaaatcgccagagccgcactatggtgatgaaacctgtcgtgtgacagatcccatcagtcacacaagtacaagattgtcgcgatgaaccagtgggtgggcgtactgggggccgaggaaacgcttgagttgggcggtgttacgcccgagcatctgcggaatttcttcggaatcgaagccggcgaggcctcgggccaggtgttcgccgctttcggcatcgatccagaccggatcgccggcggaaaaatcgccatgcacttcgagcgcgccggccgccagcagcgaggcacgcccgccgcgaatcgcctggccggcacccgcatcgaccacaatcgtgccgcgcgggtcggcggcaaaaccaatccacagacggcgtgatgagccgcgggccttaaccggtgcgaacacggtgcccaccggatcgcccatcatcgcagggcccgcgttcgaggcgcaagtgagcaccgtggggatgccggagacggccgccacgcgcgcggcctcaagcttggtgaccatgccaccggtgccgaccttggagccggagccggaaacctggatgtcgccaaatgcatcgataacgttgggcacatattccacacggcgggagccgggctgggaaggcggtgccgtgtatagcgcgtccacgtcggtaagcaataccaaagcctccgcgcgaactaggttcgcaaccaatgcggacagacggtcgttatcgccgaatcgaatctcgttggacgccagcgaatcgttttcgttgataatggggaccacaccaaggtccagcaatcggtccagcgtgcgttccacattgcggtactgggtggcacgaatcgtatcttcggcagtgatcagaatctggccgacgcgaataccgaaacggccaaaagcagtctcgtagcgagccataagcaaaccttggccgaccgctgcggtggcctgctgagtagccacgtcggccgggcgttcgtcaaagcccagcgggccgaagccggccgcaatagcaccagaggaaaccagtactacacgcccgcccatcagtcgtatttgggcaagggcggcggccagagcgtcgagcttgcctggatcgaggtgaccgctcggctgcgtcagcgaactggaaccgaccttaacgacgatggttccagcggatgcgacggctcgccgcacctcggcctgactcggagtgctcatttattcctcggtttcaccatcttcgctggactcaccgtggccgaacagactggtttcgtcatggcgatcgtcgtcaacggtcgggtcggcccagtggccggccttgcgttcggccatcatcgcgtcgcgcacggcggcacgggcgtccatcatctcgtggtattgggcacgacgttcggcgttggagcggcggtgcgtgcgcgggtcctgttcctcaagacgcagatccttgcctcgggcaccgaggttggagccatcgagcatttcggcaccggcggagatggtcggatcccaatcgaattcgaccatacgggcaccgcgaccgatgcgcacctcgtcaccagggtgggcacccttgcggcgcagctcgtcctccacgcccagcttggccaagcggtcggccagatagcccacggcctcgtcgttgtcgaagttggtctgcatgacccagcgctccggcttgacgccacgcacctcgaagaacacttcgccattgccgagttcgcggcgctcgaccgtgaactcaagcgcactgccgccctcgtcagcgcgacgcggacggcggcccttggtctccaatggcttgataaccacgcgcgtctcctcttcggcctgctcgcggttggccacttcctcacgcatctcatgcaccagcgcagacaacgcgaagttgagctcctttagaccctcgtgtgaggcggtggagatctcaaagaccttcagcccgagtttctcgaactccggacgcacgaactcggccaattccttggcctcgggcacatcgatcttgttcagaatcacgatgcgcgggcgttcgggaatcgggatggcgcccaatggcagttcgagcttgtcggcgtagagcgccaactcgttttccagcgcgtggtagtcggacatcgggtcgcggtccggttcaagcgtggcgcaatcaatcacgtgggcgatgatttcggtacgttcgatgtggcgcaggaactccagtcccaggcccttgccttcagaggcgccaggaatcaggcccggcacgtcggcgatggtgtatcgagagtcgccggcgatgacgacgccgagattcggcaccagcgtggtgaatgggtagtcggcgatcttcggcttggcggaactcatcgccgcaatcagggacgactttccggccgaggggaaaccgaccaacgccacgtcggcgatggacttcagttccagaatcacgtcgcgttcctcgccgagttcgccgagcagggcgaagccgggggcgcgtcgggtcttgttggccagggcgatgttgccgaggccgccggcaccgccctgggcgacgacgcagcggtcgccctcgtgacgcaagtcggcgagctgtgcgccgggatgcttggatttgccctgttcgccgcgcgcctcaaagacgacggtgccgcagggcacgggcagaatcaggtcctcgcccttggagccgtccttattgtcgcccaaacccatggtgccgctgccggcgacacgatgcggcatgaaacgatagtcgagcaggctggtggcgttacggtcggccacgaacaccacggaaccaccgtcgccgccattgccgccgttcggaccggccaacggcttgtatttctcacgacggatgccggccgaaccgttgcccccatcgccgcccttgacatggacggttactcgatccacaaaatcactcatattgattaccttacaaaaaagccgcgtccttacgggcgcggcttgaaaaagcttgacgctatatcgctcaggcgatgacgtcgacaaccttgcggtcgcgacgcacaccgaacttcacggagccatcggtgagggcgaacagcgtgtggtccttgcccatgccgacgttgtggcccgggtggaagttggtgccacgctggcgaacgatgatgttgccggccacgacggcttcgccaccgaacttcttcacgccgaggtattgcgggttagaatcgcgaccgttgcgagagctggacgcacccttcttatgtgccatgattcatggtcctttctataactcaggcaatcgccgtgatcttgacgatagtcagcttctggcgatgacccttacggcgagcaacaccagtcttgttcttgtacttctggatgtcaatcttcgggcccttggcttcatcgttcacaacctcagccttgacggacaccttggccagatcggcggcggcgagggtgaccttgtcaccatcgacaacgagggagaccgggaattccacggtatcgcccttcttggcgtcgagacggttcacgaggatgacgtcgccaacctcgaccttttcctgatggccaccggccttcacaatcgcgtacattatcgttccttttatgttttggaaagctaccttgcctaacacgcaccgagcctgcggtcagacaccgagtttcaaatctacaccaccatgcggactaaatcaaatgatttttgcccgcgtgtcaagcacgacacacctgttactcttccgccgtattgttggcggcgacggcagcggcggcaatctgagccagtttggctttgacgtcggcgctggaaccagccggttcgggagcgggagcggtgccgcgaccgtgcttgttggttttgacgaacgggtcaccaccgcgaagcgcgtagggatcgtcgtagtcggccgaaacggtcggctgatcatgcaggatgaaaccacggcccttgcaggtcgggcattcctcggagaacgcctcgaccagaccctggccgatgcgcttgcgggtcatctgcaccaaaccgagcgaggtgacttcggccacctgatgcttggtgcggtcgcgtgccaggcattcgaccaagcggcgcagcaccagatcgcggttggcgggcatgaccatatccacatagtcgatcatcaccatgccgccgatatcgcgcaggcgcagctggcgggcgatctcttcagacgcctccaagttgcagcgcgtcaccgtttcttccaaggacttgcccttgccgataaagcggccggtgttcacgtcgatggtggtcatggcctcggtgcgatcgatgacaatcgagccgccggacggcaggtagacctgacgttccatgcccttacgcagctgggagtcgatggaccatttgtcgaacacgtccttgccttcgtgctcggccgggtcccacttctccagcttgtccttcaggtcgggggccatggtgtcaaggtattcctcgatacggtcgtagaccttgtcaccttccacgatgagcttgctaaagtcgtcgttgaagatgtcgcgcaccacgcggatggccacgtcgggctcgccctgcaggagtttcgggcgcttgccgtgccagaattcctcgcgcttggcgttgatgcgctcccactggcggaccagtgattcgagatccttgacgatggcgtcttcggatgcgccttcggccgcggtgcggataatcacgcccatgtctttcggggcgatcttggagacgatgttcttcagacggctgcgttcgcgctccgaaagcttgcggctcacgccggtcatgccaccggagggcacgagcaccaggaagcggccggcaagcgtgacctgagaggtcaggcgggcacccttgtggccgatcgggtccttagtgacctgcacgagcaccgggtcgccggacttgaacgccagctcgatgcggcgcggctgaccttcgagacgagcggcatcccagttgacctcgccggcgtagagcacaccgttgcgggactggccgatatccacgaatgcggcctccatgctgggcagcacgttctgcacgcggccaagatagatgttgccgacggtctgtacttcctgaatgtcggagacgtaatgctcgaccagaacattgtcttccaccacggaaatctgggtgtggtgttccttctcgcgcaccaccatcaggcggtccacgttctcgcggcgtgcaaggaagtcctgttccataagctggctttggcggctgcgctcacggcggttgtcacggcggcgctgcttcttggcctcgagacgagtggagccttccacatcggtgatttcgtcgatgtactgctgcttgcgggagcggcggaccagcggctgttcgctgttctgactctggtcgtcggtgccctcgccgttcttgccgccacgacggcggcggcgacggcgagtgacggtctgctcctcatcgtcctcatcgcgatcacggtcatgatcatcgcgatcgtcacgacggcgggaacgcgtatcctcggcatcgttctcggcggtatcgtgctcgccgttggcaccggtttcgccgcgtgagccacgacggcggcgacggcgcgaacgggtgcgggtgacgtcggattcctcgtcgccctcctcctcggcaatcggcgagtaggcgatatcgtccagctcgaggtcttcctcaatctgctcgacttcggcggctgcacggcgctcctgggcgttcagacgacgggagcggcgcgaacggcgggagtccgaggtgtcgtcggcgtcgaaatcgtcgtgatcggcgttggtatcgccggacgcggcgtcacgggaagcgtcacggtcggcggaggcgcggccgcggtcgtcgcgatcgtcgcggcgacggctgcgcggctgggcatcgtcatcgtcgtggctgcgcgagcggcgggagcgacgagacgggcgttcgtcggcgtcaacaccgtcatcacgagtgtcagcggtatcgtgcgcatccacggcggcgggcagcaccggttcctggaacagcagggacgtcatcggcttgccacggcgcacggtctcgtggccagagggcagggattcgaccgcgtcgaacaggcgctcatccggggtgtcctcgtgcgtatccgcaactgcacggcgagaacgacggcgaaccgtacggtcttcgtcatcatcatccatatccataggcgcacggcggaggcgggagcgaaccgggcgatcctcgtagtcatcatcgtcggactggcgggagcgagagcggcggcgaaccgaacggtcctcgtcgtaatcgtcatcgcccacgactgaacggcggcgggaacgcggggcgtcatcgtcatcgaaatcatcggcactgaccgtgcggcgcgaacggcgcggacgatcatcctcgctatccaagtcggccactgcggaagcggcgcggcgcggacggcgcggagtctcgtcgtcatcatcggtatcgctggaagatgcggcggacgtacgacgggtgcgacgcggcgtttcggcggcatcgtcggccgtggaaacgcggcgcgtacggcggcgggttggacgttcggcggaatccttggaatcgctggattcatcggaatcgccggaatcggatgacttggaatcggccgcggtgctggcattgggaagcgcgggggcttcgaacagcggggtgcgttcctgcacttgcagttccagggaggcgccggcagcaccggtgccgcggaccacgcggcggccgccacgacgacggcgaacaggttcgacgggctgggaggcggcggcaggcgcagcgttcacggctgcagccgaatcggcattggatacggttgaattatcggttccgtcgttgacgaaaccttcacggttgtcagtgggcacaatgctcctcgcggcgcgctgcatcacgacgcctatttccaggcctatacgcttgactcacaccacgctctcaccgtggccgcgcgaaaacgcgccgcgtaaaggcaacttcgtctcaagtctgtcctgcgggtggcggacaccggcgcttgcgttgtctcattctcgagagccgcaaggggatcgacgccatctcgcacgctgatggttatgcagaaccaccatcctttagtatgccacatattttgtgcgggcgtggcccggcgaggctgacgttctctcggctcccctccctgcggtgacagctcccctcagagaggggagctggagaggtgtcagaccaaccagtcggtaagaattgcggtcatggcggccaggtcggattcgggcacctgctcgtcgtgcttgtgcgccagcagcgggtcgccggcaccgaggttgacggccgggatgccgagctgggagaagcgtgccacgtcggtccagccgagcttggccaacgggtcgcggccggtgcgctccttgaccagtcggaccagatcttgggcgagcggggcgttcaggcccgggcgcgcggaggggctttcgtccttcatttcgatgccgtagccctcgaacacgccgccagtggccacatgctcgccattgccgagttcggcaccggcatccgcgcccatcatcagagccttggcctcggccagcgacttgtccggggcgaagcggtagttgacgtgtacgcggcattcatccggaatgacgttcgtgcctttgccgccggaaatcagcgtggcgttgaggcactcgcgatagtcgagcccgtccacgttcacggtggccggctcgtaagcgttgagtcggctcaggatgtcggccgccttgtggatggcgttctcccccatccacgcgcgggcggagtgcgctgccacgccgtgggtcacgacgtcgaagcgaatcgtaccgttgcaaccgccctcgatgccgctgttggtgggctcgccgatgatggcgaaatcgccggtgatccaatcgggatgggcctcgacgactttgcgaaggccgttcttttcggcgacgacttcctcatggtcgtagaagacgtaggtgaggtcgactttcggggtggtttccggcgtgcggccgtcgagcgtggcggcgaggtagagcatcaccgcgtcggaggccttcatatcggtggcaccgcggccccacagcacgcggtcttcgggatgagcgtgggcgatttcttcgcgaatcagcgaatcgccgggctccagccacttcggtgggaaattgtcgatgaccggcacagtatcgaggtgcccggccaagatcacacggttcggctcgccgaagtcggtgctggccaccactgtgtcgccgtgacggcggacggtcaggtgctcttgctcgttaaggaaggcctcgacctcgtcggtgagggggccctcgtggtcggacacggagaagttctccatgatctgggtgagcaggctgttcagctgctcggcagtggatgcggtgcggttcaattcaagcgtcatgtgaacagcgtaccgcgtgggcggcgggcccagcacacccactacatgagattttgcggccgaatacatttttatgtgccacactggggtggcgaaagggaggattatgtcaggtctaatcagcgccatgcaaggcttctgcgttatcggcatcgtgattgcggtgggatatgtcgccgcacgaatgcgaatcggcgggccgtccgctcagatggtgctcaaccgtttctccttcttcgtatcgagcccgtgcctgatgttcgccatcctctccaaggaaccgatcttcgacatcttccatccctcgattatcgtggcgttcttctccgccgtgctggtaggcgtggtgttcctggtgctcaaccgcatgttcttccacctgaacgccccggacgccaccatcggcgccctgaattcgctgtacctcaattccaataacatcggcctgccaatcgccacctacattctgggcaatccggctctggtggcaccgattctggtcatgcagcaggccatcttcacaccggtgggcctgacagtgctggacgtgaccaccaagggcaaggtctccatcaaggaaatcgccaagcagccactgcatcaaccgctgcttatcggttcgctgctgggcattgtggtctctgcgatttccgctaaaagcggctggttcccagtgccgaaattcattttcgacccgatcgacatgatcggcgattcagcggtgccaatgatcctgatggcgttcggcatgtccctacacggcaccaagccgctgcagcagaagggcgatcgcccggccatcttcacggtcgcggtcctcaagaacatcatcatgccaatcatcgcgttcctgctcgcctatttcgtgatgggcttccgcggctccgagctgtacgcctgcgtggtactcgccgctctgcccaccggccagaacgtgtacaactacgcggcccgctacaacgtgggcctcaccttcgcgcgcgacggcattctgatgagcaccatgaccagcccggtgtttatcgcgatcatcgcggcgctgctgagctgagccggcaactgtaatcaccgtaaaaaaaacttccgcgaaatccaccgtaggattccgcggaagcctgagatatacactacttgagaatcgccttaatcgcctcatactgctgagcagtgagttgcaccgctggctcacggatcagggtggaaatgttcagtcccttgaccttgaccgcacccttgatggcggagatgaacaggtcggtctgatcgtacagcgccatcaggtggctgatgcgttcggcggcctcaattgcggtgccatagtcgccggcctcatatgcacggtgcagcgtaacgaaggtctccggctccacattggtcatgccgcagatcacgccatcaccgccggagacgcggttgacgagatagtactcgtcgaaaccggagaacaccgcaaaccgtggattcacggccttgaccgcgcgaatcaccttgcgggtgtggctgattgtgtcgaccgtgtccttgatgccgacgatgttcgggtgcgcggcggcaagctcggccacgagctccggggtcaagtcgctgccggtgcgcggtgggaaattatagaggatcaccggaagattcgtcgcttcagcgaccgcgccgaagtacgccttcgcgcctcccgcagtagggccgaagtaatacggcgaaacgaccacgagcgcatccactccacttgcttcgactgcccgcgcgaagtcgatcacattgttcaagttggtatcgcccacgcccgcgaacaccttgatgcgcccggcgacatgcttggccacgaagtcgaccgcctgcttcttgacgtccagagggaaggcatagaactcgccgatgctgccaaacaccagcacgccgttgataccggcctcgatcagatgatcgagatgctgcccccaacgttcatagtcgatgtcaccgtcgtccttggtgatggtgatggatgggcagatgatgcctgagaattcggcgctgctcgtcatgattgttcctttcgttacggaataggggtgccgcacaagcggcaccgggtttgcggcctctcccccagtcgtcctgcggacgatagccccctcatcagagggggcttgggtttagtcgatgttgtaagcgcggcgggcgttgttttcgaagaagtcctcgtcctcgccgaacgtgtccagcatgagttggaagtgcgtggcaaaggtcgagttgagttccacgaccggccagttggagctgtacagcaccttcttcgggccgaatgtgtcccgcacgtatttcacgatgtccgggtccaccgggttgtcgccggaaaccttgatatacgaattcggcagttcggccaacgctgcgagtgcggcgcacgattcctcatcaagcccgggcacgttgccgagatgatcgatgatgaccgtcacttcgggaacctgcgagaacgccttggccatgtcgcccaactccgggccccggttgcacagctcgaatggcaatcccttggcggccatcgcgcgtagaccggcgatgaattcgggttcgagcgcacggccccgcggctcggaatccacatgcagcggttccctgatgccatcggcgttgatcgggacacgcatccaagggcttacccgtccttgcaacatgcgcttcaggatcagaggacttgcattctcgtacagcagccggtcctcaagctcgtgatcggccgcgtcaacctccacatatacgccgccgaggaaattcacgccaaatttggcgtactgtgcggctaggtcttcaatcgtgtacttgtgttgcagcgagggcaatcctgccagccatggcagatcctgcgcatccggatcccagatatggaagtgggaatcgattacgttgagtgtcatatcaggcctccttcagaccgatcttggaaccccagaatgcgtaccatgccacgaacaggaagcccgggaccatcaccaggatggcgatctcgatgcctgccgcatcctgaatcacaccgagcagcagcggaatcaacgcggcgcccacaatgctcatcaccaaagccgaggaaccggtcttcgccgcggaacccttgatacctttcagcgtcagggagaatatggtcgggtatccgatggaaatgaacagatacgccaccatgaacgcgatgacggagaccttgcccaggccaaggaataccacgaacatcagcacggctgaaatggtcatgtatacgccaagaatcttcgagggatcgaatttggccatcaatggggtggtggcgaagcgtccgatggtgaacagcagggaaagcacggaaagcatcatcgccgcggtgccggctgtgatgcccgcgccccagtgcttgagcgcgtaggcggagaagaccgccatgccggccacttgcaggccgatgaaaatgaactcggcaagcacgcccaatgcgaagtacggacgcttgagcagcccgaagaaggagctgttctcggaggaggtgccgcccgcggcctcctcttcgtctcccggaggcgtgggcagcttgaacagcgcgaacacggcgagcaccacgaccagcacaacgccgatcacaatgtatatcgtgcgggtatcattcaggaactgcgccttagcggcgtcgaagccggactcgcctgatgcgacggtggtgccgagaatctggccaagaatcagcgggccaacgatgttgccgacgccgttgaaactctgcgccatgttgatacggaacgattcgcccttttcatcacccagcttggtgatatacggattgcagttggtctccagcgatgccgcgccgagcgcgataacgaacatggcgaacaggaacaggccgtagctggccatgctggtggcagggatcaccatgaacgcgcccagagcgaacaggaacagaccggagatgacgccgcccttataaccgaaacgcttggcgatcaagccggccggaatggccatgacgaagtatgcgccgtaataggccacctgcagtaatgacgcttcggcgctgctgagttctatgtagtttgcgaacggcgagttcaacgcgttcacgaggttcatggtcaggccccagataaagaacagtgaggtcaccagtacaatggcgatggtcgccttggaaccggttgtgtttttggatgtcatcattgactccttagtgatacgagtttccccgatattgcctagcgagaagtggaccaccctgggccatgttggtaaacggatgacccagggcgcgggtgatacgggcggcatacgcggatacggcgtacggatggagcaatgatcaaagctccggaattgccgcgcgaatattcgggaaagggctgcttgtcagctcagcgcacggtcaaggtggacatagccgccatcgacgtacacccactgaccggtggtgtggctggagcggtcggagagcaggaatgccgcttcattaccgatctcttcggtggtggtcatacgatgttccagcggaatcttgtcggtgatcaccgacaggcgcgcctgctgggccgcttcatcgccaaaggtcttgatccaatcggcatagagcggggtccagcactcggagacgactatggcgttgacacgcacgctatcgtgcaccaatgcggcggcccattcacgggtcaggcccaggatcgcgcccttggcggccgcataggcgctggtcttgccttggccggtaagcgcggtcttggacgagatgttcacgatggatccgcggctttccttgagatacggcacggccgcgtggaccagctcgtaatagtgagtcaggttgccgtgaagcgattcctcgaactcacgccaagtagtggtctcgagatccttgttgtcgttctttccggcgttattcacaatgccatcgatatggccgtacttcttgtatgttgcttcgacgacgccggcgatcttgtcggtgtcgttgaggtcaagcaagtgcacatcataggtggtggtgtactgctcgatatccttcttgaactcgtcgagagcgctgtcgggtcgattaatcaccaccgggatggccccctcctgggccagttgcagcgtgatgcctttgccgatgcctttgaaaccgccggtgatgatgatgactttgccttcgagatgcagatccatgggaactccttcgtccatccttattctgcgtttcatgggtgttccatgtcacgcccggccggggcttcggcaccccagccggagtggttgtgtgttgttgtgttgagttgtgttgttcagttatgaattttcagttgcggtcagccgcgatacaggtacttctcggccgtctccagcgtcatttcggtaccgttgcccggagcggtcggagcgacgtagttgccgtccttgatctcggtcggatgaacgaaatgttcgtgctggttatcgacgtattcgatcattcggccatccatcgtgccggacacggccacgtaatcgaacatcgcgaagtggcatacggcctcgcacagacccacgccgccggcgtgcgggcagacgggcttgttgaacttcttcgcgagcaggtattcgagcacgatctcctgcggaccggccacgcgggtggcgtcgatctgcatgatgccgaaggcgttggcctgcagatactgcttgtacaggatgcggctctgcatctgctcgccggtggccaccttgatggggttaatggcgcgcgcaatcgtggcgtggccgatcacgtcatccgggctggtcggctcctcgacccacgccagatcgaagtcgtggaacttgttgatccagtcgatggcggtgggaacatcccacacctggttggcgtccacggcaagacgcacgtcggggccgatggcttcgcgggccttggccaggcgacgcagatcgtcgtcgatgttctggccgaccttgagcttgatctgcttgaatcccttgacctgggtctcctccttggcgagggccaccatcttctcatccgagtagccgagccaaccgggagcggttgaatagccggggtaaccgacctccagcagatgcttgatacgctcggccttgcccttctgaccctctttgagaatcgcaacggcttcctcagggcgcagggcgtcggtcatgtagcggaaatcgagcgtggagaccagctcctccggctccatctcgcccagcagcagccacaacggcttgcccgcacgcttggccttgatatcccacaacgcggagagcaccgcgccgatggccatatgctccacgcccttttcagggccaagccaacgcagctgggaatcatgcacgaacaggtcccatgcaatgcgcatgttgtcgagcagttcctcggtgttgcgcccaatcagcacctgcgacatcgattcgatggccttgcaaaccacgtcgttgccacggccgatggtgaacacgaatcccacacccgtgatgccgtcgtcggcgctggtggaaatctccacgtacgcagaggaataatccggatcggggttcattgcatccgagccggaaagcgtcgttgaagtggggaatcggaagtcatacgtcttgactttggtgatggtactcatgtgttcgggctccttcgcctggtgtgaaccaacggctatatcgtacgtccgaataaagaaatttgcaagcctatttgcgaaaatttttattcaaggccggacaaagggcaagaaaacacggaattgttacggcacaatgcgtcataatggtgggaacaacgacgaaatcgtctcagtaattgaacggcgaatatccaagagggaagcaccgatggttaacgatacatccacccacaagctcaaggtcggcgagctcgcaaaaatcgccggcgtatccgcatccactgtttccaaagtcatcaatggcaggtcaggcatttccgacgagacgcggagacaagtcgagcaaatcctcaaagatcacggttactcaaggcctctggtcaacaccaaactctcccccaccatagagctcgtcgtcgaatacattgagcacaacggcacgatggaactcatcaaatacgcctcatactgggcgcagcaggcgggcctcgccatcacggtcacccagaccaaccatggcgatgccacggaagactgtttccgcggcatcatcgatagaaatccccaaggtgtgattatgcagcagatgggcggtctgaccactcaagcgaagtctttgttgaaatcgcgcagtattcccgtggtcatcatcgacccaatcgataccgtcgattcggatgtgatgagcgtgtccatcgataactggaccgcaggataccaggccggcaaacacctgctgtcgctcggccatcgacgcatcgccgttatccgggggccggcgaacctacagaccagcatcgcgcgctatagcggattcaccgccgctctgcaacaggccggggtggatctgccggagtcctatatcgaacagggcgactacttccccgccgaaacaagctatgaagcagcctgccggctactggaactcaccgaccgacccaccgcgattttttgctgcaacgacttatctgcagtaagcacgtatcgtgccgcacgagagcataagatcgcgttgccaaagcaattgtccgtcatggggttcgacgacattttccccgccggccaactcatgccctccctgaccagcgtgcatcagccgttcagcgaaatagcccaacgcgccgtgcagatgatcatcgacagccgcaagggcaatcagggtgatatgcacgtcatcctccccaccagtgtcgtcacccgggaaagtaccgtaccgcctcagtcatcggcccggtaatcggccagattcaagctggcggccacccgattggacgcgaacgcacccaccgaaaccagcgcatagcacagcgcaagcccgccgaagaagctggccagcgtggccggttcggtcatcgaagcggcgaacagaggggccataagcagcatggaacagccgccggccacgatcaccacgatgttgagcggggtgagtacctcgatgaatcgcgcacggttcaaggtcttgacatcagtgccctccaacaccagcatgcgatattcgccggcctgatcgtacacgctgccggcctgcatcacaccggagctgaccgcggcaagcacagcggcgaacactagcgtcaggatgccgccggtgccgatgtcgcgaatgaacacggtggacgggtcgttggcgtcaccgaccacggcggccgagccaaagaatccgcagatcgaggtgatgccggcgatgaacacggccagtgcaatgccggacacattgcgccacgcgcgcttcggattgtcgagaatacggcgcatggcaatcatcgtggccgcgtccttgggccgtttggccttggctttggcgcgggcggtgaccacccaggagcccacgaggttcaccagcgcgaagcacagcagcatgaaaccgatgatcacgccgtacatcactacttcaccggcctgagccagcaccatcggattcttgaacagaagaacggcaatcaccatgatgacggcgaacaccaccacacgccagccggacggcagcgtagtcgcaacgcgtgaagtgacgccgagtggcgtgatggccacgcgccgaagcgtgaccagcgaagagatcagcgccaacacggtcacgccaacaagcgtaatgatcaaggcaatcggccccacccacagttgctcgaacgtaaacgtctgattctggaaatgcagcaacatgattagggggatcaacacgcagtaccccgcgatgccaatcagcgcccccaccaaggcctgcccagccgcatcaagcgccgtaaggcgaataacttgccccgtggtcgcgcctgccaagcgcagggatgcgagccgagcgtcacgacgggacgcagccaatcgcgcggcggaaccggcaagcgccacgaacggcacaatcagcagcaggcaggcaaagaacgccagcacgacgtatgccgtggcgtattgatccaggctgtggggattggcgatacgctgcttccagatttccgctgttccgggtttgcaagcgtcgagattgattgcgcatccaatggtgtggtcggcggaggcgcgccacatgaacccatgcacgccgcccaaaacggtgagaaagatagtggtggctgcggcaaaagcaatgatggccaacaccgaagtatgacccgcactgccacgcgagccggggcgatggaacaatcgccacaatgcgaaagcgctcatcgtacgcctcccagctggccgtcctgcatggtcacggtgcgcgagcagaacgaagcgacgttggggtcgtgggtgacgacgaccacagcggaaccgttgtcccgcgcggcggccatgagaatgcccatgacctcgcggccggtggcttggtcgagcgcgccggtcggctcgtcggcgaagaccacggcaggtttgacggcgagcgcacgggcgatggcgatgcgctgcatctgtccgccgctcatctcccccggccggtgcgtggcgagcgcgcgcaatcccatgcgttccagccacaggatcgccgtgtcggtggcggtgcggtagggcacgccgtcgagcatcattggcagggcgatgttttcgacggccggaagttcgggcagcagttggccggattggaagacgaatccgaagacattacgacgcagtttggtacggtcggcgtcgctcatgcggctcaggtcggcaccacggaagatgacggtgccggcggtcggcttgatgatgccggcgagtgcgtgcagcaaagtggatttgccggagccggacgggcccatcacggctactgtctcaccctcccggagcgtgaagttcacgtggttcagggcgagcgtgtgcatggtcggcatggcgaagccgggctgggctggctgggatggctggccggcctgaatggcacccggtccggccgcagcgggattcgccgacgcataaccggctcccgtgccggctggcatcacgccggtgacgccgtgccctgcctgtgcgcgggccatgctggcggtgtagtccatgaccaggtcgtgcgcctcgatgaccggggcccactgctgggtgtgcgatgccggctgctggaactgttggggttgctgagactgctgaggctgagccgccggtcccgacgccggctgaggctgctgcaattgcgatgctgctgtgttcatactcccgagcgtacggagcgaacgcccagccgaccatcgggctgcggtatgaacctttctggatcaccggcccgctcctcatccgcaaggattagagatacgcagtcgacgcgacaatccatatatcagatgttcattgctcgagaagacgaggaacagtggaagaccggttcggaagctggaaccacaacagaccaagcaaaggagcccacatggccatcgcaatcgacatcccgcacacaccaatcgtgtccgtacaaaagtcgtacaacaggagtatgactacagagaacaacaagaacagtcgttttgaaatgagactcacctaagagcaacgttccagaatcgaccaagcggccgagtccaaaggcatgacttcgttgcaatgggcattatcgaatctgctcgccgccgcagatcgggacatccatgaagctcatatcattcggcccaacagtaaagcgtggaatgatttcaccgcagcattaaacgaacctatgggcctacgtctgaatgaattgttggagcgtgatcccatatggacgtgaccaacttcactgagcctcggcacctgactgcgagcgaggatatttctggtttcgactgcggcctgccattggtcaatgattagctggtttccacacactaagtgcatacagcattgagcattcggaagctcccggttggctgaggcgaaatagtccgaaccccattcccgtaattttgctaggcatgatgggcgtggatatcagatttcaaaccatgcacgtcgacagtcagttactccgagatgcggtatttcattctctgaacgatatgattttcggcatatccctgaatcatctagaatgtttactccgctcaatgtccacaatcaccaatgattaatggctggagaccgctatttgacgccgaccattgtctgaatcgcattcagacacaacactcctcattgcgcgcagaccagcgagttccgccgagtcggcgatgtgtctcttcggcggttgatttaggattttccgcatgcgacagctgaccacaccgctaaaaatgccattttcgcactgacttggggcggaggtcgtggcgaaacgcacgagggaacgtgtgtcatccgatatggtcatgcccgccaggcattgaagcgtcctgtctatgcgcggttgatgtcccggtggcggggtcaatcgatcgacatacgaaccgggacagattcggctgtcccggttcgggatttcggcctcttttggcgaaccgggacaggcccttccatgaacacccgatatatgcaaatccaaaaccccggaattccgccattccccgacggcgatcatcgcacgatagggcgtcaggtgaatgagattctgtcccggttgcccaaaaagaggcaaaatgacgaaccgggacagcgaaatctgtcccggttgtcccaaaagagacgaaatgacgaaccgggacagcagaatccgtcccggtccacacgcggttcacacggcattacccaagtgaactcatcggcaaaacattggcccagccaacaccactaccgatgtccagcacaggccagctcgtccaggcgggcggcgaagcggggccagtcggtcttcatggcggtgaggagcttgcggttgggcacgtcgtcaatcgggacccagcagatttccatgctttcgtcgtcgtttgccttgggctcgacggtgtggccgggcttttcaaaggcaaacacggtggtgtaggcccacgggccatggtcctcgcggtaggagccgaccacctcgatgtcttcgggggtgatgttggcttcctcgtagctttcgcgcagcgcgccttcgatggacgattcgccgtccgcagtggcaccgccggggataccccacgtgccaccttcggcgctccacgcggcacggtgctgcatgaccacgtgagtcaccttgccgctcgccgggtcgcggcgagccagcagaatgccggacgcaccgttggtgccccaatgcttgcggccgcaggcgcagtccacccagccatcgccgggctgatgcacgttttcgaccggcggcagaatgccagcgtgctggttgcccgaggccttgctttccggctccagttcgccacggccgacattccacaggtcggtccacgtgatgcccagttcgccggccagatgccgggccaacggcaggctgaggccgatgatgccgtgcggatcgccctcgatgctgtcgatgaacgcgccgccgaagccttccagcgtgaacgatccggcgacttccagcggctcgccggtgacgatgtaccgttcgatgtcgtcatcggtgaattcgccgaaatggactttggcatggcttgcgccgcgcacggtacgtccggtcgcgaaatcgatcaggcagtggccggtccagagttcaccggtcgcgccgctcatgcgcttcagtcgttcgcgggccacggcttcgctgtgcggcttgccgtagcattcgccgtccaggaggaacatcgaatcacagccgagaatcagcgggccgaccgtcgcctcggtcagtcccggctgtccggcaatagcggtggcgatgggttcggtgatggtcggcatgtcgatgccggagaagtcgcgcgtggtggcgacttccgccttggaatagtcgatgggccggccagcggcggctttgcgcaggtcttcgacgacggcttcgcgttccgaatccttgatttccttggccttgagcgggtaggcaatcacgcgatcgccggttgcggcggcggcagtattggccacatcgcgatacgcacggtgaacggcctcggccttggctgcggcaagaatcatcacacgctgcttgatgctcagatcgtcgacggtgacaccttcctcacgggcggccgcttccagcgcagcaggctcatccacgtgcgagacgcgaattgtggggcagatacccgccgaatacagcacgtcacggcgaggcttggacttggaagcaagaattagcggaatggacatgacttaagtccttatgctcccgctggcgggagctgtcgaacgaagtgagactgagggtggtctctgccggtatggcggaccactctcagaccgcctgcggcggccagctcccgccagcgggagccttctcctcgacttagcgacgctcgatttcgacgccggcggtgttgatgggcaggtgaagcacacgccagtggccggaagcaagctgctccgatgcgatctggtcgatggcttcgcgggcgttgccgtagtgcagcacgagcacgcaggggccggcaccggagacggcggcggcatagcccttggagcggaagagcgcaatgagctcggtggacggcggcatcagggtaccgcgatacggctggtgcaacttgtcctgcgtggcggtgaacagtagcgcgttggactgggcctgagcggccgcaagctcgtcagcgaacggcgattcacgggttccgccagcgcaagcgcacgtatcggcatcctgagccggggcagcggcgacgccggacttgccctgctgggcggcctgggccagcaccatgggattcatcgcagcgggcagcagacccacgcgagacacgttgtagacggcgtccttgtatggcagttccctaggcagcgcctgacgggccttctcagtggacagctcatagtcgggcacgaacacggcggcggtgatggacgggtccaccgggtagttgacggcgtggaatccaccgtgcagcggttcaccaccaggaacggcgaccgagccgacgccttccgcggtttcgaagtcccaagagacggtcaggccaccgaacacagccggggccacattgtccgggtggccttcgatctgggcggccatatcgaagatggccggacggttgaggtcaccggtctgggcgaaggccgcggcggcggcgatgccggccacgatggcctcggcggaagagcccatgccacgagcctgagggatgttgttggtcgcttccagcgtgaagccgagtcggccgaggccgaacgtggcacaggcacggcggaaggtggagaccacgaggtgggtttcgtcgcgtgggagggtgtcggcaccctcgccgtggatgatcacgtgggcaatgccgtcgttcgggtcgtcgttgagcgtgaaagtgagctcgtcatggtagtcgagcgccagacccacggtatcgaagccggagccgaggttggcggacgtggcgggcacgcgcacgtgaacgctattgcagattgggttcatggttgttccttaaaaaggagctccccttgtcaggggagcttgggtattcagctttcaactcacgggcagccgttcgaccgcctcatcagagggagcctagacggtgtcagtccagcacgcgcaggatggacgggtcaccggtgacgaagtcgagcgcctgcacggccttgacggtgttgcgcagggtttcctcgtcggtcaggtgggtcacgatgcgcaactgctgaatctcgccgtcgtagccggggtcggtcatggtgggcttcagatcctggttcacaccgttgatggagacaccgttcttggcgaactcggcggcgatggcggccagcacgcccggcttgtcgtggatcaggaagcgcacggcgaatgcagccttggaggcggtaatcggagccttcggcagattcttgtacagcgggatggacgggccggtgcagccagcagcaatgtggcgggcttcggtcaccacgtcgcccacgacggcggaggcggtcggagcgccgccggcgccacggccgtagaacatgaggtcgtcggcggcctcggccttgacgaacacggcgttgaaggagccgtgcacggaggccagcgggtggttctcgtcgatcagggccgggtagacgcgggcggagacgccggcctcgccgttctcgaccacggcgagcagcttgatgaccttgtgctcggcggtggcggtggcgatgtcgtcggcggtgatcttggtgatgccttcgacggacacgtcgtcgatggtcacggaggtgtggaagccgagggtggccatgatggcggccttgttggcagcatcgtagccttcgatgtcgccggtcgggtcggcttcggcgtagcccttggcctgggcgtccttgagcacgtcgtcgaactggagacccttggtggtcatctcgtcgagaatgtagttggtggtgccgttgacgatgccgagcatgctggtcaccttgtcgccgaccagggactcgcgcagcgggcgcaggaacggaatcgcaccgcctacagcggcctcgaagtagatgtcgacgcccttggcctcggcggcggagtagatctccgggccgtacttggccagcagcgccttgttggcggtgaccacggaagcaccggattcgatggcggcaagcacgaacttgcgggccacggtggtgccgccgatgagctcgatgacgatgtccgagttggtggccacgctcaaagtatcggtggtgacgatggactggtcgatccacgggaacttctcggtttccttcgggtcgaggcaggcgacgccggtcaattcgatcgggcggccgatacgagcggacagttcgtccttctgctcgacaatcaggcgggcggtctgggagccgacggtgccggcaccaagcaggcctacgcgaatcggggtttcgctgttgtgagccaattcagggtccttccaaaaagttttctatatcccacgcctattttacggattatttccgacagcagaccgaaagtactcatcaagctgacggcccttttcgtattatgacggttttggccgcacattacagactgtcaggcgctcacctctgcacgctgattactcgctgacgtcgaggttgagtaggtcgtctacggtctggcggcggagcatgacgtgcgcgccggactcgctgacagcaaccaccgccggaatcagcgcctggttgtagttgctggccatggtgcggccgtatgcgccggtaaccggcacggcgagaatgtcaccgcgcttcaaatcggcgggcaactgcacctcgtgaaccacaatgtcgccggattcgcagtgcatgccacacacacgggcaagcatcgtttcagcggaaccggtgcgattcgccagacgcgcggtgtagtcggcaccgtagagtgccgggcgaatgttgtcggacatgccgccatccacggacacgtacacgcgctcggcaatcgggttgccggcactgtctttggcatcggacaagtgcacgtgcttgatggtgcccacgcggtacagggttacgccggcgggtgccacgatgtaacggcccggctcgaagctgatggctggcgcgggcatgccgagcgcacggttggtgctgttgaccgcatccgccaagcgagtgagttccacgtcaatgtccattgaatcttcgccatcgacgtaggccacggagtagccgccgccgaggtcgatttcgggcaggatgtaggcgtcggtggcccacagggtcttgcgcagcagcatcatgcgcttggccgcgtgaatgaaggcgtccgcatcgtggatgttggagccgatgtgcgagtgggctccgaccagttcgagtacgtcctggtcggcgaggatggtcttgagcacggcgatggatggaccgtccgcaatggcttccatcgcggcggccagcgccttgtctgtgtcggagacttcctcgtggctcaggtcgtacgggtacttgacgtcgtagtgcagctcgcgctctgatttctcggtcttttccgcgccattttccggggaatgcgtcgcagagatacgcgcgttggtagcggcaggcgtcacgtctttgagggcgttcagcacgtcgagcacggcggcgtcggtcccggcggccagcagcggcacgccgaacttctggtcctcgtgagcagtggagatgtactcgtggccgccggcgtggacaccgacggtgacgcgcagcatcacacgggcgcgtttgccgagcctgcgggcgatggcggcgacgcgctccggctcgtcgggctcgtcgatcacgattttggcgaagccctgttcgatggccagcgcgatttcctcatcggacttgttgttgccgtgcagcaccagacgacgtccgggaacgccagcggcgagggcgattttcatctcgcccatcgtgcaggtgtccacgaacatgccggcctcggtgaccaatcgcacgatttctttggacaggaacgccttgccggcaaagctcacgtgcgtagtggatgtgttgaatgcttcggcggcagcgcgcacgaagtgcctggcacgtgcgactacttcatcagtgtcgatgagatagagcggcgagccgaactcgtcaagcagcgattcggcggtacgaccgtggaatgtaatggtaccgtcggcattcacagccgtagcggccggccaaattggagaaatgggcataatcacatcttttcgggggcggtgacgccgaggaggtcgaggccgttggcgatgacctgctggacggcgtcattgagcttcaggcgggcggcggcacgggccggctccggattcttggcgatctccaaggccttgcgagcctcatcgtcgccacgggtttccggatcggtcagggccatcggcaccacgcgctctacgttgtaccacttgtgataggtggcggccagctcttcgagataacgggccaccttgtgcggctggcggtcgtcggccgcagtggcgagcacgctcgggaactgggcgagggcggcaagtacctcgccgtcggcctcggtgtcgagcagggccaggtcggcaccctcgtagctgatgccggcggcggctgcgttgcggtccacgttcttggagcgggcgtgcgcgtactgcacgtagtacaccgggttgtcgttggtgtgcgaggcgagcagggccaggtcgatgtcgaagttctggttgtagtcggagcgggccagcgagtagcgggcggcgtccacgccgaccacggagaccagatcgtcgatggtcacgacgttgccggcgcgcttggacatgcgcacgggcttgccgtccttcatcacgttgaccagctggccgatgagaatctgcatgttcttgccgggctcgtcgccgaaggccgcgcacatggccatcatgcggccgatgtagccgtggtggtcggcgccaagcatgtagatggccacgtcagccgggttttcggcgcgatggcgcttgtcccagtagtaggcgatgtcggcggcgaagtaggcgaactcaccattggacttgatgatcacacggtccttgtcgtcgccgtgcttggtggattcaaaccaagtggcgccgtccttgtcgaagatgtcgccgcgggacttgagctcttcgatggcggcgtcgaccttgccgtcggcgtacaggctgttttcatggaaccagacgtcgaagttcacgcggaagtccttcatggacttctgaatctcgtcgaacatcatcggtacagcgcgcttgcggaattcctcgcgcacttcggtatcggcttcgccgagcggttcgccgtcgtcgttcaggccttgatcctgatgggccagtgcggtcaggtccacgccgtcggactcggcttcggcctgaacacgggcggcgatctcgttgatgtaggcacccttgtagccgtcgcacggggtttcggtctggtaaccggcgtcgcccaagttattggcctcggcccaggcggcaaccagcgacttggcgaagcggttgatctgctcgccgtggtcgttgaagtagtattcgcgcaccaccttggcgccgttggcctcgagcacgcgggccatggcatcgccgacggcagcccaacgagtgccgccgatgtgaatcggaccggtggggttggcggagacgaactcgagattcagggtctggccgcccagatggtcgttgcggccgtattcgttgaccttgttgagatgcttgtcggtgtcggtcacggcaccggcggcgagtacggtgtccaccacggcggcggccgaggcggagtcaagcgtgatgttgatgaagccggggcctgccacctcgaccttggcgatgccgtcggcttcggcgagcgcggcggcgaacggctcggccagatcgcgcggcttcatgccggccttcttggccagctgcatggcgatgttggaggcccagtcgccatgcgcgcggtccttcgggcgcatcacggcgagcttgtcgacgggcgggatcagctcgtcggtcaacgcgccggcctggccggcggcgacgaggttgtgggcaatgctggaaatcagttcacttaaggcttcagggctcattcttctaaggataccggcgacggcgacaccatgccgcgtccggtcattgtcggcggccataatggaacgacgcgcgaaagaggtgcatatggccgggctcaacccccaatcattggtcacgttgtggcagatcgaacagtatggttcgttctccgccacggccaaggccacgggttggtcgcagccggccatcagccagcagatcaaaaagctggaggcacagtgcggttcgactctggtgcaacgcacctcgcatggtgtggaactcaccgccaccggttcgatgctcgcccgccacggcgaggccatcgccgatcggctggagcgggcggcccgtgaggtcgaggattatcggcatcatcggtttgctcacctgcatttggtggccccaccgtcaatctgctctactatcgcggcccgtaccgtggtcaagctcagtatgttcacggacatcgagctgagcctgattcagatggagccgccggaggcaatcggtctgatttcccaaggcaaggccgatgccgccgccgtgttccggtacagcagcatcccgaacttcctgcacatcggcgacgatctgaccttccagtcgctgggttacgatccgatgcgattgttggtccgccgctccagcgacatcgccaaacgattcgaggagaccggcgaacccgtgccgctgtccgccgccaaagacgagcattggatcgccggctgccccacctgccgcgcaaatttggtgaaactggccacccgtgccggattcaagccggatatccgccactgcacggatgattactgggccacgcagaacctggtcgaggttggcatgggcgtctcgctggtgccggcgctcgatacacatatcaatctgcaaggcgatctggtggcctgtcccatcgccgacgattttgcggcgcgcgaggtcggcatcgtgactcgtgccggcgaccatcgtcccgcgctcggttcattgctcgaagagctcgagcgcacgtcactcaaatatttgagtgccaagtagtcggacagcgataagcaagcttgcgaacgccatcacgatttcggggagccagaccgttgagcagcccttctgtaccaggaacaatgacatgttatgagcatgaacaacgtttcccagtcaacgactttgagcagcgcaaccgccggtgcctcttgctttgatgccaatcacatcgacgtgacgaccatcgaagatctgaagcaggtcggttcggacaaatggacccgctaccccggctgcatcggcgcattcatcgccgagatggattacggtctggcgccgtgcgtggccgaagccatcgaagaggccaccgaacgtggcgcgctcggctacattcccgacccgtggaagaaggaggtcgcccgctcgtgcgccgcatggcagcgtcgatacggctgggatgtggatccgacgtgcatccgtccggtgccggacgtgctggaggcgttcgaagtgttcctgcgcgagattgtgcgcgccggcaactccatcgtggtgccgactccggcctatatgccgttcctgagcgtgccgcgcctgtatggcgtggaggttcttgagattccgatgctgtgcgagggcgccggcgagagcagcgggcgcaatgatgaatggctgttcgatttcgacgccattgagcaggcgttcgcgaacggctgccatgccttcgtgctgtgcaacccgcacaacccgatcggcaaggtattgacgcgcgaggaaatgctgcgattgtccgacctggccgccaagtacgacgtgcgtatattctccgatgagattcacgcgccgttcgtctaccaaggccacacgcatgtgccattcgcctcaatcaaccggcagacggccatgcaggctttcacctccacttcagcctcgaagtcgttcaatattcccggcaccaagtgcgcgcaggtgattctcaccaatccggacgatctggaactatggatgaggaacgcggaatggtccgagcaccagacggccaccatcggtgccatagccaccactgcggcctatgacggcggcgcggcatggttcgagggcgtgatggcgtacatcgagcgcaatatcgcgctggtcaacgagcagatgcgcacgagattcgccaaggtgcgctatgtggagccgcagggcacgtatatcgcgtggctggatttctcgtcactgggcatcgatgacccggccgactatttcttcaagaaggccaacgtggcgttgacggacggccgtgaatgcggcgaggtcgggcatggttgcgtgcgtatgaacttcgccatgccctacccgctactggaggaatgcttcgaccgcatggccgccgcacttgaggcggacgggctgttgtaaaaaatcgcggctcccctcagagaggggagccgcggaacgcccgaattaatcgaagtcggcacccaacgcttcgagtttgccgcggaagtcggcgtagcctcggtcgatcaggctgatgccgtgcacgtccgaggggcctgacgcggccaaggccgcgatcagatggctgaacccaccacgcaggtccggcacgtcgatgtcgcgtccggtcagcggggtcggtccgaagatcacggcggaatgcttgtagttgcgctgccggaaacggcacggcagcgagcccaggcactcgcggtacaactggatggtggcacccatctcgaccagcggcttggtgaagccgaaacggttctcgtacacggtctcgtgcacgatcgacaggccgttggcctgggtcagggccaccacgagcggctgctgccagtcggtcatgaacccgggatgcacgtccgtctcgatcgccacgggcttcaagtccccgcccggatgccagaaacgaatgcccttgtccgtcacctcgaatttgccgcccaccttgcggaacacgttgaggaacgtgatcatctccggctgggtggcacccttgacgaaaatgtcaccgtgcgtggcgagcgcggcggacgcccaggacgccgcctcgatgcgatccgtcagcgacgtgtgcgtgtacccctgcagttccttgacaccctcgatgcggaaggtgcgatcaacgtccacagaaatgattgcgcccatcttctgcagcacgcacaccagatccatgatctctggctcagtggccgcgcccgacagttcggtcttgccctcggccagcacggccgccagtaaagtctgctcggtggcgcccaccgacgggtagggcaggtggatcttcgcgccgtgcaggccgttgggcgcggtgatgtggatgccgtccttgtgttccttgtccaccgtggcgcccagcttgcgcagcgtctccagatggaagtcaatcggacgtccgccaatcgcgcagccgcccaacgcgggaatgaacgcttcacccaaacggtgcacgagcgggccggagaacaggatcgggatgcgcgacgaaccggacagtgtatccacgtcggccacatcggccagctgcacacgcgaggcgtcaatggtcacaatgccgttcgcaccgtccacatccacgtccacgccgtgcagacgtagcaaatcggacaccacatgcacgtcacgaatctccggcacgttcttcagcaccgacttgcccggtgccagcaacgcggcgaccatcgccttgctcacgaagttcttcgcgccacgcaccttgatcgtgccattcaaaggcttgccgccctcgacatgcaacacgtcatccggattctcagccacgccactctcctcaatcaatcaagattcaaaaaatgctaccgtccagtttgccataagccatgtgccgactccgtgaaatgcaccccagccgaactttgatcaccgtgcacaacggatcccatacccccgtcgaatcaaaccgataacgtgatcttcctcacatttgccgccacggtgttctccatacttctacgctacgattcagggcaatggcatcagacgccatggccacaagcaaaggagcattcatgaccacagtcgccgtcatcggctgcacgcacgccggcacgttcgccaccacctcgattctcgccgagcaccccgattggaccgtccatgttttcgagcgcaacggcacgctgtccttcctctcctgcggcatcgccctgtgggtgggcgaccacgtatccgacccgaagaaaatgttctactcctcccctgccgctctggccgaagccggcgcgaccatgcatatgcgcaccgacgtgacgtccgtggacctcgacgccagaaccctcacctaccgcgcgctggacgaggccggagaccccgccgaacagaccctcgctttcgacaaactggtcgtgaccaccggctcgcgcccggtcatcccgccgatccccggcatcgacagcccgcatgtgctgctgtgcaagaactgggatcacgccatcgccatcaaggaaaaggcgaaaaccgccaagtcggcagtggtgatcgggtcgggctatatcggcgcggaaatcgccgagcagttcagcgtcaccggcgtcaagaccacgctggtcgacggccttgatcgcccgctggccaataatttcgataagaccatcaccgatcaggtggcggccgcgttcgaggagcacggcgtcacgctcgcgctcggccagaaggtggtcgagttccgcgacgatgacgacgacaccgtcactgtggtcaccgaaaagggcgagtacacggccgaaatggcgattctggccgtcggcttcctgccgaacaccgacctgctcaagggcaaggtggacatgctgccgaacggcgcgatcgtggtcgacgactacatgcaggcgtccgcgccgggcgtgtacgccgccggcgactccgccaccgtgttctacaaccccaccggccagcacgattacattccgctggccaccaacgcggtgcgccagggcctgctggtgggccgcaacatcgagacgccgaccgtgaagtacatgggcacgcaggccacgtccgccgtgcagctgtacgatctctcgctcgccgcctccggcctgacccgcgccggtgccgaacgccgcgggctcacggtccgcgagacctcgctcaccgaggattatcgcccggacttcatgctcaccaccaccccagtcacgtcgattctgacctgggacccggaaacccgcaaggtcaagggcggccagttctgttccaaggccgatatctccggcgcggcaaacgtgatttccatggcgattcaggccggcttcaccatcgaccagctcgccaacgtggacttcctgttccagccgaacttcgacaagccggtctactacgtcggcgccgtggccatgaaggcggcggccgagtaagacggctgtacccaccgcaaaaaagaaaccccggcgtgatgggcgccggggagagaaaggagagaagaagaaagaggttaagttatgcagcttgttcggccgtgattacatataacagcaacagtttcaatgcaacatgggcactgtctgggaatcgtctgggaatcacggcccgtacaggctgttgcttgtttttggagccgatttaccggctggccttgatcttgtgggccagttcggcgtcccacatcgcgccggtggcggacatcaccgagtccgcgccggcgtcacggtacgcctggtagtcggcgggcgagaccacgccgccgacgccgttgatcgcgaaatcgagcccgagcttttcacgaatcgcggccagacgggcgaccatgtcgaggccggcgccacgaatcgcattgccgcacacgcctgagcgatcgcggcccgcgccgggcagggcctgattgccattggcatcgaccagtttggcggaaatcgtattgatggtgctgaagccctgcacggtgccgtggcccacggtggaacgcaccataagctccagagcgtcgtcgctggggatgtaggcgagcttgaccatcagcgggatgtcgccgatctcctgcttcacggcctcggtgatgcggcccacgagcagcggattgtggcatagcaggcggttgtggccctcgttggggcagctggtgttcatcaccatgagcttggcaccggtctccttgaccaggcgggcggtagtggcatggtcggcgatgtattcctcctcgctcatgccctccacacgcgagccttggaagctcgggaccagcacttgaccgggaccggcggcctcgatggcggcgcgcatgtccggctgccagacgtcagggctctgcgagggcacaccgaagctgttggagatggaaatcggctgttcatagttggtgtcggcgagcacgccttcgtccagttcggcgctgcccggcgtcagtgaaccgtccgccgacttggggtgtacggcgagcacgttcgggaacgggttgcagccccaggcgcgcgaacgcacggttttgtaggtcgccagatcgaaacccatgtggaaagcggccgtggtgaaacggctgttgagcagcgggcctgcgggaatgccgaaaggcaggttgaccggctggcccaaaaaggtggccaaggcaccctcggaggcaccctcgctggtggttccggcggcatcggcaccgttgccatccttcagcgcctcggcgaacgcgccgaacggcccttgctcatagttgtcttcgtaactgcggctgacatcgtaaaacggctcaaaatcactcatgcttcaacgataagccaacctgcatgcgcacacgcacactcaacccatcatcgcgccgacaaacgaaataatggcgaaagcggcattggctaccacaaagatgatgaacgtcggagctgcccagccaaagtacgtgtctggaatactacgattcgtacggtgatattggcgcatctctttgccgtatatcacgaatatgataatcgatccgatcacgccgatcacagatagcgacaatgagaatatcaaatatgcgttgtcatcaagatagttgccggcaagggtatcgatggcgccggaaagaatcgcattgttgaagatgtgcagtgcaatcgaccaaaccaacgagtattccatggccacgaatcccagaatcaggccaaagaggaacgcgaatgtgccttgcactacgtcgtcatggaacaggccgaacaccattgccgaggtgacgatggcgaagttcttgcccaacggcttgagctccttcatcagtacgccgcggaacagtacttcctcgcaaatcggagcgaccagcccaacgtacagccacatgcttacggtgacgctggattcggcgatgctgtctgacgtgggagaggcaagatcgatgcccagcctggaaaaagcgacctgcaccaacataacgatgccttgcacgcccatgcccagcacgatgaacatcaacgcccagagaggctgcatgcgcccgccgccatattggctgatgtggccaagctgattgggctccccgtacgagtcgcgatgctggccaccaagccagaattcgcaggtgaagatgtcacggtggcgcatgagcagcagaaatccgaacgcgacgaacaccgatatcaggctgatgatgccatcccactgcacgccggacaaatcgctcgcggttattacgccgacgataatggtggcgaccattgcgcccaagagcatcatgccttcataggcgagagtcagtcccattacacgattgaccaccttgcgacgccacgtgcgccatacacggcgaggatcgatcggcatgaccacgggcattgctgcgggcatcgtggcaggcattgcgttgggcattgtgactggcattgccggagccgtttgcacgaatggttgcggcgcagcggaatagggttgtggcgcgtagcccactggttgagcgtagtacggatgagcgaagggctgtggagccgactgttgcgccgggtatggggaataggcggattgcgccggatacgtcggctgcgtgggatacatcggctgggcaggatacgtaggttggacgggatatgtcgggtatacgagctgcgcggcgtattgtgcaggctgcacagcaggtattgcggcttgcggcacaggttgtgaaacaccttgtgaaacaatccgtggaacaccccgtgaaacatcttgtggaggtagcggttgtgcccatgcctccggctgacccgcatattgcggctgcatgctcggcccaggctgaacatactgtggcgtctgtggcatcggcgtctgtgactgtgccgcagactgcggtgccggtcgaggtggcaacggttgcgctgacagcgattgcgccggagccgtatcggaatcgttcgacggattcatgtcattcatggtcatgatgctcaacctaaccgtcattactggatgaatcgtgattatgtccacaaatgtgtacgaattcaggcacagtatttcgaacgctaggacggagttcatgagtgttgaggaaagcgccgccacgccggtgttggtggctgcggtggataacgaccgtatggcgttgttggcactgaagggaatattgccgcaactcctgcccgccgcgcaatggatgtggggcgcgggcaccagtgagacctttgtttgatgcgatgcgagcgacccaataatctcaatcagacacagagccaacggccctgggcctgcaattatggactcgcctttcggcgaggctcaatgctggcctcgctgctgtcgcggctcggcacagggcctgctgaaagcccaccgggctttcagcaggccgatcgcggctaaataatgccgcgatcggccaacggccctgtccagtctgcgtcctcaggctcgcgggcggactcgattctttcttcggcccagtgtttggcggggatggtcttgggcttgaaggggaacttttcggcgcgcatcttttcgtaggcggcgatgtcgtcctcgtgctgcagcgtcagatcgatatcgtcgtagccgttcatcagacgccaacgcacgtaatcgttgacctcgaacggcagggtcacgtcgccgcaagtgacagtgcgggtctccagcgagacagtcatctcacgaccaggctcttcctccagtagcttccacagaagttcgacggactcctgcggcataatcgcggccagcacgccgttcttggcggtgttgccgtagaagatgtcggcgaagctcggcgcgatgaccacgcggaaaccgtaatcgtgcagcgcccacacggcgtgctcgcgggaggagccgatgccgaattcggggccggcgaccagaatctggcccttaccggcgtattccggcttgttgagcacgaagttcgggtctcggcgccatgcgtagaacagggcgtcatcgaagccggacttggtcacgcgcttcaagaacacagcgggaatgatctggtcggtatcgacgttggagcggcgcagcggcacgcccacgccggtcagtgtggtgagtttttccataacaattttcctttcggggatctctcccccagtcagtcttcgactgacagcccctcgtcagagggggctcacgtgtattgactcagagatcggcgggagacgagattgtgccgcggatggcggtggcggcggctacggccggcgacgccagatgcgtgcgcgagcccttgccttggcggccctcgaagttacggttcgaagtggaaatcgagcgctcgttcggcaccagcttgtccgggttcatgcccaggcacatcgagcagccggcgttacgccattcggcgccaaagtccttgaacaccttatcgaggccttccttctccgcctgcaaacgcacgcgggaggaggccggcaccaccagcacgcggtggatgttctcggccttgcggtggcccttcataatcgcggcggcctggcgcaaatcgtcgatacgaccgttggtgcacgaaccaatgaacacggtgtccacggcgatgtccttgatcggcatgcctggcttcaaacccatgtatgcaatcgcacgttcggcggcggcgcgcttggtggcgtcggcgatcttgcccggctccggcacggaggcggtgatcggcagaccttggccggggttggtgccccacgtcacatatggaccgagctcggtggcgtcaatatccaccaccttgtcgaatacggcatcgtcatcggtcttcagcgtcttccagtacgccacggcctgatcccacagctcgccttccggcgcgtgcggacggcccttcaggtactcgaacgtggtctcgtccggcgcgatcatgccggcacgcgcaccggcctcgatggacatgttgcacacggtcatacgttcgtccatggtgaggttgcgaatcgcctcaccacggtattcgatcacgtaaccctggccgccgccggtgccgatcttggcgatgatcgccagaatgatgtccttggccgtcgcgtccgcgggcagcttgccgttgacgttgacggccatggtcttgaacggcttcagagacagcgtctgtgtggccatcacgtgttcgacttcggaagtgccgatgccgaacgccagcgcgccgaacgcgccgtgcgtcgacgtatgcgaatcaccgcacacgatggtcatgcccggctgggtcaggcccagaatcggggcgaacgcgtggacgatgccctgatcggcgtcgcccagcgggtgcaggcgcacgccgaactccttgcagttcttctccaaagtcgtcaactgcaacgcgctcgtctcatccgggttcgggcgatcgatatcaacggtcggcgtgttgtgatcctcggtggcaatgagctgatccacgtgacgcggcttgcggccggccaagcgcaggccctcaaacgcctgcgggctggtgacctcatgcatgagcatcagatcgatgtacagcaaatcaggagctccgtcgctgcccttgcgcaccagatgatcggcccagaccttctcggccagtgtcgttcccatagtgattcctccaaaaaattccgcgcgaggtattgtgttcgcgccttgttcgtggtattagcctatgtgcttgcgatgggcccggccatgagcatgccggatattgagatacggtcaaatgatggcctcaatatgactcggacccgactcgaacatgacctagtcatgactcggttccgctccagacatgtctcttcggcatccacgaacgccctttcaacttcatggccaccctgtgagacacttccccaatttgccatttcactatgtgagatggcataatcgcccttattatgactgattcccgggaagaaccattgaacaacagcttgaccgagtccgagccggttgaagacaccaccgccaaggacgatggggaaatccattccggcgttggcgtccttgataaaaccgtaaagattcttgacgcactggaatccggcccgtctacgctgggccagcttgtggccgccaccggtctcgctcgaccgaccgcacatcgtttggctattgcactggaacgccaccgtttcgtactgcgcgaccagcatggccgattcgtactcggctcccgtttcgccgaacttgccgccgcagcaggcgaggatcgtctgctgaccgccgccggcccgatcctgcagaccctgctcgatcgcactggcgagtctgcgcagatttaccgccgccaaggcgatcagcgcgtgtgcatcgccgctgtggaacgcacctccggcctacgtgattccattccggtgggtgccatgctgtcgatggaagccggttccgccgcccagattcttctggcttgggaggattccgaccgtctgcaccagggattgcgccacgccaagttcaccgccaccaagctggccgccgtacgcaagcgcggctggtccgagtccgtgaacgaacgcgaagagggcgtgtgctcgatttccgccccgatccgcaacgcctccggccaggtcatcgccgccatctcgatttccggcccgaccggccgcatgggcgccgcccccggacgccgctatgcgccgctggtgatggccgccggcaagtacctcaccgaggcactggtcaaagccgttcgctgaaacataccagtcaatccaaccgatagcccaaccggcagaaatcccgcgtcacaacgaaagagacgcgggatttctgggctataggaacaagagtgtggtgttcgcgcaggatgggcaagatcgggtagccggcggtggcgatggtgacggacggtccgaacatcgtgtagtcgccgattcatatctccgcgtcgtcgaccatgctcatgaacgcgttgatgtagatgactttgccgaggtgtacgcgacggcatccgttgctcgcatgcaatggcgtttcgatgtgcacgccgtcgccgacttcggcgcacatgtctttgagcagttcggcgcgccgctcccgttcggtgggtttggtctggttgtattcccatagtttgttctgccatgcgagctgtccgtccatgatggccgggtcgtcgtagtggtatggcaatcccgcatccctgcgcgccgtattgtccatgtcgtagtcccttccgtatcggttcatcggtctcggcccatcccatcgtcctttgttcgggccggaacgcacacggcctttctcaccagcatgaggccgcccgcgctgaccgattcccatcgcaacgtcgccgcacgcccccacctcgcgcgccgtccgacacggtacggagcgttcccgatgcggtacagaccagaccggcaatggccacaggacgttccctctgacgagacgatgccgtaggcatcatgcaggtaatagcgagccgacaaaacgcgcgcagcgcgggttccctctgacgagggagctgtcggcgaagccgactgagggagagaccgcggccaaaggccgcaaaaacaccgcatcggccgcaggccgattcctatgaagacaaacacgccatgaatccgcacagtgtaggatagttgacaacacgagacgctataaggcaaggtgctcaatgacgacacaacccgatggaacatatgagatgatcatcacggccgactcgattcagtcgaatgagcccgataccgattcctataccgacccttccttcttcgccaacatgggaagtgcgtatacccccgaagacgtcaagttcaagcctgcggacggcgaaccaatcgaacgaaatcgtaacaagggagaacgccggatctcatgtcagacactgccacgtctgacctgtcaggtattcgaagataagcttctcgaattgccgtacgacaagcgcgagtccttccccatctgtcggtacggtctggataagccgctaatcaccggcatcttccccgatgaggaacgtttcagaagcggctgcaagaactcaatcgaatacgtgcgttattggcgcggaacggatgtacagatgtatctctactgctggaacatcttctcgacgctattcttcgttcaggagtgtctgaaacgcttcggcaaaccgaatgacgccttcatcttgcggtatcgtcgtaagacctcccaagaagcctcgaatgctgacgcttcggtagaagaagaaaaaggttacgcttcacccgatgatgagaagtcccctgtctacaacaataagtattcgcagacactgttggattccaagaacatcatcttccgtggcgctcccggaaccggtaaaacctatcttgcccgccaaatcgccgccgatatcgtcagcgacggcaagcgcggcgattggtccaagcttgatgatgaacagcgcagacgcatcggtttcgtccaatttcatcccagctacgactacacggatttcgtggagggcatccgccccaataccgaggagacggatgcgacgggaactcacggcttctccatccaggacggcatattcaagcgtttccttgacaaggctcgggacaacgtcgaacagtcccggctttccaaggaggaacggagggaaccatccgttcgggaacgtctggacgcctactttgattctcttgatttcgacgacaatcagttcagaatctcgactggtaagcctttccaagtaaccaacgtcaccgaacatcatgttcttgtgtacgctccccacggcatcaaacaggaattaagaatacgcgtccaagaccttctggcgcttatgcaatccagcacccctccaacaaatggtgaagacgtgcatcaaattctcgagcgaaagcgtcgacagcgggaggactcctatgcattcgccttgctacaggaaatccaaaagcacaagccttcgtcggcttcacgagcatccgaaaaggttcttcggaaacccttcgtgttcatcatcgacgagatcaaccgaggtgaaatctccaagatattcggcgagctgttcttctccatcgaccctggttatcgcggccctgccggcaatgtgaccacccagtacggtcatgagctgtatgtgccggacaatgtctatatcatcggcacgatgaacgacatcgatcgatccgtcgacacctttgatttcgcgatgcgccgacggttccgcttcatcgaggtcaaggccgaagacgggttggacatgcttgaagaacttggaggcttgtcggaggaagccgagagccgcttgacgaagctgaatgagaccatatcctcccccgatatcggtttgggttcggattaccatgtcggccctgcgtatttcctgaatctttccaaatccgaatccacggcgaaagcgttcgatgacctttggcgtgatttcctgcaaccgctattgcacgattacgtgcgcggcatgtataacgaaacagaaatcatggagaagctgaaagcggcatatgaagatgcttcggattcgccgcagccagcggaacggtcggtatgagtaccgtatcgatcaaagacaactcccgcattgaggcaaccacgctggctcccgtcaaggatatcgtcgcggctgtgtccgatcgttccatagcccggctttcgcaagaaggtctgctggtgttcccgcagtcgattcaggattctccggacttggacgaatgccagatggtattggaaaaggacagtggaggctaccgctcagggaatctgatggggtaccttggctatcaagacgaacagttggtcatcgattcacgttttgcctcatccgcaggggatttcttcctgcaatacatgatgtatcgtgtactgaatattcccaacctgtcaagcctgagtattcaatccgatttatcgacgagactgttccaattccatgtattcatgtttccatactgtttacggggagctttaagacaagggatttatcggacatacattcagcacaagtacaatgacagccacatccgtggaagaattgatattccacggcatatcaccactaatattcctttcaccggcaatatcgcatatgatgtgcgcgagcttactgcagacaatcctctcacacagctgattcgtcacacaatggaatatatagcccttcaaccgtacggttccacgctattaggcaatatccgcaaggaggtacgttacataatcgaatgtactccctcatatcgtcgcgcaaaccgcagcaccgttctggaatacaatctcagacatccggtcaatcatgcgtattttacgcaataccgcatgctgcaacaattatgcatcatcattcttagcaatcagcgtcacgcgttcaacggtcaggaaaaccgacttcatggcattctcttcgacggctcctggctatgggaggaatacgtcgattccctgattggcgatagcttcttccatccgcgaaacaaattgaaagaaggaaaacaacacctgttcgaaggtggcacaggccctatctatcctgatttcatcagccgttccaaacaacatcccatcattgcggacgccaagtacaagcctatatccaatattcacaaagaagattactggcagattctggcatatatgtaccggtttgattccaaactcggcatcttcctctaccccgatgcgaagcaaacctcacgcaaggagctgcacatgctgcaaggaacgacgttccacggagacgtcaaagcacgggaggacatcatcgtggccaaactcggactgtcgattcccgatacggccgtcgactatgccgatttcatatcccgcatgtcaccatgcgagaaagcgtttcgaaccggattgctcaacaccttcaacacgtattgacgccgtaagtcgaacattctattccacgcgcctgcatggcgcgggatgatgaggaagcggtacaagccgcgaggaaggagccgacatgttattgcgaccatcgattcgaatcgtcgttccccgacgagacacacgacatatctcgaacgcctaagacacccaatacgtatgaaacgtttggagctccccaagttcaagcatcggaacaggacgaccgcctgttcgtcatgttccatgggtacggcaatgacgagcgtgagatgatccgcatcatcgacgctgtctacgccgccgcgagtgctcgcgcatgggcgacgccgtcgtctccctgctcgactcccccatgttcgcaggccgccgcaagatcctcgtcgggttctcccagggcggctatatgtcgtatcgcatggtgctcgagcatccgcacgtgttcgacgcggcgagcctgatgagcccgtcgttcaagggcgaggagtcgacggacctcaccggtttcgactcccccacccgtttcctgctcttgtacggctcgcgggaccgcacgattccacctgcggaccagcagaccgcgcgtcgcgtgctcgaggccaccggccggctcgaataccgcgagtatcctggcatgggtcagccatcgtcgacgaggagatcggcgacatccgcgccttcctcggtctctagccggttccggacggaccgcccggttccgctcggtccgtccaccccgccatccgaccatccgtcacacacgtcacgcacccgtcaccgcccgcaatcggtgtcggcggcacgcgtcgccgccgtcacacgccgaggctgcgtccgatgacgccgaggaacgtttcggcaccggcacgcacgttctacggttgcacaggtttcccgaattgcgggtactccaggccgtgcaggtgatttcgacgtgaacggttcccgccgcgtagactgttttctccggaccaggcgaacctcctgcgtcgcaccccgaatccgtccgcaacggctggcatcgccatgccggaccttgatccaatcacacccgcacggcatggcgcggtggcccttccggcgcgcgcttgcgccgacggaccgccgcaatgccgccccaaccgcacaggagcaccgacccgcacacccatgcgccgacggtccggccgtcatgcagatcggtcggatcgggggcgggaatgggcatgctcacacgatggccggagaccaggagccggtgggagttgatgccgtatggcgtacaggtcatcaacgtcagccgatcctgcccgggaacgatgcgcagctgcgaggtatcggtcggttcgattacggtgatgcgatcgacttcgtaggccagggtcctgttcatcgttgagatgtagatgaaatcgccttcgcgcatttcatccaatctggtgaacatctgcgcctgcaccatgccgcgatggccggtgatgaccgcatgggtgtcgttgccgccgaccggcaggcttgtgccgtacagatgcccggaaccaagggacagttgcttgtctccggtgccgtggtagatgggaagatccactgagatcttcggtatggacacgcggcccatgatgccgtgaccttcgttgagcagcctgccgtagcgttgatcctgcgccgactgggaggacaggcgttccccgttactgaacgggtcggcctgggctcccagcaccggctgtccggatcggacgagattgcggttgtaggcacgcgccgcccgcagttcgtcgtcgatccggctttccggccacagtcgcacctgctgttcgacggaagacgccgacgcggacatggacg

SEQ ID NO: 2341 - DNA, 2569 bp, Unknown
  R119_18m  MAG No. k141_58342
gtcgttgcgatggtgcgggataacttgtaattgttgccacttcgggcatatgacgattgagccaaagcatgttctatgtttcgataatcatcaaaagcagagcatagtatgctctacggggatttttctataccctgaaaataccgaaaatcaggatatagggcagtagcacgaattagccaacagcggcttgtctgcgggcaatgatgacgttgctcccacggattcggataaggagaatcgtagcgaggatcatggtgagggccatggcgagtaatcgatcgtatcggagacttgcccaacacgcacgctaagatgggcatcgcaataatcggcaatgagcaggtaatcggcgaggcggtgcatggagcaggaatccaacgagcaagaacctaacgaggcgacggaaatcgtaggcggcaaagtagagaccgtcgaggtttccaagcaccccgaggcttccatacccgagaccgatttgtctctggcggatatcgagcgccgtcgttcgcatccgttgcgttgggcgctgattattcttgccgtactgtgcgccatcatcgcgccgtactggttcggccgttcgttggcggtaaataatactgactccattgtggccgtgctcgggggagtgtctccgcagggcatcgcactggtcggttgggtgaccgtggtgattgcgtacgtcggattggcgatggcggtggtcgtctcgccgtcctggccgtggctgatcgtgttcgtgatcgggttggccggcgagcagttcatcgcgggactcagcatgctcaatctcaatttctggtattccacgtacgtggtctacggtaagcaggccggcctggcgaatgccgcgaatctgggcattatgggtgcggcgatcggcatcgccgtatatgccctgatgttcgtgggtctgctggtgattatccggaagacctcaccactgaacgtactgaccaaaagctgggcgagcttcattctgtacttcgtgattgaaaccatcgccctgctcgtggtgttgtttggcggattgctcaccactgtgtgagcgcgtgtgccccagtccggcccctgccgtatagttttcatttggcgtaatttcgcccgcggatagagagcgtttcgagcgaacctgcacgaaacaccgcgcaacgacacaataaggaggacgccgtggcactgacggctgacgagaagacccagattatcaacgagtacgcgacgcacgaaggtgacaccggttcccccgaggtccaggtggctctgctgtccaagcgtatcgccgacctgaccgagcacctcaaggagcacaagcacgaccaccactcccgtcgtggtatgcagctgatgatcggtgaccgtcgtcgcctgcttgactacctcaagcgcgtcgacatcgagcgttaccgttccctcatcgagcgtctgggtctgcgtcgataattgaagacttccgcccgagcacctaggatggtgcccgggcgttttacatatcgccagccaacggcaacaacggcaagagggttagaggataggccagcaggtaaggccgacaagagaacccgaatgaaggggttgacacgaggaacgacggccaaggggccagtcgaaacaaggtatgtgacgtccgctgaagaggacagttgcggttcaagcgagtcgccaaaccgcagcacagtatgtaggaataattagaaaattaaagaaggaggaaccctatggagggtcccgaaatcaaggccgttgaggccgtaatcgacaatggatcgttcggcaagcgcacgctgcgcttcgagaccggccgcctcgcccagcaggccgatggcgccgtggccgcctacctcgacgacgattccatgattctgtccaccaccaccgccggttccagcccgaaggagaactacgacttcttcccgctgaccgtcgatgtcgaagagaagatgtacgctgccggcaagattccgggctcgttcttccgccgtgaaggccgcccgagctccgaggccatcctcgcctgccgcatcatcgaccgcccgctgcgcccgctgttcccgcacaccctgcgcaacgaagtgcaggtcgtcgagaccgtgctcgccgtgaaccctgatgacgcttacgacgtcatcgccctgaacgccgcttccgcctccaccatgatctccggcctgccgttcgaaggcccggtctccggtgtgcgtctggcgctgatcgacggccagtgggtcgccttcccgcgttggagtgagcgtgagcgcgccgtgttcgagattgtggtcgccggccgcgtgatcgagaacggtgatgtcgccatcgccatgatcgaggccggtgccggcaagaacgcctggcacctcatctatgacgagggtcagaccaagcccgatgaggaggtcgtggccggtggtcttgaagccgccaagccgttcatcaaggtgatctgcgaggctcaggatgagctcaagaagatcgccgccaaggagacccaggaattccagctcttcccggagtacaccgaagatctgtacaaccgtattgatgagatcgcccacgctgatctcgacga

SEQ ID NO: 2342 - DNA, 38066 bp, Unknown
  R119_18m  MAG No. k141_61007
catacggttctcgcgacaccactgccacaccgtctgctcgttgaagccctcacgcctcgcccattccctgacacgcatgacttaattatatcacacgaaaacaaactaaagcaaataatcaatctagcaggttataaccccggtgtatactggtttttgacactgtgtcaatgttgattcggaggttatggggaatgggcaatacgactacagcaagtgtaacgggcgcgcaagttgcaccggcgaaatcagccatcaaagatctccccatcgccaaagtgtgggcgtttgcggtcggccagttcgggtgggcgctgctttccggcatcatctccaactggctcgtgtatttctaccaacctgaccaggagaccatctcccaaggtcagaccgtattcgtgccgcagggcctggtcgttctcggcatcgtgaccgtggtgggcggcatcaccgccttcgcccgattcttcgacgcgttcgtggacccggccgtggcgtccctctccgaccgttgcgacgccaaatccggccgccgtatgccgttcctgaaattcgccgccctgccgctcgcggtggtcaccgtactcgtgttctggagtccgatcaacggcaccggctgggtgaacgcggcgttcctgttcgtcaccgtgatcggctactacatcgtcctcacgttctactgcacgccgtacaacgcgctcatcgccgaactcggccacgactccaagcagcaactcaccatctccaccgccatctccttcacttgggtggccggcacggccatcgcgtacgtggcgccggtgatttggggcgcgttcgtgccgatgatgggccgtatcaccgccatccgcgtgaccttcaccatcatggccgccgtggcgttcgtgtgcatgctggtgccgccgctggccatccgcgagaaggactacgtcaactcccagcccacctccgaatcggccatcgaatccctgaagcagacgttcggcgacggcgaattccgcaagttcgtgtgttccgacgtggtctactgggtggccatcaccaccttccagaccggtctgccgttcttcgtgaccagcctgctcaagctgccggaaaccaccacgaccatctacttcgtgctcatgaccggcgtctccgtgctgttctatctgccggtcaatatcttggccaataaggtcggcaagaagcgcctgctgctggttgccttcgtgatcttcacctgtgcgttcgcatttgccggcgcccttggttcggccgcgctcggcttcattccggcgatggcccagggtttggcgctctcggtggtcggcgcgattccgatggccgcgttcggcattctgccgcaagccatcgtggcgaatatcgccgacgccagctccaagaccaccggccaggaccgtcagggcatgttctacgcggcccgcacctttgcgatgaagatggggcagtccgtggccatgctgctgttcaccggcgtctccaccatcggcatggcgtccggcgcgggctatcgcatcgccgccgtgtgcgcggccgtgctgtgcggcttgggcggcatcgtattcgcgttctacaacgaaaagaaagtgctgcatgtgctggaagcatgatgacgttgccgggtgccaccgcggtatccatgcggagcggtgtgggtgatttaccccgtctgcgacacttcggcgtcaaattgcgtttgaccgcactccgtactatattgttgcgagttgctttgcggagcaaagtaacatccaaggggctgtagctcagttggtagagcgcttcgttcgcatcgaagaggtcgcggtttcgactaccgtcagctccacgagaccctctgcattcattccaccgcagagggtctttttatttgtcttcgttgaaattctgccatctcgcgtttcaaggggctgatttggggtttgccggaggtctacttgcgtttcgaggggctgatggtcaagtagatacgccgccaaaatggcggaatagcgttgcgtcaaagccgtttgtactggtgcttcaccggatgaggagccccttgaaacggaagtagacttccggaacatgtgaaatcagcccctgcaaagggagaatgcctcgattccgccatggattgtcgtggattgctctgtggtatgggcaatactgggagtatgacaagcgcagatgagttgaatgagcagtatgacgctgacggtagcgtgacgcaagtgcctgaacgcaatgatgaagttcatgccggcgaatccgccgccacccaatcccgcgaatcggccgtgaccatccccgccggcaccgtggtgctcgccgcaaccccgatcggcaacgtcggcgacgcctccgcccgtctggtggccctcttggagcgggccgatatcgtggccgccgaagacacgcgccgcctctacgatctcgcccgtcgcctcggcgtctatgtgaacggtcgcgtcatcgcctatcacgaccacaacgagcgcgacaaggccgatggcctgctcgatcaggtcgaaaccggcgccatcgtgctcgtcgtgtccgacgccggcatgcccaccatcaacgaccccggcttggccatcgtgcgccgtgccatcgaacgcggcctgcccgtcacctgcgcgcccggcccctccgctgtgctcgacgcgctcgccctctccggcctgcccaccgaccgtttctgctacgagggcttcctgccgcgaaagcattccgagcgcgtgcagtatctgcgcacgctgttgcccgaacgccgcaccatcgtgttctacgagacgcctcatcgcattgccgattcgatggacgatctgctggacgcgttcggcccgaatcgcccgatggccctgtgccgcgaactcaccaaggattatgagcagattcgtcgcggcccgattggcgagattcgccaaagtgtgattgatgatccgccccgtggcgagatggtgctggtcatcggcggcgcgtccaacgaggaggccgaagcggccgcgcccagtacgttgagcgtggatgacatggccgtgctctccatcgaccgtgctttggaggaaggcctgcgtatcaaggacgccatcgcgcaagtggtgcaggagcatccactggctgacggatcgttggccaatcgcaagcaggtgtatgcggctgtgctgaaaatcaagggatagcgcagcagccggcgattatctccccgttacgcttccatcgactcgaacaatatttccaacgcctgccggaccccgggcccaccacgctgcgagaccaattccagcaaaggcgcgtcggctttgggattggcaaccagccatttacgcagttcgggcacgtgatatgcgatgtgccagagcacggcaacatccgtatcgggcgaacatgccaccgcgggcgtaagtctgatgggtggttcaggcggcgcggtcatatccgagattgcgcgcgatgcggattcggatgagtgtgccgccgccgcgtggcgaggcaaccgttgcgcctgccgcaaatgccgtaaacggtgagcggcatagcggcctctgcgatgtcctttggcgatgaatcccctcgtcatgcgcattgctccaaagccggttcgtcaatctccttctgcaccgattcaaaaaacatgcgtgcgcgtccggcatacttgtgatgccgatgctccttgacgatttgcagacagtcgtttggccgaaactggtacgcggacatcagttggcacaccagcgcgttgacggtggaaggatcggggatgtcttcaggactcatcaccaggtcgcaagccgtacgggctggcgtggtgacaggcagcccgccgagcttgatgatttgctccggcaacgtcaatcttttgaatacgcggatgcggcggctgacggatgccgagcggaagtgcgatgtggagatcacgtctatggtgctcggaaagtcggggcctcccagccatacccaagcggcggtcatcgaacacaccacagtgccaaacggggcgacctccgcgacgatttttgcgcgaccatacagtgtgcccgaatgctcgatccagtagccggcggaatcgtcgagcttacgtaacgcgccgaaggcggccagacggttaaggctgagcggtcccggcagatccttggtaaacagtatcggcggcaccgcgggctgcgcggttgccggcgaggtgactgttgtgatgtccgtcatcggacctgctgtgatatccatgaccgaacaatatgcagaagtacggcttgcgcgccaccggataagcgaaaacggtggataagtgcataacttcactaggtgcgcgaatgatgtggataactcggtggatatcgacaggcggaagtgtgtgcggatgtgcgtggacgtgtgtacggatgggtgcgtggacgtgtgtacggatgcacgtacggatacgtgtgcgaatgcgtatgcggataagcgcgcaagcggtgtacggataagtatgtgggggaagttacgggcggataggtgagtgggatgaggatggcggcgcggcagctatccgggcgtgtccccgccgcgccggataatcaagccttatgagtcatgttttggtgaatgttgcttggccgtatgcaaacggcccccgtcatatcggtcacgttgcaggatttggtgtgccctccgacgtctacgcgcgctacgagcgcatgaagggcaatgacgtgctcatggtgtccggcaccgacgagcacggcaccccgattctcgtcgaggcggagaaggaaggtctcactgcccaggaactggccaaccgttacaaccgcgtgatcgccaaggatctgtgcgacctcggcctgagctacgacctgttcacccgcaccaccaccggtaaccacgagcacgtggtgcaggagatgttcaagcagtgcttggagaacggctacatctacaagggcacccagcaggtggcgattagcccgtccaccggccgtaccctgcccgaccgctacatcgagggcgagtgcccgatttgccacgccgaaggtgcgcgtggcgaccagtgcgacgcctgcggcaacgagctcgacccggacgagctcatcaaccccgtctccaagattaacggcgaaaccccgcgcttcgagcagaccgagcactacttcctcgacctgccggcgctcgccgaagccaacaaggcatggctggagacccgcaagggctggcgcaccaacgtcatcaacttctcgctgggcctgttcaaggaggtcaagccgcgcgccatcacccgtgacatcgactggggtatcccggtgccggtgaagggctggatcgacaacccgaacaagaagctgtacgtgtggttcgacgccgtgatcggctacctgtcggcctccatcgaatgggcccgccgccagggcgacccggagaagtggcgcgaatggtggaacgacccaaagtgcccggcctactacttcatgggcaaggacaacatcaccttccactcccagatctggccgtccgaaatgctcgcatacaacggcaagggctccaagggcggcgaaaccggcccgatgggtccgctcaacctgcctgagcaggtggtggccagtgagttcatgaccatggaaggcaagaagttcagttcctcccgcggcatcgtgatctacgtcaaggacatcctcgcccgctaccccgtggacgccgtgcgctactacatttccgtggctggccccgaatcctcggattccgacttcacctgggccgagttcgtgcgccacaacaacgaggagctcgcctcctcgtggggcaacctggtgaaccgcgtggccaacctcatcaacaagaacttcggcgagattccgccgctggacgaggattcgatgaccaacgaagaccgtggccttctggaagaggcttccgccgcgttcgacgtggtcggctcctccatcgaaacccaccaccagaagcacgccctgtccgaggcgatgcgtgtggtcggcgacatcaacaagtatatttccgccaccgaaccatggaagattaaggacgaccaggctcgtctcggcaccgtgctgcacgtggccgcccaggccgtgtctgacgcgaaccacctgctcgcgccgttcctgccgcactccgcacagaaggtgtgggaggcgctcggcggcaccggcaccttctcgccgctgcctgagctcaaggaagtcgaggatctcgacaagcccggcttcacgtatccgattatcaccggcgattacgagctcggtgtgaacgtgcacccgtggaagagcgaggcaatcgaggtcggcgccgtggtgcccaagcccgcaccgatcttcgccaagattccgaccgaggccgtggaagaggagctggctcgcttcgatgaagcgctggctgctcgccgtgccgccgaagccgagcgtctggccgccgagaaggccaaactcgccgccgagtgattcggcattgctagctcgtagctgacgggccacctcgcacatgaagtgttgcgaggtggcccgttgccgtatgtgcggtcaagccccgacaatgcgaggccggttgtcggcgggcgtcacaaattcgtcacactccgccaagacttttcccagacaagcacatcaattcgccaagcatggggcggttatatagaagatgtcaacggaatgaagttcataccggtggcgaggttcttcgaaccccataactgaacccttcttctctcttctctctcacccggcggccccctccgccgggtttcttttttaatgctgggaatgccatgggccgcatattgaaaaaggattatggcagagtgctgtctgtttacaataaggcattgctgttctagaaaataacaaagaaggggggactgatgatgtataccgtcacattttcgggcaacctgactcaagcggaatcggccttggtcaagcgaggcgccatacagatcgccgcgttgctggccgcaaaaatcactggccgcggactcatcatcaacgacggtgacaccgaatactcatgggatttcatcctggtcgatgccagcagcgatgagcggcacacctttgacgagaggctattgcggatgctgtccgactacatccacgccggtttccccgatgccgtgatccgccacgccaagcacgaggctccaaagctcggcaaataatattggtcgcgtggtgagtcccatacttccgtcggaatatcgctatcgcgatatggtcgcatgcctgttgcgcattgaagcgttcgacctatgcgcagttgatgttccggtgatgacggcaaccgattgacgcgattaccgggacagatttcgctgtcccggttcgtgatttcggcttctttttgggaaccgggacagccccccttgtaaacgcccattatccgtaatcccaaaaccccggaattccgccgatgtacgatggcgaatattgcacggtggggtgataggtgaatgaaattttgtcttggttgctcaaaaaggggcgaaatggagaaccgggacagcgaaatctggcccggtccacacataaatcgattgacatcgctaccgggacatcggacacggacaccgagtcgcgcagcgtcggcgcaacatggatactgtacgactttcgcgataaacgttatactcttcgtcgcctccgccgggcgagctcatcgagtggcgttgccgtcaaagtgaaatcgaatacggcacctcgcaatgccaactgccgcccgacccggtaggcgagttcggcttgggatggttcatcggccatgttcgcggcagtggcgatgatgacgatccaatgatgatgtcgcagcagttcgcgcttgtcgttgtcccgccgccactggtttttgtcggtgcgatgatgatcgccgtcatattcgatggcgacgcgaaattcgggccaagcgagatcgagcgttatcggcgcgccgttgctgaatgtcgcgccgggcaccgtgtaatttgtcacggctggcggaagcccgtatttcgtcgtcgcgatgcgggtctttgattccatcggagagtccacgcggggcgtaatgaatgcaagagcgatcatgcacttggattttgcgttgaatttcgggagtccagtgacttgccgcacgaagtcctgataaatgccgtcagcagtgcggccgttcgccagacccggcttgcgggcgattgccgtaaggattgcgtcgccaagtatgaccagcgattcgagcgatatatgagtggcgagttgtgcccaagtgtgtatcagatccagtgcgtacacatgtttgttgatacgcacattgtgcgcatcgctcagcggcttccagatgtgtggtgtcgttggcggcacgatggcacgtattcgtgtgcggtgtgagtcggagacggtatggagctcggcggggtcgatatcgcaatccttgggaagcggcacggattgcagtatcagcgatgtggccatgccgaagagcaccggttgcccgagctgttgcgcggcgtccgtgcatcgtttaagcatttcccgcttacgttgggtgagggtttcgctcattgctggcgacacagggcctgtaatcacagttggcgcggaactcgccatacgtggtgatgaacgtagctcaggattgatggtgcgcgcagacgcaacgcccggtgtgtggggccgggtccagccggacggttcgtcgtcgaatacgccgggcggtggagtgggcaatatgtcgttcatgacgccaccgtagcgcagcggtcacatgctcgccatgaaaaccggggtatgtggctctagcttgcgtgagatgtggataactctgtggataactagttcggaacaattagcgaggccggaacctaccggcaattggccgatgatgacggcacttttgctcagctcagccgcgatagtctcgaataggtgcggccgggcgtactcgcataacgtaatgccccttctctctgagcagagagaaggggcattcgaatatatgctcccgccagcggaacgtcagcggcagcggcgggtgagtggctgccaggggtcgatttcgaccggttcggtggtgagcagggcgcgggtggcgtcgtcgaggtattccttgcggatgatgagctcggtaacgtagcggtcgaaccaggcgtcggacatgacgtagtagccgtccttgccggcgtccttgccccagctgttctccaccttccagcggttcggcttgccgtcctcgccgaggttcacgccggtgaaagtcatggcgtggttgctcgggctgtcgccgtattcgaggccgtgggccttgtcgccggtgaactcggtgccgaacagctggtcgacgcgcaccacggactggtcgaagaagccgtccttgcgcagcgcgaactgcgtgcagtcgcaggcgaaccagatcgggtgaccggcggtgagctggtcaagcgcggccttcttgaacacgtccagcggcacgttgacgaactccatatcgcccgcctcggccacgttcgcgctgaagcggatgcggtagcgccggttgaacgggcggttcttgagtggggcgttggccagcgtcgcgaaatcgttgacgtccaccggcacgtacttcttgtagaactcaagcggggtgatgccgatctcgcgaatctgcgggcgctcgtccttaccggttttcggcttgtcggacttgtccttatcgcacttgcaggccttggcgtcggatttgccctcgcatttgcaggagtcgccgcacttgcaggattcggccttgccgtctgcgtcggcctcggccttgcacttgcaggcctcgcccttcttatcctcatcgtcatccttggtgcgcgcgaagaagtcgaacttctccggcggctcgccaagcgacacggcgcagatgcggtacacggtgcccatgtactcgtccttcagcgcgcgcagctcgtcctcgccagcgcccgcagccgaacggcggcgcagctcggccgcgaactcgcgcagcttggagttgaggtactgcttgaaatcatcggaattacgggagttctcggactccgggtaggcgctcttgggcaccagaccgtacttgttcaccagcgcggcgaacatctgccaccagccgccgtcgtcggacgggccccagttgatggcttcgaacagacgcgaatcggtcgcctcgtcgagcgtgcgcagcacgttctccagataagtgttcgacttctccatcgcgtcccagaagaacaggtaggtctcggagaactcgaaatcctcaagattccagcgatgcatgagttcgtaacgcagcgtgttcagggaggcgaacatccagcagcggccggaacgctcctgattggtgatcgaaccctgcttgagttcgatggagaagtcgcgcggcagcgcacgtacgccgcgatagtcggtggccgccttgagtacgccggccgaaaccgccgcgtccgccgcgatcaggttggcgcggtccttgttgaagtcctcggtgtacgtacgtagaagttcgggtttgatggcccgtgcgctggcgtctgtcgtcatgatgctcctgtctgatgctgatgatgctgatggataatccgttgccggcggcggggactgtcaccatccgggccggcggactgctgacacgaaagtataaggcatgtccagcaaaggctcaggaaatacaaaattaacaaacggatgtttgcccaatacacagtaagtgttttcgcagttttctgtacaggaaaaagtcggaaaagtcaatacccatattccatatattggactcaatttgtggttttgagcgggggggggtatcactttcccagttatctgggaggtggttgggtgttcaagtacatcatcaagcgcattgtgaactacgtgatcatgctgttcgtggcagtatcgatgacgtatttcctggccagcgcattcatggatccgcgttcgaactacatgtcgcgcaatccgcatccgccgatcgcgtcgattaaccggtcgctcgatctggccaacatcaacgaccagacgccggtcgtcatccgctatttccgctggctcaagggcatcctcacccagtggaactggggcctgagcccggaccagtcgccggtggcgccggccatcgcctcccgtatctccgcttcgctgcagctggtgacgctcgccaccgtgctctccatcctcttcggcgtgagcatcggcgtgtacacggccatccgccagtacaagtggcaggaccgcgtgctcaacaccaccgcaacgttcttcctggtggtcccggccgccgtcatgggcctgatggtggtgctgctggccatcaacttcaacaacatcgtgggcagccgcgcgttctacgtgaccggcctgcactcctaccaaggctccaacccggtgctttgggtgtttgactatctgcagcacctgatcctgcccaccatcgtgatgacgattccgggcatggtgggctaccacctcacccagcgtacgtatctgctcgacaccatgaacgccgactacgtacgcaccgcccgcgccaagggcctgacgctcaacgcggccattcgccgccacgcactgcgcacctcgctgattccgaccgccgtggatgtggccttctccatcgccggcgtgttcaccggcgcggtgatcaccgaaaacgtgttcgccatcaacggcctgggcatgtacttcacccagaccatcgccaacaacgacatcaacggtgccgtggccgtggccgcgttcggtggcgtgtgcacgctgtccggcgcgctgctggcggatatcttctccgcctggcttgacccgcgtatccgactgagctgagccccgcgcaaaggacgatctaacatgatgaacgacaacgaaaacatggtctccgacgccgccgcccaggatatggaactcaccgatccgcagggcagcgaaccgcagtccgccgacgccaggaacgcccaggaggcttccagcgccgacgacttccaccgcaccggccgcatgcagctgtacgtgcgccgcttcatgcgccgcccctcggccgtggtgggtctggtggtgctgattctgctgattcttttggcgattttcggctcgaaattctcccagtggagctacgatgagcccgatttcgccgccctcgcctcgccgccgtccgcccagcactggctgggcaccacggtcggtggctcggatatgtacgcgatgatcatccgcggcctcggccgttcgttgaccatcggtatcttcagctcgttcggcaccacgatcatcgccgccctggtgggcacggccgtggcgttcttcgaaggctggttcgagcgcgtgggcatgtggctgctggatatgctgctcgtcgtgccgtccttcctgctcatcgccctgatcgtcggcatggcggccggcggcagcgactggctgtggctggccatcggcctgaccgcattcggttggatcggctacgcccgtacgctgcgcacgctgaccctgagcctgcgcgatcgcgaatacatccgcgcggcgaagttcatgggtgtgccgtccttcaccatcatcgtgcgtcatctggtgccgaacctgggttcggtgctggtcatcaacaccgtgctcggcgtgatcggtgcggtcaacagcgaaacctcgctgagcttcctgggcctgggcatcaaggcgcccgacacctcgctcggtacgctgctcaacgccggccagtccgtggtgcagacctcgccatgggtgctgatcttcccgtccgtggtgctggtcgtcctgaccttctccgtgcagctgatcggcgacggactgcgtgacgccatcgacccgtactcccgttccggcggcaaggccgagtgagaggggagacgggcatcatgagcgacgaacgcaacgcaagcaacgtaacaaccaacaccaaccccaacaccacaggagcgcaaggcatggcatccgaaccggtgatttcagtacgcgacctcaccgtcagcttcgcctccgaagccggcaccgtgcacgcggtgcgcggcatgaacttcgacctgtaccccggcaagaccctcggcatcgtgggcgagtccggctccggcaagtccgtgacctccatggccatcatgggcctgctggacaagaacgccagcgtcaagggctccatcacctaccacggcgaggaattgctcagcaagtccgatcttgagatgagcgagatccgtggcaagggcatcgccatggtcttccaggacccgctctccgctctgaccccggtgttctccatcggcgaccagatcaaggaagcgctggtcacccacaatccgaagatgaccgaacagcagattcacgaccgctccatcgagctcatgaacctggtcggcatcccggacccggaggaccgcctgaagtccttcccgcacgagttctccggcggcatgcgccagcgcgtgatgatcgccatggccattgccaacgacccggacgtgatcatcgccgacgaaccgaccaccgcactggacgtgacgatccaggcccaggtgctcgaagtgctgcgcaaggcccagcgtgaaaccggcgcggccgtcatcttcatcacccacgatctgggcgtgatcgccggcgtggccgacgacatcgtcgtcatgtacgccggccgcccggtcgagaaggcggacgtcgactccatcttcgaccacccggccatgccgtacaccatgggcctgctgggtgccgtgccgcgttccgaccgcgaacgcaacagccgtctggtgccgattccgggctccccgatgaacctggtcaacatgcccaagggctgcccgttcgcgccgcgctgcccgctggccaccgacatatgccacaccaccgagccggccatggagccggtgccgggccgcccgggccagttcgtggcctgccaccgcacccaggagatcgtggacaagggcctgactttccacgacgtgtacacggtggccgaggccgccaagtcgaagttcgccggcatcccgcgcgacgaacgcaagatggtgctcgacgtcaagcacatgcgcaagaccttcccgctgaccgccggcggattcctgcgccgtaagatcggcgaggtcaaggccgtggacgacgtgacgctggacgtgcgcgaaggcgagaccgtggcgctcgtgggcgagtccggctcgggcaagtccaccacgctcatggagatcatggagttcaagcagccgcaggacggcgagatcgagatgttcggcaccaagctcgaacacaagattccgcgcgagaagcgccgcgagctgcgttcggccgtgcagtatgtcttccaggacccgatgagttcgctcgacccgcgcctgccgatctacgacatcctggccgagccgatgaaggtccagcactactccaaagagcagatccgcgaacgcatcggtgaactcatgcgtctggtggagctgaaccccgaccaggtggaccgcttccccacacagttctccggcggtcagcgccagcgcatcgccatcgcgcgtgcgctgtcggtcaacccgaagctcgtgctgctcgacgagccggtctccgcactggacgtgtccatccaggccggcgtgatcaacctgcttgaggacctgcagaacaagctgggcgtggcctacctgttcgtggcccataacctgtcggtggtgcgccatatctccagccgcgtggcggtgatgtacctgggccgcatcgtggaatccggcgacaccgaagacgtgttcgagcacccgttgcacccgtacacccaggcgctcatcagcgccgtgccggtgccggacccgaaggcggaacgcacccgccagcgcatcgtgctgcagggcgaggtgcccagccccaccgagacgttcgaaggctgcccgttcatgggccgctgcccgctcatgcccaagctgagcgccgaacaacaggcccgctgccgcggcgaacgcccggcgctgcggccgtatgacacttcccgaccgagcggccatcaggttgcatgccatttcgcatgacggtcggaaccatatagaggaggaaataacaatgaacaagacacgtaagctgaccgcgctcgccgcggccactgcggcgcttgccatgctgcttgccggctgcggcgcgggcaatggcaacggttccagcaatgcctcgagcgccaccgaaccgccggccggcatcgattcgtcgtacaccggcgacctgcccatgccgaaggtcaccgagcgttacgacaaccaccagagccgtgacaacgtcaaggacggcggcacgctgaccctgtccatcgtcgaaatcggcccgaactggaactacctgtcttccgacggcaacaccggctacatgtccgagctgtggagctggtaccagcccagcctgctcatgaccgaccaggtcaacggctccccgattaaggtgaacccggacttcctgaccgacatgaagctcgtgagcaaggacccgatggtcgtgcagtacgacatcaacccgaaggccaagtggaacgacggctccgacatcgactggaccgccttcaaggccacgtgggaagccaacaacggctccaacccggactacaacccgccgagcaccgacggcttcgaccgtatcgctagcgttgagcagggcgacagcccgaagcaggtcaaggtgacctacaagaccccgtactacccgtggcaggaagtcttcggcgctctggtgaacccgaaggccgccgacccgaagaccttcacccagggctgggtgaagaacccgcacaacgagtgggccgccggtccgtacaaggtcgactccttctccgactcccaggtcaccttcgtgccgaacgagaagtggtggggcaacaagccgaagctggacaagatcgtctacaagcagatggccgacaccgcctccctcaacgccttccagaacggcgagatcgacgccgtggaggccaacaccaaggacgacatcaaggccatccgttccgtcaaggacgcccagctgcgcatcggctacagcaccaagacccgcgtgctggagtacaacagcaagtccaagccgcttgacgacctgcaggtgcgtaaggccatcactcaggccttcgacgtgaacacctacaacaacgtgcagttccagggcctgaactggaaggccgagcagccgggctccgagctgctgctgccgttccagaagggctacgagaacaacctgcccgccgaggccaagtacaacgtggacaacgccaagaaaacccttgaggccgacggctacaagatgggcaaggacggctactacgccaagggcggcaagacccttgagatctccttcactttcttcggtgacaacgccacccagcaggccctcgccaacgcctaccaggcgatgatgaagaaggccggcatcaaggtcaaggtcgtgaacgtggccgagtccaagttctccgacaccgtgtcttccggcaactaccaggtgctgccgatggcttggcaggctccgagcgccatgaccttcgtggtgtccgccccgcagctgtacacctccgacggcccgtccaacttctcctacgtgggcagcaagaagatcgacgagctcgtcaagaaggctggcagcctctccgactatgacgagcagaccaaggccgtcaacgccgccgagaaggaagccctcaagctgtacggcaccatcccggtctccaacccggcttcgtacctcggtgcgaagaagggtctggccaactacggcccgtccggcttcgccggcaacctgccgcaggacatcggctggcagaagtgatgacgtctgactgacgtctgacatggccaccgcgccgggaacggccggccgcacgcatcgactgcaaggctttcgatgccggacgcggcctgcggcaggttcccggcggggtgtgaccgcggcagcatatgccttactctccttatttctgcatatgatgctgcggttgggaagcctcccatttgcgcgcttatgcgtcgcgcgcgaatgggaggcttttgcatacttgccgcgattccatcccggcaacgatttgtccaccttgctgcccgcgcggctgaaaccgtatccaccttcctcttcccggatttgtgacgctgacggttgccgagcgtcacaaatccgggagatagtcgcccttacttgttgtcagaacttggtgagcccggatttgcggatatggtcctcccagccatccggcttaggcagtgtgaccagttccctcattgtcacggcagggatcgcggccgccacgatgcacaagcccaaagccacggacgtgactgagtaaccccagtgttgcatggcgatgccggacagaaatgtgatcaccggggcagcaatcgtctcaatcatgcccatgccggcgaatacgcggcccatatgctccttgttgatgagcaatgattggaatccgttgattaccgcattgccggccggtagggccagcagcgaaattgccagaaacgccatacgcgcaagaatccacggagccagcgctgcgccgagcgcgccgatgctcatcagcacgtagaacgatacggcgactatgccgccgcgcacatgctgaaccagcacggaagagatgagcgagccaacgatgacgcccacagacacagaaacgttcatgaaactggctgacaccacatgtgatgggtcggagccgatcgagagcaccgtaatcagcaggaacgagttgaagcacgcgaacgccagcgcgctcgacaaaatcaggcgacgttcgaatcgctcgctaagaagccagcggaatccggaaaacatctcacgccaatactgtgacgcggatggtgtcgtggtcgttgcctgctcgtcagcggcctgagtgatgttggccgcatcgccattctcatcggcctcatcgtcggcaagggcgcggccctccgcattggtccgcccgccacgatgccagtattttgtgatccgcatcgccgccgcggtttccaatagattcagcagcgcgctgactgcgaatggcagccatagaccgccgccgatcaatacgccacctactggtgcgccggcgagttcgagggcggcatcgcggccatcattgaggcttgacgccttgggcagcaattgatcgggaacgatgcctcgtagcatcgtgttgctcgtggttcctaggaggcctgagcgtatgccgaggcatatcgcaagtaccatcagcaccgggtatatgagtaatcccgcccatcctagggccgcgcatatgccgaacagtgcgaaaccaatcaggccgaacgcaatcataagttttttgcggtcgtacttatcttgtaccacgccacctggcaaccgcaataccgacgatatcatggtcatgattgaatccagcagcgtcgcctgtgccggtgagcccgtgacggtctgcgcgatgagtggcattgcgaaaccttggatacttgatgacagcgacgtgcatgaatccgctacgaaccatttgccataatccgtgccgcgccatagcgactcggtggtgttgctatgtgaactgtgaccgttgggctgtgttgaagattggttgttgactgttccgatgtaatcagccattgtgatcatctccgtattcatcgatgcttgagatattctattatgctcgtcttcaagcgccgcaccggactcacccccggccaataccgcgacgcctttacaacaccgtgtgattagggaaggtcagggtactaaccctgggaaaagtgcagtattctgcattattaaccctaggaaaaatgtaattttggacaatcgcaaccctaggaaaaatgtagaatacgcgaattgcaaccctaggaaaagtgtgtattgcggtataaatttatttttggccacatcgctcgtggcgctcgggcggcgcaatatgaatccgcgattcagcagattgtcgattctggtcttgcgttgcgggtgtatcgcgtcgaaaaacctgcggcaccattgccgtcataccgtgatgattccgcgttcaaactgtatctccatgatgttgggctgctggcagcggccctggatctgactcccgcaagcgtggtccttggtgatgacgggctgaccgaattccgtggtgcgttaacggaacagtatgtttgccagcaattagttgccgccggcatcacaccgatgtactggtcgaatgcgaacagtacgggagaagttgattttgtctttgcaggtaatggcgcaatcattccgttggaggccgaagctggtaccgagcgtcataagcgtagcttgaagtggctgtgcgacaaatacgggatttgcggttaccgtacgtcgatgcggaattacaaggagcaggattggctgaccaatgtcccactgtggatagtcgggagctgcttccgcccgtggttggcgagtgattatgagccggatggcggagctgatttagggccgctaccgaatactgatgatgaaggatgactgaagccgcgagatatggttcggccggttgctgaattggaagaaccgtaaaaccaagtagggcttattggtcacgggtgcccggcaggtgggcaagaccacgctgattgagcagttcggtgcagaccattatgagcatgtggctgaggtgaatttcatcgaaatgcctcaggcggtcgaaacggtaagcaaggccaaggacaccgaagacctgatactgcggttatcggtactttccggcgcggaaattacgccgggcaagactctgctgtttcttgacgagatacaagcgtgtgaggacatgcctacgtgttccatgatggcaacgtggagactgttggccgaaccgaatacctgcccatatatatgctgggttgtttgagcgtgatgtaacgcgcaccactttcccgggaatgtgtcgcgaattgggcctgttgcccgtcctagaggttcggtccattgacccagccctgttacttcacccttaccgtccgcaatggagtgaaccgactaatccatatccgcaaaatcgacaagcgtcactgtaccgtcttgcgccgcgcgggcggcgacatgctcgtcgaagcctgatttggagaacagcatgtaatggctggtttcggggtgcagcagtctggcgcgattgcgcagcacttccaactgctgcagaccggatggcacgctgcgccatttgcattcgcagaataggagagttttcggtttttctcctgaagccacgatgtcaatttcctcctgactgcgggtggtcggattggcgccccaccaacgtccggcatcaagcatgaggaaaggcaatgcctcggtaccgttatgggaccatatccactgaacacagatgtcttcgaacacctgccccataaagtcggagatagtgcgcataacacggtcggcggtgagatcggcatgaccggattgaatgagggacatgttgttcggcacatatcggtaccagaatcggaagaacgagtcctcgatacggtagatcgtcttgcgaggagcgtcctcgccgaaaggtgtctccttgcgaacgattcccagatcgatgagattgcgcaaataggtggcgcatgaggacgattccatatggcatgcggtggcgatggtgttcgaccgagatgccccggaggcaatggcctggattacggcgttgtactcggccggactgcgcagctcctgcttcagcaagttgtctggctcctcaaacagatagcagcttggatcgaggatgttccaacggatgttgtctcggatgctgatgccgtcgtccagttgccgaagatactgcgggataccgtcggtaagtccgtaagcaatagcggcgtcctcgttgctgtatcttggcaagaacttgcggacatcggcgtagccgaatggctccactttgatttgagcggtgcgtctgccgtatagagggctctcatacccaagcacctggcgctccatgaacgacatggaagagccgcataacaccatcatgagctgactgtcatccttatggcggtcgatggcatgctgcaggaccgaattgatggtccggtctgctttagccagatatgggtactcgtcgatgacgaaggcgatgcgttgctttgcggccagcgcgaacaccgcttccagtgcggattcaaagctgcggtatacgggcgttgtctcgaacgcctctgagcccttttcatacagagcaatgctgcggcttaacgattcgagattcttggaagcgctggattcgattgccgaaaagaaaatcgtggggcgatcttcgaggaagcggttgatgagtgtggtcttgcccacgcggcgacggccgtagaccacgacgcactcgaactgctgtgagctccagcggcgttccagtgccgaaagctccttatctcgcccgacgaacatggcccttgtctccttgctttgctgtctgccctggcgcacacgcgcaaattatagaatcgtaatttacttaattatgattctataatttggtcgactggtatgcaacaggtctcgagcgtgcattgccgcatgcgcaacgtttcgcgcgacacattccggggaatgctgcgcttagcgggtcgtgccgcgttgctaatgcggggaacacgcagggttgtaggctgttgcgattggacgcaggccgtctagactagtacgcgtttgcgaaagtcgaacgtgcttcgaccgatgaaggagagctccggtcatgcggccaatgacaggcgcagtgcgaagcacggctgatcgtgaatcgcggcggcagcgattgccgcgtgcggcgcaggagcatgccgcaccataccacaagcaaacaatccccaagaaacggtgatctcctcacatgtacgtcgatccgggaatcgataccagcgcaagcaatctcaaatgggtgctgccatactgcaaaccagacctgccccgcgtggcaggcgcgctcctactgttcatcgccaacaacacgatggccctgaccattccgattctgtccggtatcatcgtggaccgcgtcatcgtcggcggacatgccgacgaactgccacgtctgtgcggactgatgatcctcatgaccatcatccgcgtgggcgcgcgatacggctaccagatgtggatggagcgtttcggccagaactcggtctaccgcctcgtctccgacgaatacgagaagctgcacgagctcgacttcacgtacttcaaccacacacgcaccggcgacatcatgagccgcctgacctccgacaccgacgcgatccgccactgcctgagttgggtgagctatcagatcgccgactgcgtggtcatgttcgtgggcgccctgtgcgtgatgttcgccatcgactggcgactcgcgctcgtcctggcctgcgtcacgccgttcatttttgtgctcacgcgcggcctgtccacgcacgctcacccgctgttcttctccatccgcaactcgctggcctccctcaactccatggtcgaagagaacatcgagggcaaccgtgtggtcaaggcattcgtgcgcgaaccgtacgagaccgaaaagttcgacgagcacaacgacgattacatgcatcgcaacatggccctggcctacaactcgcgcaagtacatgccttggctggacggcctcggcttctcgctgcagctcatcacgctcggcctcggcggctttcttgtcatcaagggctacatgaccctcggcaatctggtgagtttcaactccttcctgtggatgatcgacggcccggtgcgccagtccggctggctcatcaacgactggcagcgattcaacgccagctgcatcaagattcgtaagctgctcaccgaacagccgcgcatcgtggagaagcccgacgcggccgaagccgtcaagcaggcggtcacgatcgtcgagcaggtcaagcacgatgatgaggctaccggagcgcccggggcttccggaacatccggtgcccagcagtccgccgaacgcaagtcctgcccgctgcacatcaagggcgacatccgcttcgaccacgtcagcttcgccttcccggacgacccggagaccccgatcctcaaggacctcgacttcaccgtgcccgccggctccaagctcggcatcctcggcgaaaccggcgcgggcaagtccacgctcgtcagccttatctcccgcttctacgacccgaccgtgggccatgtgctcatcgacggcatcgacgcacgcgactggccgctgaccaccttgcgctcgcaggtgtgcatcgtggcgcaggatacgttcctgttctccgacaccatcggcggcaacatcggttttggtgccagcgatgatagcgacgaccgatatatccagaaaatggcccagatcgccggcgcggacaatttcatcaggtcgatgccgcagggttatgacaccgtcgtgggcgaacgcggcgtgggcctgtccggcgggcagaagcagcgcctgtcgctggcccgcgcgctcgcggacaatccgtcgatcctgattatggacgatacgacctcggccgtcgatatggagaccgaggcggagatccagaagcacctcaaggagatggacggcggcaagaccatcgtcgccatcgcccaccgcatctcgtcggtcaaggattccgacctgattctggtgctcgagcacggacgtatcgtcgaacgcggcacccacgccgaactcgtggccgcacacggccgctactgggacatctaccacaagcagctcggactccagtccggcgccgcacaggggttttagaagaggacttatggcacaacgcaatacattccgcgaggatgaggagctggaggagtccatcaacctccacgacatcgctcgcgtcggcaaatatatcaaaccgtatatggcacaggtggcgcgcattctcgtcgtcgtcatctcgatgagctgcatcgtcgtcgccgtgccgtacctgaccaagatcatgatcgacgaggcgatcccgaacaaggacctcggcaagctcggcatcctcgccgtaatcctcgccgcgctgatcgtgctgtacgagttcgggctgcgctaccgcacggtggcgatcacgcgcgtcggccagctcatgctcaaggacatgcgccgcgatatcttcacgcatatccagacgctgcccttcagctacttcgattcgcgcccgcacggcaagatcctgatccgcgtggtcaactatgtgaacacgctttcggacacgctgagctccggtctgatcaacgtgatctccgacgtgttcaccttcgtgatcactctgatcgtgatgttcgtgatcgactggcagctggccctgtggagcttgatcctgttcccggtgctcatcatctgggtgcgcgtgctgcagatcttccagcggcgcgccttccagaagctctccaacaagcagagcaacctgaacgcctacatccacgagtcgatcgccggcgtgaagaccacgcagaccttcgcgcaggagcaggcccagttcaggaccttccaggagcagcagggcgaggtgcgttccgcgtggatgcacgccgtgcacatccagttcctcatgtggccgggcgtgcagaccatctccgtgatgaccatctcgttcatctacttcgtcggcgtgatgggcttcgggggcgtgaacgtgaccaccggcgtgctcatcgcgtttgtcggctacgcgaacaacttctggaatccggtgatcaacatcggcaacttctacaaccagctcatcacctgctcggcgtacctcgagcgcatcttcgagacgctcgacgtcacgccggagatccgcaacaagcccgacgcggcggacctgccgcagattcgcgggcgcgtcgacttcaacgacgtggtgttccgctacgagaaggacggccgtaacatcctcaacctcgtggacttccacgtcgaaccggggcgcacgatcgcgctggtcggcccgacgggcgccggcaagacgacgatcatcaacctgctgtcgcgcttctacgacgtgtccgagggctcggtgacgatcgacggccacgacgtgcgcgacgtgacgctcgcatcgctgcgccggcagatgggcgtgatgctacaggacaccttcatcttctccggcaacgtgcgcgagaacatccgctacggcaagctcgacgccaccgacgaggaaatcgaggcggcggcgaaggccgtgcacgcgcacgagttcatcatggaactgcccgacgggtacgacacggtggtggaggagcgcggatcgaccctgtcggccggccagcgccagctcatcgccttcgcgcgcgtgctgctcgccgacccgcgtatcctgatcctggacgaggcgacgagcaacatcgacacgcgcaccgaggaggcgatgcaggccggcctgcagcatctgctcaaggggcgcacgagcttcatcatcgcgcaccgcctgtcgacgatcgagaacgcggacgagatcttctacatcgatcacggccagatcgtcgagcacggctcgcacgcgcagctgctcgccgccaagggcgcgtactaccgcctctacgagtcccagtacgcgatgattcgcgtggccagcggagcgccggaagagtgacgagatgttgcgcacaaggatgcgtttagcggcgtttcacatagcgggtgctgcgaccggcaccgattttgatgatcgtaccggagtccaacagtgatttcagcgtgcgctcaatggtggtggtgctggtatcgggcatgcgagcgagaatatcggccttggagagtggcactagggattgatcaagcagtgcttcaatccgcattcccttggtggctactcgcggtgctccctgcgctctgccgcctgccgtgagattgatgcgttcgtcgaattccttgcacgcggacagtatgatgccaagcaggtagttcgtgaatggcgcataatcattggcgttgtcgtcccatccttgggtgcttgcggccagcgcctcataataagtgcttttactttgctcgataaggtgttcgatactgatgtatttgccgaccatatagccattgcggtacagcatcaggagcgtgagtagccgactcatgcggccgttgccgtcattgaacggatgtatgcaggtgaaatcgagaatgaacatggcgatggcaagcaatggatcggtatgtccatctcggattgcttgcgtgtaggcggaacacgcgcgttcgatcagtattcgatgtagtcgaatgatctcatactgcctcattttctgcatcatacgaacttttctgcatcatattttatcaaaatgaggtagaaaatgggctgatgaggcagaaaaggcggcaggatggtggccatctcgcttgccggttgcgctactttcccgggaatgttgcgctcgtggcaagagacggcaagttcaggcggccgagattggcgatacccgtcgtgtagtcgaacgtcttaccggactgccttacgagcgttgctgacggtagcctacgctgagaaacagcttacactgagaaaccatgagcaagcaccaccatcgcgaccgtagctgggccccggcacctgaagcattgccggacgacgcccagaccatcgacaaccacactcacgtggcctccgtaatccctttcgcgcgcgctatgagccatgaggcgcaggagaaggggcagcccgaagtcccggtgtacgacgtcgaccaattgctggcgcaggcgcaatctgtcggcattgggggtatcatcgactgcggttgcgagctgccgcacctgatgaccgccgtccagatggccctcgatcatccaggtaacgtgcacgcggcgctcgcaatacaccccaatgagtccgtgctccacgggcatcgcggtgtgccggggccggatggtctgcctctcaaatacaagccttaccatgacacgtctttcgaggacgcgctcgccgaagtacatcgcctcgccaccacataccccgagcaagtggtggctatcggcgagaccggcatggacctcttccgcaccggcgaaggtgccaaggaactgcagcgcgaggctttccgcgcgcatattgccctggccaaggaactgggcctgcccatgcagattcacgaccgcgactcccatcgcgaggtcatcgaaaccctgctggccgacggcgcgcccgaacgcaccgtattccactcgtattccggcgaccgtgagatggccgagattgcgcgcgaacatggctggtatctgagcttctccggcaccgtgagctacaagggcaatgacggtatccgcgaatcgctacggattgtgggtctgggccatgcgatggtcgaaaccgacgcgccgtatctgacgcccatgccgtaccgtggccgcaccaacgcgccgtacatgatcccctacaccttgcgggccatggccgatacgctcgacctgtccatcgcggatgtggcgcgcggcacccgcgataccgcccgcgccgtatacggactgtgagggccgggtgtgcggccgtcgcggcgatgtgttgacttgtaaaatttgtcagaattgtgaacgaggtctaccatgatgtacctgacataagcgagggggatgatctccacctcaatggaggactgaacgtatggctgagtcgaaccaaaggaccgcacgcgcccaaaaagcctcaaaggcccagacagcccaggctggcgccgccaaagccaaggcccgacaggaagaagaagcactgctgagggccgacacctttaccaacgctcccaaggtgtcccgccgcactctcaccaaggaggagcgcgaggcactcgccaagcagagggaagccgaaaccaaggaagccgagaaaatcgccagcgcatggtcgaaaggcggcctcggccgatggtgggcccgcttgcaatccagcccagacaaggttacctggggcatggcgatcgtggcgctcggcgtggtgtacggcgacatcggcacctcgcccctctacaccgcgcagaccttccttgccggtcagggagggcttggcagcgtaaaccgagaggccgtgctcggcatgctgtcgctggtcttctggtcgattacgctgatcaccaccgtcaaatatgtgctcatcgccatgcgcatcgacaacaatggcgaaggcggcatcttcgcactgtactcgttgattcgcaagtacggcgcatggctcgcgattcccgccatgctcggcggcgcggcattccttgcggattcggtacttaccccggcggtttccatcagttccgcagtcgaaggcttgcagaccctgccgccattggaagggttgttcgacgaaaacccaagcctgaccctgatgattaccgtcgtgatcatcgtgattctcttctccgtgcagtcgcgcggcaccgaaagcatcggcaaagtattcggctcgatggtgctggtctggttcagcttcctcgccatcgtaggcgtcacgaatctctctaacgactggtctgtgttcgcggccctgaacccggtgtacggcatcaaattcctgttcagcccggacaatgctgccggcatcgccctgatgggcaccgtgttcctctcgaccaccggtgccgaggcgctgtactccgacatgggccacgtggggcgcggcaacatctacttcacctggccattcatcaaggttgcgctggtgctcaactacttcggccaaggcgcgtggatgttggccaatagcgataacccgcaatacaccgcgatgaagtcgctcaacccgttcttccagatgatgaccccgaacgtgcggtacctggccgtgattctgtctgtttcggccggcgtgatcgcctcccaggccctgatcacgggcgcgttcaccatggtttccgaggccacccgcctcaactggatgccccatctgcaggtgcgttacccggcccgtacgcgcggccagctgtacattccggtggtcaacggcgtgttgtgcgtggccacgctcgccgtgctcgccatcttcaaggattccgaacacatctccgccgcgtacggcctggcgttgaccattacgatgatcaccaccaccgtgttgctcggcgtctacttatggcattccggcaagcgggtcggtgccatcgtgttcaccgtgctgttcttggcgattcaggctatgttcttcatcgcgtctatggccaaattcctgcacggtggttggttcaccatgttgctgaccgccgcgattctgttcgtcatgtacacgtggaatgagggcaccaagctcgaacgtgcgcaacgccgtcacatgcggcccaacgacttcctacccgcgctcgacaagctgcacggtgatttccgcatcccgtattttgcggacaacatcgtgtacctgacctccgactcggaaaccaagcgactcgacacggacatcttcttctccatcttcgccgaccaccccaagcgtgcccgtgcttggtgggcagtcagcgtggaaaccaccgacgagccgttcacccgtgaatactcggtggaggacttcggcacgaactacatctaccgcgtgcgcttccgtttgggcttcaaggtttcgcagtccatcccggcgtacatccaccagatcatgcacgacctgtccaaaaccggcgaactgcctaagcagaagtcgatttaccccaaggtcgacgccgatccggacatcggcaccatccgttacgtgctgattcacaaggccctgatgccggaatccaaggtttccgcacgcggtgccctgtcgttgcaagccaagtacgcaatccgccgcatggccggctcgccggttaagtggttcggtctggcaccttacaacccgctggtcgaggtgcagccgctgttcgtctccacccgccgcccaccgcgtctgaagcgcaccgatacggccaagaccatcacgacgcccacgccgactcgtgcagtggccgacccggccgccgtccccgacccgatggacaccacgtccgggctcgggcgattggtacaggagctcgatgccgccgtatcggccgaggagcggaagatcgctgagaccgctgccgccgctgcggtcgctgagcagggcgataagggcaaggccaagaacggcaaacccgccgccaagcctcagcgctccgccaaacagaagcgataacataccagtttgcagcggcgctgatgcgctctataaagaatggctataacggtcgccgcacgtcgccgcacggtttcggtaagttgaaataccatgtgcagattactgggatacgcgacggcaggtttcaacctgagtctcaacgccgtgttggggcaagacaatgtcgaggatttccgtgaactgtctgaaatccacaatgatggctggggtgtagcccagctttccgatcccgccgaagcgccgcacgtgcgcgacggcggcgcacccactccggaaaccggcacccgaatctacaagtcgaccatcgcggcccgtcatgacagcacgtttgagacgctggccgacgaaccgtctcgcggtgccatctggcacctgcgcttggcaagctccaatctgccgctcatcatggagaaccagcacccgttctatgcgaacggcctgagcttcatccacaacggcgatatctcggacgccaatggccgcaacatcgtcaccaaccgctcatacccggtgaaccacagcgtgctcctctccaccggcggccgttccgactccgctatcttcttcgcggtgattctggaatacatcggtttcggctttccgctcgacgaggccgtggcccaggccgtgcgcgaactgcgccaagcctacccgaagtccagctacaactgcatgattcagtccgaggaccagctcatcgccctgtgcgccgccggtcgtgagaagaccagcccgcgcatcgtggaaatctacgatgagtatggccgtggcgagcaggccgccgactaccgtgtgatgcgctaccgtgagctgcgcgacgacaacggcgactccgccggtgtggtggtctcctcttccggctatgagcaggaaggctggaacgtgctggagaacgaccagatgatcatcgcctccaaccgcaacggcacctaccgtctccgttccatctgaaatagcttcataagctccctctgacgagggggccttgagcctcaaatcatccgcatcccatacttctccgccaacgccggaatatccggcacgccatacttggccaccagatccagccatcgttgtttgttctctccgccaaatcgctcggctcgggccgtatacgcctcgacctgcaggaacttcggcggcactgacttgctatggaacttgtcggcgtacatcaccacttcctgctcgagattcatcggcacatagtcggctggtggcaatggcagctcctggcgcaccacatcctcgcgcgtaagtcccacgccggtatggttgcggcagaactgggcgatggactcgtccacgccctcgtcgagcagatactcgtagcccttaagaccgtgcagaatgtagcgtttcttgctgaatttgagcggttcgtcgtcagagccgtcatgcttgaacacgcggtaggtgccgatgtcatgcagcagtccgccgatgagtactaaatgctcgtcgagcagacgcggcggcacatgaccgccggtgacgcctgcggtgggcggtacctccgcgtccttcggtaatgtgcagcggcgcgtgaacagcgcgttctgccggcgcacgatctggcagccgatggtcgctacaatcacgcaatgcgtgtgcaccagctcgtacgccgccttggacggcgcgattttgcggtgcaactcgtcgatctgctccagtgtgggaatatatccggtcatgattatcaggtttcgcctcgtacggtcagatttatcctcagattagcgcggcaatgagccgcatcaggattgtcaggagctgattcggacatctcgacatgcctatctccgtttcaaggggctgattcggcatcctcctgaggtctacttccgtttcaaggggctggtgcccaagtatacgcggtgtaaaaacggcggaatgacgttggcatgaagccgtttatactcggggtttggcggatgaccagccccttgaaacggaagtagacctcccggaacacgcaaatcagcccctcgaaatcgaaaaagctcacgatgtttggtatgtatccgaacatcgtgagcttcaagagcctgtgctggtgtgtctggtgtgtattgctgccggacagatcagatcttgaagagtgtgtcggctgcttcggcgatctcgcgtgatgcggtgagcacgataacgcaatgcttcgggtcaccggtgtgcgccagcttggccagcgcggcgaacacggtcacctcgtcatccgcgttcagccctcgtgtcggctcgtcgaggatcagcacttcggcctcggtgctgattgcacgggcgatggccaccaaacgctgctgcaccaaaggcaacgtgccgacggccacgccgctggtggcctcggagaagccgaccttggccagcagttcgcgggcgatcaccggcttgggcttcaggaagttgcggttggacgcatccatggcgtacagcacgttttgttcggcgtcgagattcggctgcacggcgtgcagctgcggtacgatgcccagacggtggccgcgcagttccacgggctcgagctcaacaatgttggcgctcttgttcatcaccgtgccagacaccggcgtggccaaaccgctcatcacgcccatcagcgcgcgacgtttggcgtcggcggtgatgcccgaatcggggtcgtcgctgatcagcagcgcgtatgcgtgtccggagtagcagaagaaattcgcgccatcgaggatgttgaccttgcccttggggccggcgaccgtcaccttgttcagggcaaaggtcgggtaggtcttgagcagaatgtcgtcggaaccgccgcccaccaacacgcgatcgatacgcgaggccagcgtcatggtgggttcggccgctttgccctgaggctccgcatgctcggccaatgcgtctttgtgatcggttttggccagtcggagtgtttcgttgacgcgggcggcattgcgctcggtcacttcggcggatgcgttggccgaagcgatggcgtctgcttcggcctcgctggtctcgtcggttgctccggtttcggcagatgccagtgcgctgtaaataccatcgtcaacagtgccttcgtcatcaacgtcatcgaaggtcacgctgaactgcacggagtcagccggaacggattcaatggcgtcgttcgtctcagtctcagaagtcacttcgtcagccgttgcgtcagtggtcttctcgagttcctgatcgttgttcttgtcgctcatgcctgtgcctccgcatcgtcggttgtggtggtcgtcttattggcctcgccagcatcatgagcggtggcctcagcagcttcatcggtctcagcagcgccagtggtttcggccgtttcaatcgcctcagtctcgctcacggtgccccagtcgccatcggcggcgaacagcttgttcgcgctgaagaacgcaaggcgcagggcggcaagaatcgccaggatcaggattgaacccagtccataccagaccatggtccaaatcaggtccgatgtcaccgggatggcatggccggatgccagagcaggtccgatcggcttggcggcgaacgcgcctccgaccagaccaattacgtagaagggcagggtgacgatgaacacttccagcatgaactgccatcccaaacgcccgcgagtgacgccggacaccagtgccatgccgatctcgtcgtcacgcttgggcgtccacacgcctgacagcacgaggatgagcaacagcacgccgcccacggcaaccaacgcaatggtgccggtcttcgcgcgcgaggatagcgtatccagcggctccagagaagcgttgtaggattccagcgaaggggaagacacctcgtatcccttggcgggcagcttggacttcttgagggtggataccaaggacttgtatgtagcgggatcaccggtgtcgaacaccacgtccagatccggcaccgcccagccggaggcggtcttgtcgttggactgtgggtcgagtccggccttggcgaaggtctgatagttggtgaagatcgcgttctcgcggttgcgggcggccgtcaccggattggcgacggcagattcggatgtgtacttgtagatgccgcgcaccttgagcttggccgtggtctgggcgtccgaggcggccgccaccttgagcgtatcgcccaccttcaggttgttggcggaggcaaacgcttcagagaccagtgcgccggtggtgttcgggttggaggacttgttgtcgtagctcaggtccttgccgtccacgatttcgaaggtaccgaggtcgctggccttggcggcatcctcggtccagaaggctcgccaaatgagctggccgccggtctcatcatcggaggccgagcccagcgatccgccgtccagggccttcaaatcaccgctcacgtgggccggcacggtttcggtaaccgtaaagttcaacgagttggtggccgaccggacgagcgtggcgtattcggtgtatgaggtccacgtcatgtaatgcttggtggaagccgagtccgtagcggagaccttcttccacgtagccgcagtcgggcgaatggccaacgtggccttctgctgatcgtacgcggtggtgtgtgcgttggtatcttcttgaatgatggccagtccggcgactgtgccgaaggtgaccgccaaggtgatgaacgcggtcagggccgtacgtcctttagaacgtgtcagggcccgccaggcgttgctgaggacgaacatctaattgcctctcccgttctcctaagccgaacaaatcaatacggctttaactattgttgcgtttagtgaccgttttcttgcgcaatactgttatactcctcaatgaagtctgagaacattctgacagcgatgtggtggtcatgaggggatttgcacccggtatgggataaaccctcggtctatttcggtggcatcggtacactggcatgagatatgcgtggcgtcacgtgtgctccggcatgtctgcgattccggattcgcccggagtccggcatccggaagcgtggccttgcgccgttggataagagtatgagctgagcagattttcgggtaggataagtatgcgattcacttcagggcattcgagccataaggctgtggggcgtaggagaagccgccatgccggtaacgggaaatccaatcgctccgcatctacgaatagcgttgcaaatcagcagacgggtcccgtaaacctgaagactccccagcacgtgggtggcgacggccgttcgctgatcagccgtacaccgatatgggtgcgagtggtggttgtactgctgctgacgttgctggccagcgtcacctgtgtgggcacgctctacgcggcatccgtctcgagaatggccacggatgcgcagcgtgtgctgacatccgccgaaagtctggccaattcggcacttggctgcggcagcgataagagtctgtcggacatctcccaagagttggtcaatgccaccagtgatctcaacgaggagctgaacggcccgcagtgggacttcttccgcgaccattcgcgatttggcagcgacatcaccgctgctcgcgaaatgctggcttccgtggatacgctggtcaacggtccgttcactgatctgctgaacctgtccaaacgattgcagggcttctccctgaagaatggctcggtggacgtcagcgccctgatggatatgccggatatcgtcaagcaggtgcataaggatatctcgcagcagctcaccaagctcaacaaggtgccgactccgagcgtcgccaaggtggccaccgtgctcgaatccgaaaaggctgcgctcaagaccgtggattcgatgctcagcgaatacgatggcctcattaacttgctaccgcaactgcttggcgaggacggcaagcgcacgtatctggtgatggtgcagaacccggccgagctgcgttcggcgggcggcatggtgggcaccatcgccgcaatcacggcagataagggcacgattaccatcggtgatttcgccaccacttctggttgggacattcctgagaagccaatggatgctacggtgctgaaggagcgccaggtatttggcgacacttttgaccagtacccggccaccacgaccatcgaccccgaattccagcgtgtggcacagatgaacaaatacatgtggctgtatcagaaaggcaacgaagacgagaacgtagcgggtgtattgtcattcgatcccgtattcctccaggcattgctgggagccacaggcaaggtcaagctttcggacggccgagtgctggatggcaccaccacggtgccgttcttcgcttcagacctgtacacggattacccggacttcgagcagcagaacaacttcgtttccgaagcggctcaagcaattatgaaccatgtgcttggcaacgcgaatgcttccaccgcatccccgctgttgaaggcaatcagagataccagcgctagcggtcatttcaagctatggatggctgatccggatgagcaggaggcgctgattgccaccggacttatcgacgataaggccagtggcgagttgtctgctgacagtcaggtacctgaaaccggcatctatctttcggagctgcagcaaggcaagcaggattggtatctgaagacctccaccacggtcacaaaaacctgcggcgacgcctcggccagccggaacgccctgtattctggcgtgctggataagcgcatcacgacagctgtgcgtaacacgcagctgggtcagtttacggaagatcagctcggtgacgaatacacggtcaccttcaccatgaagaacacgctgactaaggctaaggccgaatcgttgcctgatttcgttaatggcggctcggagaatccagtgctcggtggcatgctgtaccgcgtggtgcttaccgccccgtacggtggcgaaatcaccgctgtgcaggctgatatagattcatggggtaccaacaccgcgagcctgtatgaccgtcagtacattatgttcaaccagcagtggatcgagcccggaaaagaattgacgattgcctataccgttcgggtcagcagcgatgccacacatccactgaacgtggtaaccacgccggtggtgaatgcggatggcgtcgagacgggctccaacggtaaggtgacggatgagtgcccggccgatacgaacggcgccgatggtgcgaacggcgccgatggtgcgaacggcggcaagaacgacgcgcataagggcgcgtcctccgatccctcggccggcctggacaccttggacaagctgaagagccagatcagctgcccggtcgatctgaagtccctgacgggatccatgtgatgaccatgcccgattccgtttccggcgtcgccgtttccgacgccaccgtttccggcgtcgccggcaggccgcgcgacgtgaactacgatctgctgcgcgtggtggcgatgtgcctggtcatcggcgtccacgtgatcaacaactacatgcccgtcaagatggccctcgccggcagcgcggaaacggtgcgatccgtgctgttcgcgttgttcatggtctgcaatccgctgttcattatggtgtcgggccggttcaacctgacattcgatgccgaccggccggtgagcacccactcagcgggccgtctgccgggctctggctctgatgcccgggcaggcggcggtgccggccaagccgatcccagcagcctcgcgccgtacgtgcgctactactacaaacgtttcgtctcgctgattgtgccgtatctgctgtatgcgggcggcatggggttcgtcgcctacctggtgattgatcatcgttcggttggcggcgctgtgtctggaacgttgtttgatctgttttccgggtatgacgattccgtctattggttcgtattcatgctcgccggtttcgtgttggcgacgccgtttctggccgcgatggtgcgcgcgataggccggtcgggtgcctggctgctgatcggtctggccgccgccgtggccgccgccgagcagatctgcaatcttgccggatacccgttgacgttcctgcagtcattcccctggcggggactgctggtctactatctgttgggattcgtgttggaatactatccgccgtccacgcgggcgcggcgcggcttgtatgcgttggcgccgttcgccctggc

SEQ ID NO: 2343 - DNA, 27455 bp, Unknown
  R119_18m  MAG No. k141_65843
cgagatttccctgattggcggcggagccagagaaaatgcgtggtgccagattctggccgatgtgttggagcatcccatcgaagtgttcgccaatgccgatattctgccagcagtggcaatggcctcgttggtattcaatgtaccagacctgctgcaatcagtatgcgaatgcactgtataccagccgaatcctgacaccgcacgcacatatgccgacgcataccggcgattcctgagcctctacccgatgctgcgaacgatggattaggaactgagcatcatgaggcaatcagcgaatttggtccgcaaacatatagcggtcaccggactggtgcaaggcgtgggattccgttattttacggtgactcaggcacgtcgacttggtgtacagggctgggtgcgcaattgccgcgatggctcggttgagctggaagcacaaggcagtagcgacgcagtgcaagccttggttgagcaattagccattggtccgcgatggtccgaagtgagtcacgtcgccgtacatgacatgccgattatcgatgagaccgctcgggcatttggcgtgcgtcaataacctgcatcacgaatccacatcacgcacgataatctcacgatacgggtgaacatgggcgttcctcgccgcttaggccccgcacgttggtacgatggggcgttatgagtgagaacatcatgcaaatcattgacctgcgtggtcagaacctgtctcgtgccgaactgctcgccgcgatgccgcgtgctgcaatgggcacttccgaagccaccgatctggtgcgtccgattctggacgatgtcaaggaacgcggtgccgcggccctgcgcgacttcgaggagaagttcgatcacgtgcgcccgaaaaacctgcgcgtgccggtcgaggcgatcaaggacgccctgaccacgctcgactccgaagtgcgcgccgccatcgaggaatcggtgcgccgcgcccgcgccgtggccgccaaccaggtgccgaaggacttctacaccgaactcgccgaaggcgcccgcgtggccgaacgctggattccgattcagcgcgtcggcctgtatgtgcccggcggcaaggccgtctacccgagctccgtcatcatgaacgctgtgccggcccaggccgccggcgtcgaatcgttggccatcgccaccccgcccgcccgcgacaatgaggaaggcctgccgaacaagaccatcctcgccacctgcgccatcctcggtgttgacgaggtatacgcggtcggcggcgcccaggccatcgccatgttcgtatacggcgccaagggcagcgagccgcaggacggcgacatcctgtgcgatccggttgacaagatcaccggcccgggcaacatcttcgtggccaccgccaagtcactggtctccgcattcgtgggcatcgacgcggtcgccggccccactgaaatcggcatcatcgccgatgaaaccgccaacccgagcctgttggccgccgacctcatcggccaggccgagcatgatgagctcgccggttccgtgctgttcaccgactccaccggcatcgcggacaaggtacaggagaacctcaactatcgcgtgccgaagaccgagcacgccgagcgcgtccacacgtcgctgtccggcacccagtctgccatcgtgctgaccgacggtcttgaccagtccatcgacgcggccaacgcctacgccgccgaacaccttgagattcagaccaaggatgccgatgctgtcgtcaagcgtatcaagaacgccggtgccatcttccgcggcccgtactccccggtgccgctgggcgactacatgtccggttccaaccacgtgctgcccaccggcggcaccgcccgcttcgccgcaggcctcggcgtgcacacgttcatgaagccggtcgaagtcatcgaatacgacgaggaaggcctcaaggctctcgccgcccgcatcaacgccttcgcggtgtccgaggacctgcccgcccacggcgagtgcgtgctctcccgcttcgtcaaggatccgtatgacaaggccaccctgcgcgagcaggagaggggagccggtctgcgatgagctcgattcccgaaaacctgccgctgcgcaacgacctgatcggtgaggagccgtacggcgctccccagctggacgtgccggtgtgcctgaacgtcaacgagaacccgtatgcgccggacccggccgtatgcgacaccatcgccaagcgtgtgcgtgaaatcgcccccacactcaaccgatacccggaccgtgagcacattgaattgcgtcaggcattctccgattacctggcccgtgaatccggtacccgtctggacgtggacgagctgtggggcgcgaacggctccaacgagatcatgctccagctgttccaggctttcggcggcccgggccgcaccgcactcggtgccgacccgacgtactccatgtacccggagtacgctcgcgacaccttcaccggttggaagctcgcccaccgcaacgccgacttcacgttgaacgtcgacaaggtgcttgaggccatcgccgaggtcaagccctcgatggtgctgctcaccagtccgaacaacccgaccggcaccccgttgccgatggaggatatcgagcgtattctcgccgcctgcgaaaccgccgaagtggccggcgcgggtgagggcgtgcgcccgattctcgtcatcgatgaagcgtacgtggaattccgcaagcccggcaccccgagcgccgtgagcctgatcaaggaccacccgaacctggccgtaagccgcaccatgagcaaggcctttgccttcgccggcgcgcgagtcggctacctagccgcatccaagggcatcatcgactgcgtgcgcatcgtacgtatgccgtaccacctgtccgccgtgacccaggccgccgcactggccgccttcgaacacaccgatgaacagctgagccgtgtcgagcatctgcgcgaaacccgcgaggccaccgccgcatggctcaaggaacagacctacaaggaccagccgcttgaagtggccgaatccggctcgaacttcctgctgttcggcgggcacttcgacaagcgcgaagccatcttcgacgagctcctgaagcgcggcgtactcatccgcgtggtcggaccggacggttggctgcgcgtgtgcatgggtaccgacgaggagatggaaaccttccgtaacgcccttgttgaagcgcttcgtatagtggaagcagcataagggacgtttctttccgattgcggcgagacccgaagcgattcgagtcccgccgcaatccaatatgacgaatcacacaggagacatgatggcaagaaccgcgcacatcgtccgcgaaaccagcgaatcacacatcgacctcgaactgaacctcgacggcaccggcaaaaccgatatcgatacatccgtgccgttctacaaccatatgatgaccgcgctcggcaagcattcgctgatcgacctgaccatccacgcccacggcgacaccgacatcgacgtgcaccacaccgtggaagatacggccatcgtgttcggcgaagctctgaagcgggccctcggcgacaagaaaggcatccgccgcttcgccgacgccaccgtgccgctcgacgaggcgctggccaaggccgtggtcgacatttccggccgcccgtactgcgtgtgcagcggcgagcccgaaggctacgaattctgcatgatcggcggccacttcaccggctctctggtccgccacgtcatggaatccatcgccttccacgccggcatctgcctgcacatgcaggtgctcgccggccgtgatccgcatcacatcgccgaagccgaattcaaggcgctggcccgtgcgctgcgcttcgccgtggaaatcgacccgcgtgtagacggcgtgcccagcaccaagggagccctgtgatggccgacgacaagttcgatccggacgaatcgcacttctccgacgaggagcttgaggccgcgctcgccggattcgagaaagaattcgcggacgattcggcatccggcgatgccagtgataccagtgatgccgataaaacggcggacgctgcttcagcgaagtccgattccgacgcgaatgatgatacggctgataaggcttccgctgattccggccagcctatggccgacgacgtcaccgggtcggtcgctgatgcggtgaatgaggccatggccgacgtggtcgacccctcgctcggcttcgacaacgaactcgctggactgttgggtaacaaggcgaaggtggcgctgatcgtcacccgtcttgcctccgccgaactgttggccgcgttctgccagctgtcggacatctccgccgcatgcgtcggtgccaatcagggggccgtcgcggtgctgaagaatctggacggcgacggcccggaagccgcagccaaggacctgaccaccgtggtatccggcatggccgtgattcttgcagtcaatcgtgccgacaagctcgaagtggccatgtacgtgcagggagaggccggacagagtttcgcgccgcccgtgctgttcacctccacaccgcgcttcgtcgaggacctgatgctcggcatcgtaaccctgaaccaactcaagacccaagggttcgaagtggtggattccgctggactcgaccatgaccaggcgatgcagattctcgccaaccataccaagcgtgggcgtggcggacgcggctcccgcatcgaatagacgccaaccaaccagtaggggataggagagaatatgaccacagcggttgttttcgattacggtttcggcaatgtacgttccatggtgcgtgcgctcgccaatcttggcgtcgacaccaccctcacctccgactaccggcagtcgttggaggccgacggtctggtcgtgccgggcgtgggcgcgttcgccgcatgcatggaaggactgaagaaggtcgacggcgaccgtgtgatctatgatcgcatccgcgccggccgcccggtgcttggcgtgtgcgtgggcgagcagatcatgttcgaacacggtctggagcacggggcccatgccgcgggcatcgggctgatcggcggaacggtgaacctgctggacgccgacgtggtgcctcacatgggatgggacacgatcgaggccgcccccgattcggtgctgctcaacggcgtggagaatgaacggttttacttcgtgcactcctacgccgcgatggaagtgaagccggcggatacgtcccgcttcgacattgatctgagcggtgcgcccgaacgcgtgagctggtgctcgtacggccggtcgcgtttcgtggccgcctacgaacacggcccgctgtccgccacgcaattccacccggaaaagtccggggacgctggctcccagctcctcaagaactggatcgccacgctgtaaaaagcatgaagctcccctctgacgagagagctcaaattatgtataagtaactgaagaaaggctcttcttatgtcgttgactctgctgcccgccgtcgatgtacgcgatggcaaggccgtgcgcctgcgccaaggcgaatccggttccgaaaccgattacggttcgccgtttgaggccgcccgtacctgggttgaggccggtgccgaatggattcacctggtcgaccttgatgccgctttcggtacgggcaacaatcgcgatcagctgcgtgaaatcgttcatgagcttggcgaccgcgtgaacatcgaactgtccggcggcgtgcgcgatgacgcttcgttggacgcggcccttgaggccggtgccgcccgagtgaacatcggcaccgccgctttggagaacccggattggaccgcttcggtcatcaagaagtacggcgaccgtgtggctgttggtctggatgtgcgcggtcacacactggcggcgcgcggctggacgcgcgaaggcggcgacctgtttgagaccatgaagttccttgactccgtgggctgctcgcgttacgtggtcaccgacgtggccaaggacggcatgatgtccggcccgaacatccaactgctgcgtgaagtcgccgaacgcaccgacgccaaggtcacggcctccggtggtatctccaagctggacgatttgcgcgccatcaaggaactggccgagatcggcgtcgattctgccatcctcggcaagtcgttatacgcacgtgcgttcacgctccaggaagcgctcgcagtcgcgaagtaggcaaaggactcgccttagcgagactgttaagctacctttgctcagctatcgcttcactcaggcctcgcctacggacagcccactgggctgtccgcttaacggctcagcaaggaaggtcgccggatttgaggagctttttgaagacggtgtagtcttcatcattctgttcggcgtagctgacggcgaacgaggcaatggcctgatcgaattcgtcggtgccacccatgtaattggcgatcgcgatcgaatcgccggtgcaggcgtgggcatgcgccaacgaccatgcgcacatgcgcgacagatcgctcaatcccgaagcgttgagattgtcgatatcaatcgaacccttgccattccacaactggcgcacgtaatagtcgcgcggtcggccatcctcggccataaagctcgaccaacccaacagcacatcggccgtattctgaatcagcttctgcccctgaaccacgcgctcaccgtgcgtggcgtacggcgacgcgccgcagtaatgctcgagcacggaatacgtggcctccttcatctgaatcatcatcggatcgtcgatatcacgcgcgatccacaccgacgtccacgcgcgctggcccaccgagcccacgcccaccaccttgcgggccgcgtcctgatagcgcaaatgatcgaacacccaacggcgatcgtcgtacagggaatgccggtagctctcgaacagcgtgtctatacgtgcctgcaacgcatccaagtcggcgtaatcatccagctgatatcggcaccagctcgggcggattggcggatggggtgagatgatcttcgctcatagtcactaccatagtgccgtgccggcatgggcccgaaccatgcctgacatgcggaccggggcatgttgatgaaatctcgcgactcgcaggtgacaaacagtgagatgttaacgcccctcgtaacacggttatggaacgataggcgactatggataaacagcaggagtttgcgctgcgcacggtcgaagaacgcgacgtgcgctttattcgtctgtggttcacggacgtgttgggaacactgaagtccgtggcgattgctccggccgaactggaagccgcgtttgaggagggtctcggcttcgacggttccgccatcgagggcatgacccgcgtgtccgaagacgacatgatcgttcaacccgatcccgcgacgttccagatcctgccgtggcgcggtggcccgcaaggtaccgcccgcatgttctgcgacattctgaccccagacggcgagccttcgctcggcgatccacgtcacgtgttgaagcgtacgctcgccaaggccaaggacaagggcttcacgttctacgtgcatccggaaatcgagttctacctgttcgaaagccaggacgactggtccaaggccccgaccccgatcgacgagggcggctacttcgaccatgtgccgcgcagcccaggcatggacttccgccgcgccaccgtgaacatgctcgagcaaatgggcatctcggtggaatactcgcaccatgaggcggggccaggccagaacgagatcgatctgcgatacgcggacgcgctcaccatggccgacaacatcatgacattccgtacggtggtcaaggagatttccttggagcgtggcattcgcgccagcttcatgcccaagcccctggccgacgcgcctggttccggcatgcacacgcacctgagcctgttcgaaggcgattccaacgccttctacgaggccggtcaggagttcaacatgtccctgaccgcccgccagttcgccgccggcatcctgtaccatgcggccgaaatctgcgcggtcaccgaccagtacgtcaactcgtacaagcgcctgtggggcggcaatgaggcaccaagctacatctgctggggccacaacaaccgttccgcgctgctgcgcatcccgcagtacaagccgggcaagggcaactccgcgcgcatggagttccgtgcgctcgacccggtggccaacccataccttgcctactcggtgctgctggccgccggtctcgatggcatcgataagcagatgcagctgggcgaacccaccagtgatgacgtgtgggagctcaccgacggcgaacgtcaggctatgggcattcagccgctgccgcgctcgctggacgaggcgctgaagatcatggagaaatccgacttcgtggccgacgtgctcggcgaacacgccttcggctacttcctggacaacaagcaccaggaatgggaggagtacaaccagcaggtcacgccttacgagctgaagaagtatctgccgaagctgtaatcgcaagcgttgcacatgtgccgaaccccgtcgatgattggtcatcggcggggttttctatagcgtgtcgtggtggtgggtagcgggcagaggtgggaatagtgttgtcgctgagttgatacgaaaaacgattgacgtaaccgacgaatcagcttgtagtacgagcgagagcactcaagagagcacccatgacgaacacacctgcgaacaccgcgcgcaccgaccgcttcttcaatctgccggtcaccatcctgatcttcgccagcttcatgctgggcatgagcgaattcgtggtagtgggcatcctgccggacatcgcatccggacttaaggtctccgaagtgaccgtgggtaatctggtggccatcttcgcattcgtgtacgcgccctgcacgccgctcggatccgcattatccgcccgattcccgcgctttctcacctatctgacgttgatgggcgtgttcctcgtcggcaatatcctgtgcgccttcgcgccgaactatccggtgctgctcatcgcccgactgctcatcgcctcggtgtccggcacgctggtggccatctccatgaccttcgcgcccgacgtgaccaccgacaaataccgcaccaagttcattgcctgggtattctcgggtttctccatcgcctctgtggtcggcgtaccggccggcacttgggtggccaatactttcggctggcgtgtcacctttgccttggtttcggtgctcaccgccgtgctgatggcatcgatggcagtgtctctgccacgcaactcacatccggcgaagatcggtttcctgaggcaattccgtctgttcttcgaccgccgcatccagctcggcgtggcggatgtggtctttggcgcagccgcctcctacgtcttctacacgtatctctcgccgatcatgcgcgacgaaatcggtgtgcccgaacgctatatcagcgtcggcttggtggtctacggctgtgcctgcctgtggagcaacctgtacggaggcaagctggccgatcggggcaggggggtcgagccgctgacccacattcgaccgatctactgcgtgcaggccgtctgcctgtgcctgctggctttcgcctcgctggtgccggccggcggcgcactgctgctggtggcgcttggcatgctcatgtatctgcagaattccgcttcccaggtgctgtatatggatgtggcctaccaatcccatcccggttcggtgaatctggccgcctccctgaattccatgtcgttcaacatcggcatcgccatcggctccgcggtcggcggcctggtcaacgacctccttggcctgacctggctcggcccggtcggcgcgatttttgcgttgctggcagccggcaccacgacactgctgcgtccgtacgtcagcccggtcggggaatgacgggtggcgtgacgcgcgggaacgaagggtttttcccgcgtgtccccgcggcatgccttatccgccgattgccgtccattgataacctgctatccaaataaccgataaggccacagcatgtcatcctgctgcgaaaccttaatgttaggacaccggctgcagggggacccggctcacgggcgcccacctgcgcggattgatgattatcggcatgttcagcgtgaaaatggggatgacaatatgacggatgcgactgcgaaagccgcgccgaaggcggaaagacggcggcgcgttctccgttccggcgctcgctcatcgatagtggtcggcggcgccatcgtgctgttcttcgtgctgctggcgccgctggccgggccgttgtcggccatcaccggcaacgacccgtacgccgagcatcccgaggccttgggtgccgggtcggtgccggccggattcggcggcggcatcagtgcccggcactggttcggcgtcaccccgctgcgcggcgtcgacctgttctccatcgtggcgtacggctcacggatctcgctgggcatcggcgtcgtctcgtcggtcatctcgctggtcatcggcgtggcgctcgggctgctggccggctatttccccgggttggtcgatgcgctgatctcgcgcacgatggacgtcttcttcggcttcccgttcctgatcttcgcgatcgcgctgtcggcggtggtgccgcagggcttcccgaggccggtgctgctgacgctagtgctcggattcttcggatggcccggcatcgcgcgtcttgtccgggggcagacgctgacgctgagcaagcgcaatttcgccgtcgcgtccaaggtgatgggcgcctcgcctgcccatgtgctgtggcatcagatcctgccgaacctcatgccgctgctcatcgtcaacatcacgctgtcgattcccgggcgcatcggcgccgaggcgggcctgtcgttcctcggcgtcggcatgaacccgccgacgccctcatggggccggtccatctccgacgccgtgcagtgggccctggtcgacccgatgtatctgatcttcccgggcgccgccctgttcctgctgaccttcggcttcaacctgcttggcgatggcctgagcgacgccatcgacccgcgcaagggggtgcgtgcatgagaatcctgcaatacatcggcaagcgcgtggcgagctcgatcgtcgtcatcctgctcatcacgctggcgctgttcctgatcttcttcctgctgccgaccaatccggcgcagctgtcgtgcggcaagccatgcacgcccgagcagctgcagcgggtctccgccttcatgggcaccgataagccgtggtacgagcagatgggcaattacgtggcgggcatcttcgtcgggcgcaccttcggcagcggcggcggcgccgtggtctgctcggcaccatgcctcgggtattcgttccgtctcaacgaatcggtgagccagctgatcctcgaccgcttcccgatcaccgcgtcgatcgcggtcggcgcggccgtgctgtggctggtcatcggcgtggcgaccggcgtgtgggcggccctcaagcgcgatacgctgatcgaccgcacgctgctcgggctgtcgatcgtgggcgtttcggcaccgtcatacctgatcggcctgctgacggtgatcgccttttcgctggtgctgcagatattccccagcggcgggtacgtgaacttccacgacgaccctgtcggctggttcacgcatctgctgctgccgtggctggtgctggccgtgctcagcgccgccggctacaccagggtcacccgcacgcagatgatcggcgagctgagccaggactacatccgcaccgcccgctccaagggcgtgcccgaatcggtgatcatcttcaagcacgcgctgcgcaacgcgctgctgcccgtgatgaccatgttcggcctcgatctgggcgggctgctcggcggcgcggtgctcaccgagaaggtgttctcgatgcaggggctcggctcgctgctgctcgattccgtgtcgaacctcgacctgcaggtgctggtcggcgcgacgatgttcgccgccgtgctggtcatcgtcgccaacctgatcgtggacatctgctacagcctgctcgaccccagggtcgcgctcggcacgaagtagtgcggctgcggccgcaacacgcgatacttgccggtctgctccacggaccggcaccgatagagaggaaaaccatcatgaagaacaacgcatggcgcgtattcgcggcgggggcttgtgccgcggtactggcgctgtccggctgcggcgcgtccaacgacaacgccgccaccggctcggcgagcggcaccaccgtcaagggcggcacgctgaacgtgctgctgtccagcacggagatggatctggacccggccaagagccagggtctgccgaccaccacgaacggcaacatcttccgccgcctgaccgcgtggaagatcaccgacaagggcgagacgaaggtcgtgcccgatctggccaccgacaccggcaagtcgagcgacgacggcaagacgtggacgtacacgctcaagaacgggctcaagttctccgacggcacgcccatcacctccaaggacgtcaagtacgggctggagcgttccttcgccgactcgctgaccggcggcctgagctaccacaagacgctgctcgagggcgcgcaggactaccacggcccgttcgacggccaggagctcagctccatcgagacgccgaacgacaagaccatcatcttccacctcaacgcgccgttcggcgactggccgtgggtcgtctcgctcgccgcgttcacccccgtgcccgacggcaagggcccggcgtccggctacggcaagctgccggtggcctccggcccgtacaaggtcgagtcgaacgaggccggcaagcaggccgtcttcgtgcgcaacacctactgggacaagaagaccgatccggtgcgcaccgcgggccccgacaagatcgtgttcaagatgggacaggacacctcggtggccgcccagtcgatcatgcagggcaccggtgaaggcaagaactcgttcctgtccggattcgtgccggccgcgcagctcgcgcaggcgcaggccaacccgaactacaagaagctgctgaccaccagcggcgacggcgcgctggaatacctcgccatcaacacccaacacgtgaagaacgcgaagattcgccaagcgctgcagtacgcggtcgacaagaaggcctaccagacggcttccggcggcgagatcgccggcaacttcgccaccacgctcattacgcccggcatcgagggccgcgaggactacgacctgtacaaggccgatccgaccggcgacgtggacaaggccaagcagctgatcaaggagtcgggcgagcaggccccgaccctcaagctcatcgccacctccgctcaggccgaaaccgcctcctcgatccagacgagcctcaagcgggccggcgtcaaggtggacatccagacactcaacgacgatgtgtattccgatacgctgaccaacgacaagggcgactacgatctggccatcagctcgtggcagcccgacttcccgtcgccctacgccaacatctccccgctgttcgactcctcgcagatcggccacggcaactacaacctggcccgttacgcgaacccgaaggtcgacgagctgatcaagaaggccaccgagaccatcgatcagaccgaggccggcaagatctgggccgaggccgacaagacgatcatggccgacgcgccggtcgtgccgctgatctattcgaagaacacgttcatccacggatcgaacgtgaccaacttcgtcatcggcaacttcccggcgtacccggactacacgcaggtctcgctcgccagcgcgaactgagccggcatccgcatccggcgcgcgccggcggcatggtccgctggcgcgcgcgccggacgcattccaacgcttgtgcatccaaggagcttccaatgagtgaaccacgcgcgatcgtgaccgtggacggtctggccgtcagcttcgacgagcgggaggtgacccacggcgtcagcctcaggctgttcccggggcgcatcaccgctctggtcggcgaatccggctccggcaagtcggtgacggcgatggcgctgccccgtctcgatccgtcggtggccagcgtgaagggccacgcgtacctcgacgacgcccttgtggatgacgggccggactccggtccgggcggcgacggcaaggacgccgccggccgcggcatcgatctgctggccgccgacgcgccgctgcaacgcatccgcggcgaatacatcggcacggtgttccaggaaccgtccaccgcgttcaatccggtgttcacgctcggcgtacaggtcgcggaatcgctcaaataccaccagaagcagctcagcgccgccgagcgcaaggccaaggtgctcgaacagctgcgcgaggtcgggctcgacgacgccgaacgcgtgtggtcgtcgtacccgcatgagctgtcgggcggccagctgcagcgcgtgatgatcgccatggcgatcatcaaccgacccaaggtactcatcgccgacgagccgaccaccgcgctcgacgtgaccacgcagaaggcgattctcgccctgatctcctcgctggcggtcgacctcgatctggccgtgctgctcatcacccacgacatgggcgtggtgtggcaggccgcgcaggacgtgtacgtgatgcacaacggcgtgatcgtcgagcaggggagcgtcgcgcaggtcttccgccacccgtccgacgactacacgcggatgctgctcgacgccgtgccgcgcctgcgcatcgacgagcatgcggcagacggcgaacatgcggccggcggcgaacgcatcacggaaagtgacgcgctcggcggcggcaggcgcatcacgcaggtgaacgacgtggccgtgtcgtacaaggccggcagcttcgccgtcaaggacatctcgttcgatctggtggccggcaggacccgcgcgctggtgggcgaatcgggagccggcaagaccacgatcgccaaggtgatctccggccagctcgcgccaacctcgggcacggtgctcatcgagggggaggatctcgccaaggcgcatggcaggcgcaagcgcgagatcctgaagcatatgggctatgtgttccaggacagcggatcggcgctcaacccgcgcaagtccgtggcatggagcatcggcgagccgatgctcgtgcagggcgggctcagcgagacagaccggcgcaagcgcgtccttgaattgcttgatcaggtggagctgcccgccgatgtggccggccggttcccgcaccagctgtcgggcggccaacgccagcgcgtcggcatcgcgcgcgccttggcgctcaacccgtcgctgctcatcgccgacgagccgacgtcgtcgctggacgtgaccgtgcagcgcaaggtgctcgacctgctgcgccggctgcagcgcgagcacggtttcgcatgcctgttcatcacccatgacctgggcatcgtgcaggagatgtccgacgtgatcacagtgctgcgccacgggcgcgtcgtggagagcggggagaccggccgcgtgctcaaccatcccaaggccgagtacacgcgtaccctgctcgacgcctccccgaagatcgacctgtgagccgtgccgctcgtcatccggccggttctccggccgtgcggcggggcggcgacggcgcggatgacacctagccttaccgtggtttcggttttttgccgtcccgcccctatcggcgcgcggcaccgaaccagttggtgtatatgagggcgaagttgcggttgccgtagctggagcatgagtcgccctcgccgaacccggccgccagcgaggcgtcgttcggctggtagggcgtgtagatgtagagcagcgcggtcgccttgttctcgatgtacacgttggtgccgccgcacccggcatccgggtggtactggatgtagttcagcgcgttggcgtgatagccgtaggcgctttcatgcgccacatagtattggtagcggtgcgccgccccgtacacctgtctgaagaagccggcataggccggatcgcagttcgcgttgtccgggcagctcagccccatggcggccttgtactggaagtccgtcggatcgacggccgtgaccaggtgctgctccttctgcatcacggtgagcagcaccttctggctgatgccgcacgcgcgcgccgacttgtcgatgatcgcggccgcggtctcctttctcgcgccctcgtacgccgcgcaatactcgttcgccgcctggtcctcggtgtcgaaggtcatggttttcaggcaccgggaaccgctgcacgccgcgccctgcttgtcgaggaacgcctggacctcggcctcgctcatcgcattggcgttgaagaactggccgtccgagatgatgtcgccgggattgaagtcgtattgctgcgtcagctgcagctggcgggcctcggcctcctgcacgtcgcgacgccactggacgacccgcacagtgcccacgaccagcgcgaccacgcatgcggccgccaccacggtgaccagcacagccgcgacgcgctgcgccaacccggcccgcttccaccagcgcgccgggctgagcggatacctgcgattgcgcgggcgtttgcccgggcgacgtttgcgattgccgcctgacacgccccgccccgcgacaatcacgttcgccctgccgcgcggattggccggcttgcgccgttgcgtcgtcgccatcgctacgccagtgccttcttgatgcgctgcaggctcaccggcttggcggtgccgagttcctgcgcccacagggacacgtagaattcctcgagcatccagcgggcggcggtcgcctgcttcatcagcgtctcgtggcgggggccggccggctccgccttggccttggccatcgccttgtcgaccagcgtgcgggcctcgtcggcctcccacgcccatcgcacgtcgcggttcttgtcggtcttcgccttggccaggcgcatgagatcggcctgcaggtatcgggagatgttcgccagcgcgtccgggggagcggcgccgacgaatccggggaacaccagcgtggcgatgtgctcgcgcaccgactgcagcaccgacagcatcggcaagtcggccttgccgccagtggccttgtcgacttcggcataagccttgagcacggcgatcacgtcatgcgccacctgatagacggtgtcctcgtacacttcgcgcacatcgagcaccgcattggccaacgcctcatcgtccgagagcctgtcgacattcggcatcagccgtttgaccgtggccagctgcaggtcttcgaccagatccttggtgaacttgtacggagcagaagccagcatcaacgcctcggtacccagccagcgcgacgaaatgcgttcggccggcaaccgcagcgcatccaatgcgccacgccagagcatcgtggcccgggactcggtggtggcacccgccttatgcaacaggttcgcctgactgaccagcttgccctgttctccagcctgatcggcctgcttcttgaccatttgacgggccgacgcctccgcctgcgcggcgaacttgcgttgcagcgccttcagatccttggacacacccagcaccttgacggggccgcgcgcatgccggcgtccacgagggtgcttgccggccggcagttgctgctccaccgagaacgtgaccctgagatacggggaaagacgctcgaccagttccggccccagcacttcgggatgaatctgcgcacccttggtggcgatggccgccttggtgaacacatgtgccaaatcaggccagccaacggtcgtgccatcctcatccaccggcggcagattcggcttctgctgcgagcccgagcccggcagatccgggtaatgctcgtcgatccagtcacgaatcgcacgcgcggcatccggagccggcacgaactggacgcgcagctgcttgggcagcgccttgatcatcgacagaatcagctcatccaacaggcccggcacattccatgtgaactggtcgggcgtgatacgcgagagcgccttcaacggcacatgcacggtgacgccgtcggccgggtcggccggatcgtatacgtagctcaaacgcaggtcgatgggttggccgtccgatccggtcgtatgccaatggtcggggtaatcgtccagactcaccgaatcgctggatgccagacgctccaccttggccgggtcgaaatcaagcagattcggctgacggtcatgctcggacttccaccatttcgccagatcggccacgctggtcacatcgttgggaatgaccgcgttgtagaagtcgaacagatcctcgtcggacacggtgtccgccagctggcgggtgcggctcgcgtcatcggcggcatcctcgagaatgtcacggtttttgcccacaaagtcgtcgtaactgaagcgctgctgaatatcgccctcgaccagaccctggcgaatcaggaagtcgcgcgcctcaagcggattgatgcgtccccactgcacggcacggtcctgtacgatcggcagaccatacagcagcacgcgcgcggtggccacagccgagccacgcgaacccgaccagtgcggctccgcatacgtggtgcgggtcaattggccggccaacggttcggcccacgccgggtcgatggccgccgaatagcgggcccacaggcgagaggtctccaccagttcggtgctcatcacccatgacggggtcttcttggccacggcggaggcggggaacagggcgaaacgggtgccgcgcgcgccctgataatcgttcttcgactgcttctgggcgcgtttcatcgcacgggcgcgcgccgcaccggtcagccccgcgaaatcggaggccttgggctcacgcaccacctgcatgcccatcatcgacagcaatccggcgagcatcgacttgtggatgccatccgcatcccacgagcagcacagcgaatgcgcggcctgctgattcaacggcagctggcgaatctccaagcctgggcgggaggcgggcaacgggtcgccgaccttgaacttcagctccttgcacatctggcgtagctgggagacgagatctttccactggcgtatcctcagccagctgagatactcggttttgcagatacggcgcagcgcgttgttgctcgggtcgccgtccgcttggaacacgcgatcccagatgttcagggccgtcaggaagtcggaggtctcatccgcatatcggttgtggatacggtcggcatcctcacgcttgtcgtccgggcgttcacgtgggtcctgcaagctcaggaacgccacgaccacgagcacctgggccagaagattcggcgaaccggttttcgcggcctcgataaccatacgtcccagacgcacgtcgatggggatgcgcgccagctgacggccggtatgggtgagcgtcacctcgccgcgctttcggccgatggccttgagctcggtgagctcattgaaaccgtccgacacggccttcatatccggcggatcgatgaacccgaagttcgtgacgtcctcggccgtgcgggccacgcccaccgacagcatgtgaagcaccacggcacccagcgaggtacgcaggatttccggctcggtgaagcgcggtcgggtctcgtaatcctcacgcgaatacaggcggatcgcgatgccgtcggccacgcggccgcatcggccggacctctggtcggcactggcctggctgatcggctcgatcggcagacgctggacctttgcggtcttcgaataccgggagatacgggcggaaccggggtccaccacgtagcggataccgggcacggtcagcgaggtctcagccacattggtggcgatgacgatgcgctgatgcaaatgcgattcgaacaccttgtgctggtcggcggcggacaatcgcgcgaacagcggcatgatctcgatggcgtccggtcggcgcatgtcgtcggcgcgcggaccgtaatgatgccgcagtgcggcctcgaactcgtggatgtcgcgctcgccggaagcgaagaccagaatatcgcggggaccgcgctcatgggaggagtggatcaccagttcggcgcaggctcgagccacggccgtgggcatatcggtgatgccgtcatcggcataggagtcgccggaccggccgcggggccggtcggaatcggattccgcgatggcgctggccagctcgtcgtaatcggcgtcgccggggcgggcgcccaccgcgaatcccggcacttcgcgcatcaacgcgggcgcggtgccaagcggctcatagaccacctgcacggggaaggtgcggccggaaacctcgattaccggcaccttctcatgcaaggcgtgctcgaaatgctcctggaacttgaccgaatcgatggtcgcggaggtgatgatgagcttcagatcgcggcgctgaggcagcagtgccgtcagatagccgagcagaaagtcgatgttaagactgcgctcatgcgcctcgtcgatgatgatcgtatcgtattgggtgagtttcggatcgcgctggatctgggcgagcagaataccgtcggtcacgactctcaatcgcgtgctgggcgagctttcgtcggtgaaacgtacctgatagccgacctcgtcaccgagcttcacgcccatctccgaggcgatacgttcggccaccgtgcgcgcggcgatacggcgaggctgggtgtgcacgatctgcttgccgtgcgtgccacggccaagctcaagcaggatcttcggcagctgtgtggttttgcccgaaccggtctggccggacacaataacgacttgggaacgtttgaccgcgctggctatctcatcacgcgcggcagatacgggaagttctgcaggatactcatatttcatgacggacttcaatgatacggaagcccttggagctcgcgtatttgctcgcagtgaacccctcgccgagcgcatcgtccagccaggggatcagcgaatcggagccgagattcttctgcactacgagataggcggcgccgcccaccttgagcttcggcagccaagccataagcaatgtatgcagcgcttccttgccgactcgaatcggtggattcgaccaaatcgcatcaaacgtgaggtcgcccggcaccgtctcgcagaacgccggctggttctcggcgggcaggggagtgctggactcgtccacctgagccgcatgaatgttcgtgcggccgttcgcctgtgcgttggcatgggtcaggtccagcgcacgctcgttgacatccaccgcccacacgttcgcttcgggcgactcaaacgccaatgtcagggcgatagggccccagccgcagcccaaatccaggaaatcgccggtaagcggcggctcgggcgcatgcttcagcaataccgatgtaccgaggtccacgcgcgagccggagaacacgccgttcgacacctgagcggtcgcctcatggccgcgcaacgttacgttcaatgtgcggcgcacatctttcgacgcgggttccgcagagaaatactgttctgccatggtcgctccatttctgcgggattcgccgctctcgtatgccgacctgtatcagccggcctatgccggtacgtgccgatctatgccagcatgtcacctcatgtgatgataataaaggaccatagaagaatcgtgaaccattccaaccaaacgaggcgcacttgaccgacaacacccagtacaccgacatcgaccgcggcaacaacgacgttacccctgaaggtgtgctggccgggcagtccgaagtgctgctcgacgacagccagcgcgcgaccggctggcacgaggacgccaaccaggaatgggaggagcgcgaggctcgcaacgagctcaagcatgtcgccggtctcggcgagctgcaggacgtcaccgaagtcgaataccgcaaggtgcgactggaacgtgtggtgctcgtcggcgtctggtcgtccgccgtcaccacgcaagccaaggccgaggaatcgttgagggagttggcggcgctcgccgaaaccgccggtgcggtggtatgcgatggtttgctgcagcatcgctccaagccggatgcagccacgtacgttggttccggcaaagccaaggagattgccgacatcgtggcgcgtgaggaagccgatacgattatcgtggacgacgacctgccgccgtcacagcgccgtgcattggaggacgcagccaaagtcaaggtggtggatcgcaccgcggtgattctggacatcttcgcccagcacgccacctcgcgtgaaggtaaggcgcaggtggagttggcgcagctcgaatacatgctgccccgactgcgtggttggggtggttcgctgtcccgtcaggccggcggtcgcgcggcaggcgcggatgcgggcatcggatcgcgaggcccgggcgagaccaaaatcgaaatggaccgtcgtgtaattcgcacgcgtatcgccagactgcgccgtcagattcgagagatggccccggcacgtgaggtcaagcgcggttcacgccgtcgcttcggcctgcccacagtggccgtggtcggctacacgaacgccggcaaatcctcgttgaccaaccgtctgaccggttcggccgaactggtggaaaacgcgctgttcgccacattggacacggccgtgcgccgcgccaaaacccgcgacggacgcgcttacgcctacgtggacacggtcggcttcgtgcgccgcctgcccacccagctgatcgaggcgttcaaatccaccctggaagaggtggccgaggccgacgtgatcctgcacgtggtcgatggctcccaccctgacccgttctctcaggtcgacgcggtcaatgacgtgttggcggacatcgaaggcacggcctcgattccgcgtattctcgtattcaacaaggccgatcaggcggacgaggcgacacgtgaacgactcgccgcactgcagccggatgcgttcatcgtctccgcctataccggtgagggattggacgagctgcgtaccgcggtcgaaagtctgctgccggtcccgcatgtgcatgtcaacgctctgctgccgtatgccgctggctccctgatctctcgtgtacgcgaatacggcaaggtggacaaggtggagtaccgcgatgatggcatacagcttgaagcggacgtcgacgcccatcttgccgctcaggtggtcgaacagtccattgactaacgtgataaacatcacagtttgtttgtgagcgctaacaaccgttggaaacattaccataccgttatcagacagggtggtgtgctggtagcaaaacgtcttagcgggtttatagagtgaaaaccgttagttacaaggcctgccattcatcagcagaccgcctttgaagagaggttcatccatcatggcggaaactaccgttaagcccacgaagcttgctgttattggtgccggtgccgttggctccaccctcgccttcgccgctgcccagcgtggcgtcgctcgcgagatcgtgcttgaagacatcgccaaggagcgcgtggaagccgaagtgctcgacatgcagcacggctccagcttctacccgaccgtgtccatcgacggttccgacgatcctgagatctgccgcgacgccgacatggtcgtcatcaccgctggtccgcgtcagaagccgggtcagtctcgtcttgagctcgttggcgctaccgtcaacatcctcaaggccatcatgccgaacttggtcaaggtggctccgaacgccatctacatgctcatcaccaacccggtcgacatcgctacccacgtggctcagaagctcaccggtctgcccgagaaccaggtcttcggttccggcaccaacctggactccgctcgtctgcgcttcctgattgcccagcagaccggcgtcaacgtcaagaacgtgcacgcctacatcgccggcgagcacggcgactccgaagtcccgctgtgggagtccgccaccatcggtggtgtccccatgtgcgactggaccccgctgcccggccacgatccgctcgacgccgccaagcgcgaggagatccaccaggaagtcaagaacgccgcttacaagatcatcaacggtaagggtgccaccaactacgccatcggcatgtccggcgtcgacatcatcgaagccgtcctgcacgacaccaaccgcatcctgcccgtgagctccatgctcaaggacttccacggcatctccgacatctgcatgtccgtgccgaccctcctcaaccgtcagggcgtcaacaacaccatcaacaccccggtctccgacaaggagcttgccgctctgaagcgctccgccgagacgctgaaggaaaccgccgcccagttcggcttctgataaaaaatcgctgtacggagcgcctttcacaccgcacaaggttcgaactacctttgtaggccttcaccttgtgcggcacgaaaaatcgcacacgtacagcgattttttataccctgctgaatgcttccagagggagcattttttattcgtggaattcgttggaggagggggagctatagccctcgggctcaagctggaaggtggtgtgggggaccgagaccgggaagtgctcgcgcaggcaatcctgcagttgggtgaggattgtggcggcatcttccatggtgaggtctttgtcgactaccacgtgggccataagaatcggcatgtcggtggacaccgtgctggcatggaggtcatgcacggcaagcacatgcggcacgtcttccagatgctcgcgtaccttatcgagatcaagaccatccggtgtttcctccagcagcaccttgaccgcgttgtgcagcagcttgatggcgcgcggaatcatcatcagtgcgatgacggcaccggccacggcgtcgaagccattccatccggtggagatcattaccagggcagaggccaccacagacaccgagccaagtgcgtcgttcattacctcgaggaacgcggccttcatgttcatgttgtcttcgcgctgcgaggcaaggatgaagatcgagatgatatttgcgacaagacccagaatgcctacgaacagcagcaagccgatatcgtcgatttccgctttggagccgccgaacagacgcatgccggcctctaccaacgcatagatgccgacgataagcaatactacggcgcccgcggcagcggtgagcacctcaagcctggcccagccccaagtacgagtgttgttgggcttgcggcgcatcagtatggcggtgattgtggatgccaccagcacggacatgtcggtgagcatatgaccggcatccaccagcagggccagtgagccggttaagacggccgacaccacttcgatgaggaagaccgaaccagtgacggtcaacgtggcaatcagcctgcgctggtgcgcggcagggtttacggatgtggatggtgcgggtgtatgggtatgggccatatgtactccttcgctctatcgagttgaaaccgcttctcaataccatttgcgatatggtctgaatacgacgaaaccccggcgcgaggccggggtttcgtaagcagtgtgcgactatagcacgaccagcgcgattcagcgcacgctgatcagctggtggcgaacaggctataatttgcgcagtacggtgaccaccttgcccataatcgtggcatgtgtgccgtcgatgggcgagtatgcggggttgtgcggcatcagccagacgtggccgttttccttgcggaaggtcttcaccgtggcctcgtcatccaacagagcggcgacgatatctccgttgacggcggaattctgttcgcgcaccaccacatagtcgccatcgcagatagcggcatccaccatggaatcaccgtggacttccagcatgaacagggtgccggagccggtcagccgttcaggcagacgcatgacgtcatccacatgctgttcggcggtaatcggcacgccggcggcaatacggccaacgagcggtacgtcatgtgattcggcaatggcttcggcggggaattggtatatctccgccacattgctggcgctggttgcctcttcgctggcttgtgatggcttttcggcattcggggcggatcctgccatcacctcgatggcgcgacccttgttcgcgttcatgcgaatgaagcccttgtcttccaaaacttgtagctgatgcttgaccgaagacggacttttgagcccggcggcatttccgatctcccggaaagagggagcaaagccttgttcgtcgatatgcgtgcgaatggcgtccaacactttgcgctggcggtcggtcagggtggactcgtccggcttctgcttgggggagaggggaatggtgctcacgtcagggctcctttcgttatgtcaccagcataacgtgttgttcgtgtgaaatcaaacatctgttcgagtttcgacttgaccgtgtcgaacatttgtgccattataagaacagttgttcgatagaacatctgttcgagagaggtggtcgtgatgactggttcaatggtgatggccccggcccgtagcgcacgtgtagctatgcagcatgctggaacgtcccgccggaatgtgcgtgggcggattatcgcagtgatgatcgccttggcgctggcctggtgtggtttcggcgcgcttaccgctcagcgggcccaatcagatacgggtgccacgcaggtgaccagctatatcgtgcggccgggggatacgctctggtcatatgcttcggctattacacctgctggccatgatgtatcggaaacagtggatgagctgattacgctgaacaatctcgagtccggaacattgcaggccgggcagcgcattattgttccggttgagtaaatgaaacccgagcggcatggtttttccgcccgtacacgttattctggagagcatgcattgccctttttgccagaaccccgacaccaaagttattgatacgcgcattagcgatgacggtcattccatccgtcggcgtcgcgtatgcccgaaatgcaacaagcgttttaccacggtggaaaccagtatgctgctggtcactaaacgttcgggtggcgtggagccattcagcagagacaaagtgatttccggcgtacgtaaagcctgccaggggcggccggtcagagaagaggatctgaagctgctgggacagaaagtcgaagaggatcttcgctcccgaggccttgccgaagtcacctcagatgaagtgggcaaagccatcctgaaaccgttgcgtgacttggatgtggtggcgtaccttcgattcgcgagtgtgtaccagaactttgcaggtctggaggatttccaaagcgccattgatggtttgcgtgaataatatgcgaatgccatgcaccgtgatatgcgagtgattcgcaaaccatggtgcgaaccaatcatgaagccctgcacttatgaaagagacccgtcagcgacgggtctctttcatatcaatcgaggatgagctgcgtcagctgatgacacgcatgcgaacggtgccctcgatgttgcgtagtgcttcaagcgtggcggcgctgggcttctgagccacgtcggtgaccacatagcca

SEQ ID NO: 2344 - DNA, 4228 bp, Unknown
  R119_18m  MAG No. k141_68173
accactgcctacaatctcacggacacgttctttattggccagcttggcaccgcgcagtccggcgccatcggcatcgcgttctccatcatgaccgtgatgcaggcgctcggcttcttctttggcaacggcgcgggcaactcgatgagccgcgaactcggcaaacagaacaatgagcgcgcctcccgactactggccgtgggcttcgcgggtgcggtgctctctggtttggtgattgccacaatcggattgctgaccctgcggccgctggtcgtcatgctgggatcgacctcgacgatcgccccatacgccgtgcaatacctgacgccgttgttggtcgccgcaccctgtgtatgcgggtcgttcgcgctcaacggactgctgcgataccaagggcaatcggcgttcggcatgatcgggctggtttcgggcgcattgctgaatttcctgctcgcgccgttgtttatcttcgtgctgcacctcggaatttttggtgccggcctggccgccgccatctgccagacggtgagcttcacgattctgaccacaatgagccgcaaattcggcgtgatgaaactgtccctgcgcaattgcaggccggatgtgctgctcatgcgcgaagtggccggcggtggcctgccctcgctgatccgccaaggcgccggttcgatttccgtgacctgcgtgaacattgccgccaatccgttcggcgatgcggccatcgccggcatggccattgtgatgcgcattatgctgggcgccaactcggtgatcgtcggcctcggccaaggtttccaaccggtgtgcggctacaactacggtgccggcctgttcgcgcgcgtcaaagaagggtactggttctgcgtgcggctcgccacctgcgtgctcgtggtgttggcggtgttgctgtgggtgttcgcaccgcaactggtcgagatcttccgctccgacccggccgtggtcgcggtgggtgtggccgcgctgcacatccaatgctgcacggtgattctcaacggcttcaacatgatgggcaatatgatgacccagaccatgggccgcaccggcatcgcctccttcctggccctgtgccgacaaggtctgtttttggcaccgatcgtactgattctgccgatgatgttcggcgtgctcggcgtggaaatggcccaatcggtgtccgacgtgctgacattcgtggtcaccatcccgttcatgcggcgaatcctgcacgaattgcggtagatgtcatcaagattttcgacttccagaccaggtggaccgagcatatctcgctgaatctctgtagtttttccttaccgttgcgttcattaggtcgattatgcgttcattaggtcggtgccctgcttagcatgagataatgagcattggaatgaagccattcttgaaggcagtgttcatcacaagtgacctaatgaacgcataatcgacctaataaatgaatggcggatggctaatacggagcctgaatgcagaatatgaaacgtatgaaagccaaccaggcacacaagtggcctgtgccggagcgcatcgaattgctgtaccgcaccatggctgacgcactcggcccgaccggatggtggccggcggagaccacgttcgagattatggtgggcgcggtgctgacgcagaatacggcgtggggcaatgtgaatcgttcgcttgcggcgttgaacgcggagggtgtgctcgaaccccataagctggtggccatggagccggagcgtttgcaggaactgattcgaccgtcaggcttttatgtcaacaaatccaagaccgtacagtcgctgagttggtggtatgtggagcgttgcggggccgcgcccgagggtgccgcggctatttccgatgccgaattacgggccgagttgcttggattatttggtattggcggcgagacggccgacgatctgatgctgtacgtgttctcgcgccgcacattcgtggccgatacctacgcgcggcggctgttcgccttccttggattcgacgtgccggccggctatccggcattccacagggcctattcgcccgtggtgctggatacgaacctcagtgtcaaggatttgcaggaattccatgggctcattgacgagttcggcaaggcctaccgcgacgacgcggccaaaagcgagtcctttttgggtggatggagggcttgactgcacggcgaatcgttctcaataagaaaagtgtgaggcccgcacggtgccaatcgcacatctgaatccttgactggctgcgctcgatgctgggtgtcgaaaacgagtctgtgacagaatagttcgaccgacacaatcgccaaaacgccgaacaggagccaatgatgaccgaagacaagccgatcgccaagccgattatcgatgatgcgacgcgcgagaaaatggcgcttatgttctctggcgaggtctacctgccggatgatgtggacggcttttttgatctgcaggccgcccagcgtgatctccagctcgaactcaacgccacgccgctgaccaacccgaagcgccgtaccgaactcatgcaggcgttcttcggcgcggcgggggatggtctgtacctcgaatgcccggtgtatgcgaactggggctgcaatacttattggggcgagcgctgttacgccaacttcaacctgacgctggtggacgatggtgagatcttcatcggatcccacaccatgatcggccccaacgtcacgcttgtagccaccggccatcccgtgcgtccggacctgcgctatcagggtgcccagtattcgttgccagtccacatcggcgagaacgtctggatcggcgcgaatgtcaccgtgctgcccggggtcaccatcggggacaacgcggtcattggcgccaactcgctggtcaccaaggacatccccgccaacacggtcgcctatggcagcccgtgcaaggtaattcgcgaaatcaacgaacgcgacgacatctactactggcgcgaccgccaattcagtgagcgttttaagctcaaagagcagtagcgcgaaagctcactcccacacgtcgagcttgcgatttttgtagaaatactcgcggtccttgtcgccgatttcacgcacgacctcgcagggcgcgccgtaggtgacggagttggcggggatggaatgtgtcacgaccgaaccggcgccaatcacgcaattgtcgccgatggtcactcccggcagaatcgacacgttcgcgccgacccacacgttgcgcccgctgatcaccggaatgcaatacgtgtaatggtgctcgcgcagcaccggcaacacggggtggccggcggcgtattagcacggggaacggttgaacgagaagtggattggcatgtggtggtatcgaacatactgatgcgtgtgccgccgagcctgtccagatggctgcctatatgaaccagtgacagaaagcacgggaacgcgagcgagaggagtgtgcatggggcagttcggtgtcatgattggccagttggtcggatttctgatcatgctgatggtcgggtatggatgtgtgaggcttcgattctacggtcagacggcgttggacggcatgtgctcgttgctgctcaacgtgctcatccccgtgcttgtgttttcgaacgccgtcgatggtgcggaccgcgcgcagcttgcctctaactggggcgtgatgctgctgaccgccgtgatgtacgcgctgctcatcctggtgttctggctggtcgccgaactgttgcggctcaaaggttcgcgtagccatgtatttcaggcgtcgcttattttcggcaacgccggattcatcggcattccgttgattatggcactttggccgcagaacggcgcgatttacgtggcgctgatgtcgatcatcgaccagacgctgctctggacgtacggcgtatggctgtgcgagccggtcgacgaagcgactggcggcaacgcgattggcgcgcgaggtgcggtcgtgaacggttcggtgaacggcgccggttcggtgggcaatgctggttcggcgagcaatgccgcaaacggtggttctccggccgtcgtccgcccctcgctaggtacccgcgtcctcggcctgcttaaacgattcgtcaatcccgccttcatcggcgtgatgctcgccctgattctgattctgctcggcgtcaaggtgccggacatcatcctgaagccgctgcacaccatcggcaatatggccacgccgatgtcgctaatctacttgggcggcctgttcgc

SEQ ID NO: 2345 - DNA, 19239 bp, Unknown
  R119_18m  MAG No. k141_68407
cgacgccccggacgcggaccatgcagatgaggaaccgtcaacgccaacaagccatgactctcatactccagagtcggaccaccattcgccgaggaacgaccccggatatccttctcgacagtcttcaacatatccctgaccacgggattattctgatcggaggcgagaagacgccgacgaagatcctcattcttctcatcctccgaaagctccttccaccgcgcgtaagcctcccgcccacgctcagcagcatccgatttcctgctcatcgtcaatcatccatcctttatagatcactgataccaactcgaatggcattagatgcctcagccgccccatcggacaactttcccggtgcctgatgtatggtcttgaaattccataactgatctggatccggaacgagcgtcttgaaataatcctgtggcgaatgcttccactgcagaccaccatccgcagtcggattcacaaacggcttcaccactttcgccgtattcaacgtgtcatacgtcgcgttggcatacgccaaaaaatgctggccaatattcatggtgtcccacaccgtccgacgggtgtcgacagccgcgatattcttcatgtcgtggataccccgaaaatcggtatacccggttcgggcattcataattgtgttgccgatggaccacccatggcctttgctccaacgtctacgcacgacaagcgatgccgttcaacaccacagccggtgaccagacaacccatacccagccaacaccacatcacgcaatccctcatcaacggtagtgggccagcccagaatcaattggactggtccactatggcatcagcaattactcaccgcaacgccccgcaaacaaccctcgttaacgggaaacgagtgcagtcacctcaccgctcgaacgggttcttgcggtacgcaaactgctttctacgctggttcaccgcgacaatcgctccggcgatggcggccaagaccaccagcgcaccgaagatcatcgtgttgcgcagccacggggtgtgggtggcgtactgccaccagttggaggccacgtagatgttgtcgtaggtggacgtcgcctcgttgcctgccttgtcgatcgtgtggatcacgatctcgtggctcttggcgtcggcgtcgaacgtcagactcggcgtggacttgagcgtggcatcgcccttccagctgtctttgagctggccgtcgacatacacttcggtggacttgatgccgaggttgtctttggcgtccaccgatgcgggctgtccctgctggctgtagtacacggtgccggacttgatgccgagcagcgaagcagtcggcgcggtcgagtcgacggcgaagttcacttcggcagtgcccttacggtcggcgttcttcttgtccatggtgttctgcgagaggttgcccgcctcgtccatggactgcacctgcacacggtagaagccgtcggagttaaagcgggatgccggcacggtgtacaccgtacggctccagcccttgtcgtcagaggtcgcgaccttgtagtcgttgttggtgagcgtggtcgccttgtcgtccttggcgatcacgatctggcgcttgctcaggtcaagaccggagacgttgatctccgttatctgcacgtcctgcgccttcttcaggtaggtgccgcgcaggttcgtggtgtccgcatcgaacgtgtaggtggagccgaagcggttcacggagaaggtcttcttggtctcgaacgtgttgccagccagatcggtgccgtgcgccttgatggtgtacacgtcatcgaagtcgaccttgcgttcgaagtccgtgaagtccacggtgcggtcgttggccgcatcggtggtgacgttcttgggcatcttgtcgcccttgagttcgccgcgatggtcgccgaccagcgtgtagctcacgttcttcatgtcgatgttgacatcgttgaagtcgatcaacggtgccacggtaccggcgtacgcggtcttgtcttccacgcggtcgatcttgatctgcggcttggtcttgtcaaccacgaactcgggttcgctcacctcttcggccttgttgccggccagatcggtggcggtggccttgatggtgaagtgcgcctcgcccgtgaatgccacggagttcgtccactcggtggattcgcgcgtgccgccggtgcgttgccagcccgccgggccgggggctgcggtgtccgcgccgttatcgtccttggcggtgacggtgatgaccgattcgtccttggagaagttgcgctcgacttcgcgaatggtagcgttgcgatcggccgcgtagtacttgccgttcttcacgttgttgttgtcgaaggtgagggtcagcttcggagccacggtgtcgaccgtgaactcctcatgaatcgtattcgacgggtgatcgcccggatcggtgtaggcggcgtccacagtccagtcgccgtcgctgtcggcggcgaaggtggccacgtacgtcttcaggtcaccactcgcgttcttgaaggaggagaccggaatggtggccttcttgccgtcgaccgacgtggtgacgaccacacgatcgccctcatacttcttggagaaatcgaagttcgattcggtcagtgtcacggtaccggtacggtgggccttgtagtacttgccgttgcgcacatcgttgttgtcgtaggagactgcgatggtgggagccacggtgtcgatggccacgccgttcaatctcttcagcgcgttggcggcttggttgccgttcacgccttcgtaggcattcagcttgccggtgtcgaccgggttgccggcctcatcgcgaatggtgaggctggtttcaccaaggtagacgcgctggctgtcgccatccatcgtgaagctgatgctgccggcggccgcgtcgcccgcatagacgggagccgggtcgttcttgccggaaagccagttgtcgaagtgcttggtggagaacgcggtggagtccgcagtcacaccggacacattatcgctgatgccgttcagcgtggccgtgaagacatcagtggagaagatccaatcccacttcttcggtgcttcactggaagcggtcaggtcgcccagcttcggagcggtccagtcgagcaccacgtctttggactgggtggatgcctcattggcctttgcctgtagaccggcataggcgaagtgcagcgtgtaattgccttccacttcgttggtcttgccgttgatcaacagcttctggccggagagcgtccacgtgtagccatcgccttcagtccactgtgcatcgctggcatccaacggcttgatgttctgctcgttctggccaccggtcaacggcgtggtgttcgaagtactaccagcgagcaggttcgtcttgccggcgttgagcttggcgtaaatcgggaaccagtggtcggtgatggtgtaggccaccttgaccttgccacggaagtacttgttgttgttatcactggagtcgggcacggagttgtcggacttggtgaccgcgaaggatgccttggtatcgttgccgttcacatcggcaacgacggcgtcgtaatccttgacattgtcctgaaccggagctttcttgaagctttccttgtccagcgcgttgccgaggttgtcattgacacttaccgtgatcttgctcaggtcgtagaagccttcctgatcaagggtcaactgtcccttgccttcgttgtcgagtgtgacattcaccgtcttgccctcggcaagcgtcttgcccttcagatcagtgccgtcaggaatggtcagcttaacggagtcatccttgatgccggacgtatgggcttcgttcttggcggagtcgttcgaggactggccgttgggcagcaagtccttgatccagaccgtgaacgtctgtgcaccggccttggcgaagaccgtgtagctcttgccttgcacggtggtatcgacgatggtctcgcccttggcaccggccggaccgctgatcttggtcagcactgggcgcttggtgtccaacaggtagttggtagtgccggtgctttgagcgttgaacagctcgacattgttgccgaagttcttctggagcgtcagctggtagtcgccgttgaactgcttgccggtggcatccttgtcggtttcggtccgcttgggcaggtttgcggtgcccagcgtgatgacgctgtccttataggtggcgtcactgatcttgaacgtgaaagacttcgaaccggcgtcgccgtattgcaccgcaccggtcagcaagttggcatcggcatagccggccttgaccacatcccagcggtaggcgaacgcggggtcaccggcgaccttgagggagatgttggtgagatcttccttgtaggtattctgcgggtcagcatcgttgagctgcagagtcgccttcgcggtctgcttgctcacgcccagcgtatccggcagctgcttggccgcagcggccacggtggtatcagtggacttggccagtgcggccttcaccgtggccaatgtggtttcggcatcgctgacattgggcttcgtggtcgccttatcggtggctctgagggatacgccggccagcgtgtacttgccgtcctggtcgccgagcgtcagttggaccttgttggggtcgttgttcacacgctgaagttcggtccacttgccggtgaccttatcgccattccacgtggtgtaatcgaccttggcttcgacctttgccagaccagaggtttgtgcatcgtctttgccggcacctgttgccgtggaatcgggcagcagatcgcgcgcgtccaaagtgatggtggcggcagaacgggacacgacactgatggaatcgtccttggtggaggtcagttcatctctgcctgcctggtaggcggcaccggtgaagctcggagcctgcgtatccacgccgaaggtcttggcgttattggtcacgtcacccaacactgccagcaatgtggggttatcggttaccgtaatggcatactggccgtttgtgttcttggcgtcaatcaacggcttggcggcatccgctgcgatgacgatctcgtcaccggcgccgttcaccgtggcaccggccaccgggaatgtgcccccgtacacggtcttgtcaccggcggtcaatgtgctggtgagcaggttcaggcccttggtgccggcaccttcttgcagacccttcagttcgtccgccagccacgggttgttcttgacggtcagtgtgaccttgggagtgccgttgatgtagtcggtgccgcttaccgataccgtggtcttcggctggacattcttgccgatacgaatcttcgtgtaggtgaacttatcgccggcaattgcgtttaccttttcagccttggactgcgtacctgcattgtccgtggcttggatggtgaagtccgtcaaatcgtaggttccggccttggtgagcgggaatgtgtaggtgccgtcaccgttgttggtcaacgtgaccgtggcctgcttgcccgtctcaggatcgataccgcttgcaatcaccttgcccacaccggcaccatcatccgtaacggtgaaggtcagggcacgttctttacggtcgactgcgaagagtgtctttccgaacggaatatcaatgccgccgttcttggagtagcccttccacgcaacggtaggagcggtggtgtcgatggcgaacgactgcgttacagtcggcgtgcccggcagcgcggagttcaggcttacggtgtggttaccggtcttcaggtccagtccggcatcgccgcagtccatggcaccattcgtaagatcagcggcatcgcacaccgggattgtggcaccggtgccgtcggcagccggaacggtcagcaacttgataccgttcgccttgagcagggcgagttcatcggcgaagtatgcgctcgtgctgctcaccgagaagccgccgaccttgctgtaatacgtggtgccgttgttgacagcacccttatccggggtggtaccggtcagattcagggacagaccagtgccggcattcgggtcaacaataacggtcttcgcgtcgagcaaatcgctcaacggcttcgcatcggaagcgctgccgaaccaattggtgaccgtaaccgtggtcttggtcaggtcggtcttgccgttaggcacggtccatgcttcatctgccttgaccgtatcggtcttggtgccgttgccattcggatacgtcacctcataagacacgacattggctgcctcagccgcaaccggagtaaaggttacggacggcgacgtggtcgtgaaccaggtaccgtcggtcgcgtctttgtctttgcctttcagccaatcagtatcaacaacgtcgccgaacaccgccgtatccacggcggcgggcttggtgctgtcataagacaattgaggagccgtgatggtgctcgtgccgtcgccatccttgaactgattcaggtcaatggcggcatctgccgctgtaggatcagccggcgcggcaaccgtcacatcgagcgtaaccggatcaccgctcagagcgaacgccggaccatcattcggctcaacggtgtaggtgtagccgtcctgcacattgcctgtacggtggaagtcgccatacttgacttccttgacgcccaagatgcccacggtcacggtaaaggcaatcttgtctttatccgcaccttcgtattgtccgttacggtcaaattggcccgcggggaaaccatcaaacccagtaatcgtcacgcccagacgaacattcgaggcattggtgcggccatcggtcagcggctgggcattatcggccaccttgccgtccttatcggcggcataccaagccagatccatcttcggcgtagtggcggcagccggctgtgccttgacggccttgaaggagcgtgcggacaccacggagccggtggtctgctcgggcttgaggtcggaagtcgaatcggcgctggctaccacggcggtagcacccatggcaagagccgccacagccacggccgcaccgatcaacgacttgcgccagaaactggaattagttacgaagctcattacttgttcttccctccacgaaccaggatggtacgggattcatcgtcgtcggacgatgcttcattcgtcttgcggaattgcatcagcgaggtctcgccctcgtccgccaattcggcggcggaagccatggacaccggaatctcaaccacagattcgagtgcggccttggtacccagacgggtgctttcgtcttcctcgtccaccacggccggagcggcggaagccttttgcttggcaccgggcactgcggacggcttgtcttcgccggggcgagtaatgccacccttggtgctggcggaacccagagagccggaaccggtaccggtcaccgggcggaattcgatgtcgctggtgtcatgcgtaccggtggtggtatcggaaagggcacccttcttgcgcttgcggcgcgagccttcgcccagattctcggcgttggcccacgaaccggcgcgcactccacgcagttcggcgatctcacgctccgcgcgcttgccggtcagggcgtcacgcacggcgggaatgttgaacttgcggaacagcactacggccacgaccgcaagaatcacggccaaagccaggaatacgactgccagagtcctatagatatcggcgttcacttggcgtcccccttgatatcaacgaaagcgttggcgatggcgtccttggtgggcttttcggcctgttgcgcggctttcttgctggcatccagctcatcggtggtggtttcggtcttgtcggcaagcgatgcggcggcatcggccaaatcgctcatctgctgttgcgtgatgccgtccgcgcggaacttgcgcgggtacacgcgcaacgcgtccaaggtcaggttcgcggattcgaggctgatcacaccgttatcttcctgagcggcggacttcaccagttcgttcagcttgctgaagtacggcttgtacttgcctgaatcggatccttcgttgatcagcggcacgatctccgtgttgaagtcggcgatgtcggcgtagatcttggcgagcttgacgttgctgaagctactctcttgtgccgcgttgtgcatccactgcgaagcggcgcggatgcgggcgtatcgctgtggatcggtgttggcggcggacgcgctttggccggccatcttggagccggagtagtagtaccaatacatgcggccggtgtcgaagctcagctcggcccacttggtggagtccttgcgcaacgagtcggcgtgctggttgatcagcgtgttgtagatctgctcttcgtcgtcgctgaaatcactgtcagcggtgtaacgcttgatcagctgctcgtacggttcaatggcattggtcttgatttccactgcgcgcacgtaggcggcttctgcggcggatgcgtcggtggtctgcgccgcctggttcatccagtagtcgtaatcggtgttctgcgcgtggttggctagcaccaggctgccgccggcgagggccaggcagaccacggaggcgatcgccgtgccgaggaagccccaccacttggaattcagcgccttgcggtatgcggcgtcttcctgcttgtagtgtttcagcgcatacgcgaagtcggcgcaggtctggaagcgatcgtccggattcttgctggtggccttggcaatcaccagttccaagccctgcgaaagctccgggttgatctcacgaatcggcacaatgccgttcttgcgcgggtgtgagccagtcagcaggtagaacagggtggcaccgagcgcgtagatatcggtacgtgcgtccacggtgccgttatcggcgaactgttcgggagcgccgaagcccggcgtaccgagctggcggtcgtcaccgaccagcggcttgctgtccgcatccttgccggtctccagtgcaatgccgaagtcgataagcttgattgcgccctcaggggtcagcatcacattcgagggcttcatatcgcggaagatcaccggatgcttgcggcggtgcagatagtcgagcacatcgcacagctggatgccccaatcgaccacgtcttcttcggactgcgggccttccttcttgagcaggctcgccaaggtctggccttcgacgtaatccataacgacgaacaggctgcccttttcttcgatcaggtcgacgatacgcggaatcgccgggtgatcgaagcgcttaatcatattggcttcgacggtcaggctcttaatgaccaagtcgcgctgcaccggatcagaggcactgcgaatttccttgatggcccattgcttgttcagcgaggaatccattgccagatagacggtggacataccacccttgccgatctgggcaaggatcttgtaccgcttgccgaccaatgtgtttaaccccaccataggtggccctccaacacttgtctcttctcttacgacttccgtgcacgtaccgagccacaaaccactgggagcggtacccacactcctaagttgccacgttacccccgtaaatcgacaagaacaatactgctgtctgaaaatgcgagatggcccggaaccacacgagttccgggccatcttatcgggggtgaggagggttactcctcgatgtcaggctgaccgccctgatcggagtagaaatcatccgggttgaagtcgtcgccgagcttcagatcgccgaactcgagattcgagaagttcaggtcggacaggtcggcgtcggagaaggtcgcgtcgccgagatcgccatcgccgcccagaccgaagttcgggtagatggtgtcgcggatggccttgtcgggctcgaccacggcgttgcggtagcgggcgaggcccgtaccagccgggatgagcttaccgatgatgacgttctccttgaggcccttgaggtcgtcgaccttctcggagagggcggcttcggtgagcacgcgggtggtctcctggaaggatgcggcggacagccaggagtcggtggccagcgacgccttggtgatgcccataagcgccggacgaccgacggccggacggccaccgttcttgacgatgttgcggttgatctcgcggaagcgggcattgtccaccagctcacccggcagcaggtcggtgtcgccggagtcgatgatggtcacgcggcgggtcatctggtgcacgatgacctcgatgtgcttgtcgtggatatccacaccctgggagcggtacacggtgtgcacttcctccacgatgttgacctgggcggcgcgcttgccgaggatggtgaggatcttcttgggatccacggaaccttcgaccagctgggtgccgaccttgatgtggtcgccgtcggcaaccttgagcggcacgcgcttggagacctggtaggtgatcggcttgatcacgccgtcttccttcggcgcgccggaatcggcgtccggggtcaggatgatctggcggccgcgatcgttctccacgatcttgatgctgccggcgaactcggtgatcggcgcctcgcccttcggggtacgggcctcgaaaagctcggtgacacggggaagaccctgggtgatatcggaggccgcggccacaccaccggagtggaaggaacgcagcgtcagctgggtaccaggctcaccgatggactgggcggcgacgataccgacggtctcgccgacatcgaccagcttgttggtggccagggaccagccatagcacttggcgcacacaccgcgcttggactcgcaggtcagcacggaacggcacttgacttcctcgacaccgtgggccacgaggtcgttgagcacgtccatggacagggcgtcgtcgcgcttgtacagcacggtctgtccgtcggccgggtcgatgacgtcggcggcgagcagacgggagtacgggccaccgtcggcggccttgacgagcaccaggttgccgtcgttgtcgcgctcggcgacgcggatgggcagaccggccttggtgccgcagtcctcttcgcgcacgatgacatcctgggagacgtcgaccagacgacgggtcaggtaaccggattctgcggtacgcagtgcggtatcggccagacccttacgtgcaccgtgctgggagatgaagtactccagcacggacaggccgtcgcggtagttggacttcacaggacgaggaatgatctcacccttcgggttagccacgaggcctcgcatacctgcgatctggttgatctgcatcatgttgcctcgtgcaccggactgcacgatgatggccaggttggaggtcgggtcgaacttctcctcgacttccttggacacctcggcggtgcactcggtccacaggtcgatgagttcctgacgacgagcttcctcggtcaacagacccatctcgtagttggcgttgaccttgtcggccttggcctcgtactcggcgatcttctcgtcgcgctcgggcggctcgttcacgtcggagaacgcgaaggacacaccggaccacggtgcacgggtgaagccaagatccttcagggcatccagcgtggcggccacctgctgggtggagtaacgcatggcgatgtcgtcgacgatcttggacagacggcccttggccacctgctcgttgacgaacgggtagtcggtcggcagggtctcgttgaacaggatgcggccgtaggaggtggcgaacagcacggtgccgtcgtggaagcgctcttccttgacgacctcgtcctcaccttcgcgcgggtcgagcaccttgacctcgccgggctcccagttcttcggcagtacgaagctctcgggcaggcggatgagcaccttggcctgcatgtcgatctcgtggcggtcgagggccatttcggcctcttccagcgaggagaacacgcggccctggcccttggcgccttccagcacggtggacaggtagtacagaccgaggatcatgtcctgggacggcatggtcacggtgtgaccgtcagccggcttcaggatgttgtcggaagccatcatcagcgagcgggcctcagcctgggcttcggcggacagcggcaggtggactgccatctggtcaccatcgaagtcggcgttgaaggcggcgcaggccagcggcggcagatggatggccttgccttccaccaggatcggctcgaatgcctgaatacccagacggtgcagcgtaggtgcacggttgagcagcacggggtgctcggagatgacctcctcgagcacgccccacacttcggcgtcgccgcggtccacgagacgcttggcggacttcatgttctgcgcgtagttcaggtccacgaggcgcttgatgacgaacggcttgaacagctcgagggccatcggcttcggcagaccgcactggtgcatgcgcagggacgggccgaccacgatcacggaacggccggagtagtcgactcgcttaccgagcaggttctgacggaaacgaccctgcttacccttgagcatgtcggacagggacttcagcggacggttggaggcaccggtgaccgggcgaccacgacggccgttgtcgaacagggagtcgacggcttcctggagcatgcgcttctcgttgttgagcatgatttcaggggcgccgagctcgatcagtcgcttcagacggttgttacggttgatcacacggcggtacaggtcgttgaggtcggaggtggcgaaacggccaccgtcgagctggaccatcgggcgcaggtccggcgggatgaccgggatcacgtcgagcaccatggcctccggcttgttgccggtggtcaggaaggcgttgacgaccttgaggcgcttcagagccttggtcttacgctgctcggaagcgtccttgatctcctcgcgcagttccttggagatggtctccaggtcgagggactgcaggcgcttcttgatggcttcggcgcccatgcagccgtcgaagtaatcgccgtagcggtcctgcatctcgcgccacaggtccacgtcgtcgaccatgtcgccgggcttgagcttcttgaacttgtcgaagacggcgtccacacgggcgatctggtcgttgtagcgggtgcggatggcggccatatcgcgctcggcaccgttacgcagcttggtgcgggccgggcccttggcctcgccggtctcctcaagggcggcgagatcctcttcgaccttcttggcgcgagcttcgatgtcggagtcacggcgctgctcaaggcgcttgatctcggaatcgaactcgtcctgcaggccgggcagatcgttgtggcgctcgtcctcgttcacctcggtgaccatgtaggaggcgaagtagatcacgcgctccagatccttcggggtgacgttcagcaggtagccgaggcgggaaggcacacctttgaagaaccagatgtgcgtcaccggggcggcgagctcgatgtggcccatgcgctcacggcgcacgcggctgcgggtcacttcgacgccgcatcgctcgcagacgatgcccttgaagcgcacgcgcttgtacttgccgcaggcgcactcccagtcacgggtcgggccgaagatctgttcgccgaacagaccgtccttctcaggcttcagcgtacggtagttgatggtttcaggcttcttgacctcaccgtggctccaaccacggatgtcatcggcggtggcaaggccgatgcgaatcttgtcaaatgcgttgacgtccagcacttgttaatccgtttctgttcttgagaccttcccaagctccccttgtcaggggagctgtcagccaaggctgactgaggggtagtgcaaaccggaaaggtctctgtacgttatctatttcacgttggcggagctacacgcggcgtattgaccgcatgcagcccgagggatcactggtattcgggctcttcggccttctggtcttccttggcggccgcgtcggggcgggcgccaatgttgaagccgaggtcgtcagcggagctggccggatcgtcatcctcatccttcatgtcgatggccacgccttcggcgttgagcacttcgacgttcagggacagggactgcatttccttcaggagcaccttgaacgactcagggatacctgccggcggcaggttatcgcccttgacgatggcaccgtagacgcgcacgcggccgtcgacgtcatcggatttggtggtcatcatctcgtgcagcgtgtaggcggcaccgtaggcctcaagggcccacacctccatctcgccgaagcgctggccaccgaactgggccttaccaccgagcggctgctgggtgatcatggagtacgggccggtggagcgggcgtggatcttgtcgtcgaccaggtggtgcagcttcagcatgtacatgtagccaacggaaatcggcttggtgtacggctcaccggtacggccatcgaacagggtggccttgccgtcggggccgaccagacggtcgccgtcgcggttcggcagcgtggtggacagcaggcccttcaggacctcgggcttgacaccgtcgaacaccggggtggcgaccggggtgttcggctcggccttctcggcaccggacggaatcagcttcttccactcggcttccatgttcgggtcaagggagatatcccaaccggagtgagcgatccagccgaggtgcagttcgagcacctgaccaaggttcattcgggaaggcacacccagcgggttcaacatgatgtcgaccggagtaccgtcggcaaggaacggcatatcctcttccggcaggatgcgggagatgcagcccttgttgccgtggcggccggagagcttgtcgcccaccgtgatcttgcggtgctgggcgatgtagacgcggatcatctggttgacgccgttgggcagctcgtcgccgtcctcctcggcatcctcgcgggtgatctccttgacgccgatgacggtaccggtctcgccgtggggcacgcgcagggaggtgtcgcgcacctcgcgggacttctcgccgaagatggcgcgcagcaggcgctcctccggggtcagctcggtctcacccttcggggtgaccttaccgaccaggatgtcgccggcctcgacctcggcgccgatgcggatgatgccgcgctcgtcgaggttggccacagcgtcctcgccgacgttcggcaggtcgcgggtgatctcttcggcgcccagcttggtttcgcgggcgtcgatctcgtactcctcgatgtggatggaggagagggtgtcgtcctgcacgaggcgctgggagatgatcacagcatcctcgtagttgtagccgttccacggcatgaaggcgatgagcaggttcttgcccagggccaggtcgcccttctggatggcaggaccatcggccagcaccgagccggcctccacacgctcgccatcatggatgatcgggcgctggttgtagcaggtggtctggttggaacgctggaacttggccagcttgtaggagctggtggtgccgtcgtcgttcatcacgcgaatcaggtcggcggacacgtaggtgaccacaccgtccttctcggacttgatgacgtcgccggagtcgttggcggcgcgccattcggagccggtgcccaccagcgggcgctcggattcgatcagcggcacggcctgacgctgcatgttggtgcccatcagtgcacggtggccctcatcatgctccaggaacgggatcagggaggcaccgagggagaccatctgacgcggggagacatccatgtaatccacggagctcaccggcacatcgaccgcctcttcctcgccgactcgggcaagggcggacttggagacgaagttgccgttctcgtcgagttcctggttggcctgggcgatgacgtggtcgagatcacggtcagcggtcatgtactcgacctcgtcggtcacgtggccgttgacgaccttgcggtacggggtctcgatgaagccgaacgggttgacgcggccgaaggtcgccagggagccgatcagaccgatgttcgggccttcaggagactcgatcgggcacatacggccgaagtgggacgggtgcacgtcgcgcacttccatggaggcgcggtcgcgggacagaccgccggggcccagtgcggaaagacgacgcttgttcgtcacaccggacagcgggttgttctgatccatgaactgggagagctgggaagtgccgaagaactccttgatggtggcgttcaccgggcggatgttgatcagggactgcggggtgatggcctcggcgtcctgagtggtcatacgctcgcgcaccacgcgctccatacggctcagaccggtacgcagctggttctggatcagctcgccgacttggcggatacgacggttgccgaagtgatcgatatcgtcgacgtccacgcgcaggtcaacgtcttcgccgttgcgcttgcccgggaaggtcgccgcaccgtcgtgcagggccaccaggtacttgatcgtggcgatgatgtcttcctggtggagggaacggtcgttgaaatcggcctcgacacccagcttgcggttgatcttgtagcggccgacgcgggccagatcgtagcgcttggtgttgaagtagaaggagtccagcaggttcttgccggcctcgggggtcggggtgtcggccggacgaatcttgcggtagaggtcgacgagggcctcgtcctgggtctcgagggtttccttctccagggcgtcgagcaccagcgggtagtccttgaaggcctgggcgatctcggacttggtcatgccgatggccatgaggaacacgatggcggactgcttgcgcttgcggtccacgcgcacctgcggctggtccttcttgtcgatctcgaactcgagccatgcaccgcggctcgggatgatcttcgcgccgaagacttccttatcggaggtgcggtcctgctggcggtcgaagtagacgcccggggaacgcacgagctgggagacgatgactcgctcggtaccgccgatgatgaaggtgccgtgcggggtctgcagcgggaagtcgcccatgaacacggtctgggacttgatctcgccggtgtcgccgttctcgaattcggcgttcacgtacagcggagcggagtaggtgtaatccttctccttgcactcctgcacggtgtggcgcggctcctcgaagtacgggtccgagaaggtcagggacatggtctgtgcaaagttctcgatcggggagatctcgttgaagacctcgtcgagaccggaggtgtgggccacggtgttggtgccgttggcctcatcctcttcgacacgcttcttccagcggtcggaaccgatcagccaatcgaagctgtcggtctgtacgcccagcaggtagggcacatcgatgggttccttgatggaaccgaagttcacgcgatccgacgccttgtgcagatcaatgtcatgctggtcggcgcgtgcgatgatggtggtggtgttcgtcgtagactcagtagccaatggacgttccttatcgctcgctaatatgtggtaattcccctgggagcgccggcatggccaccatatgcctatgcggacgcttcattgtcgacggcatgcccgcaatatgacacacctcatgcaaagtcaaaagaatactgatatgcgaggacatttttagctcccgctgatgagggagctgtcgagcggagcgagactgagggagagacccagcgtccaaacaccaaccgcaggtcctaccccaccgtaaacgtcaccggatcgctcttcaccttcggatgatccttcaaactcagctgcgccacgtacgttcccgcattgaccttggcccaatccgactcatccgtgcattcggtgagcgtggcgttcgcatcggtattccacgtgaccttctgaacgtccttatcacccttggacatcagcagcagacgtgaatccgccggacacacatcggacttgtaaatcgtttcctgaccggaagtaatggtgagcacacggccggaatcggccccgtccaccaaacagttgcctgacccctcgtgcacgatggtcgcggtgaaatcaagcgatcctcctaccggcacggattgggaggccgcggaaagctgcaatgtcacatcactggccgagcaatccttgaccttgctgactttcttcggagccggcgtggcgtcgcgggaaatcgcatacacctcgtcatggtgaatcatcgtgttcacggcaccgataccccggccaaggctgtacacgcagaatacaatcagcgcgattatcagcagcaacaccgtgccggccacgatacgccgacgacgatagatggcctgctgctttttgctgatcctgcgcttgcgcggcttgccggaacggtcgtttcgggcgggcccgccggatggcccattggccccggtgccggctccgcgtgccgttctcgcgcctgatgtgttcctctgcactgccataacccttccagtctacggtcaccacacccatacacgcttggggagcccgccattttcacaatgtcagctgggtaatcgcaggccgccgtccagaatctcgatcaggccgtcatcgtcaaggctggcgatgcaggcggcaagctgaatctggtccttccaaagattgtcggcatcttccctgggcaacgtgactccagcgggaagctcgcgcagcgcggcgagcaccagaccgcgcacctgtcgatccgtgccttggaatcgttggcgtgggcgggtgcgacgctcccccagtccggggcggccggccttgaggaacgcgcaatcgtcggcaatcgggcaggtgtcgcataacggcgatttggccgtgcagatcaccgcccccagttccattaccgactggttccatgtgaccgatgggcgttcgccacgatgcagtcgggagcgtttgccgccacggatagtgccgttcacggtatgttcggcgctaccggcattatcggcgacgtcagcatcgcgcccgagaatctcgtctttgggcagcatgcggttcgccagcgcgcgttcggccgggctggccgctcccccgcgcgattcgacgccaaggaacacacggctcagcacgcggcgaatattcgtatcgatcaccgcaatgcgctcaccgaatgcaaagctcagcaccgcggaggcggtgtaatcgccgatgccgggcaatgcagtgagttcgtcatacgtacgcggcagtttgtcggcgtactgctcggccaccacgcgggcacattcctgcaatcgcagcgcacggcgaggatagccaagccggccccatgcggtgatcacctcggccttgggggcctcggcgagtgagcgggcgtcgggccaacgttccatccagtcggtccagtacggcaccacacggctcatctgcgtctgctggctcatgacttcggataccagcacgccccacggcgtggcccgtccgaagcgcc

SEQ ID NO: 2346 - DNA, 10669 bp, Unknown
  R50_10m  MAG No. k141_183
cgggtaagcccttggatgcgtgtcccgattaatgccgatggcatcagggaaccgctgcatgtggattccgagccgcggggccgtgcgctcgaacccgaattcatcgccggtctacgcgcgatggccgccaagggattgccattcgagctgtgcaaccgtggcccggaactgggcgacatggccaaggcgttctcgcaggttcctgaagtgacggtcatcatcgatcatctcggcaacgtgcccgggcttgatgaggaatcgtgcgccgcactcgcagcgttggccgaactgccgaattcgtatatcaaggtttccggcgacaacccggtggacccggacatcgtgaaatacgtgcgggacacattcggcccgaagaaggtgctgtacagctccaactggccggtcgtggaactcaactcgacctttgccacgcacttccaactcatgctggacacgttcggcgaggacgaggacttcttcgaaaacaacgcccgccgcgcttacaacatcgactaaacccaagccccctctgatgagggggctatcgtccgcaggacgactgggggagaggtcgcaaacccggtgccgcttgtgcggcacccctattccgtgacgaaaggaacaatcatgacaagcagcgccgaattctcaggcatcatctgcccatccatcaccatcaccaaggacgacggtgacatcgactatgaacgttgggggcagcatctcgatcatctgatcgaggccggtatcaacggcgtgctggtgtttggcagcatcggcgagttctatgccttccctctggacgtcaagaagcaggcggtcgacttcgtggccaagcatgtcgccgggcgcatcaaggtgttcgcgggcgtgggcgataccaacttgaacaatgtgatcgacttcgcgcgggcagtcgaagcaagtggagtggatgcactcgtggtcgtttcgccgtattacttcggccctactgcgggaggcgcgaaggcgtacttcggcgcggtcgctgaagcgacgaatcttccggtgatcctctataatttcccaccgcgcaccggcagcgacttgaccccggagctcgtggccgagcttgccgccgcgcacccgaacatcgtcggcatcaaggacacggtcgacacaatcagccacacccgcaaggtgattcgcgcggtcaaggccgtgaatccacggtttgcggtgttctccggtttcgacgagtactatctcgtcaaccgcgtctccggcggtgatggcgtgatctgcggcatgaccaatgtggagccggagaccttcgttacgctgcaccgtgcatatgaggccggcgactatggcaccgcaattgaggccgccgaacgcatcagccacctgatggcgctgtacgatcagaccgacctgttcatctccgccatcaagggtgcggtcaaggccaagggactgaacatttccaccctgatccgtgagccagcggtgcaactcactgctcagcagtatgaggcgattaaggcgattctcaagtagtgtatatctcaggcttccgcggaatcctacggtggatttcgcggaagttttttttacggtgattacagttgccggctcagctcagcagcgccgcgatgatcgcgataaacaccgggctggtcatggtgctcatcagaatgccgtcgcgcgcgaaggtgaggcccacgttgtagcgggccgcgtagttgtacacgttctggccggtgggcagagcggcgagtaccacgcaggcgtacagctcggagccgcggaagcccatcacgaaataggcgagcaggaacgcgatgattggcatgatgatgttcttgaggaccgcgaccgtgaagatggccgggcgatcgcccttctgctgtagcggcttggtgccgtgcagggacatgccgaacgccatcaggatcattggcaccgctgaatcgccgatcatgtcgatcgggtcgaaaatgaatttcggcactgggaaccagccgcttttagcggaaatcgcagagaccacaatgcccagcagcgaaccgataagcagcggttgatgcagtggctgcttggcgatttccttgatggagaccttgcccttggtggtcacgtccagcactgtcaggcccaccggtgtgaagatggcctgctgcatgaccagaatcggtgccaccagagccggattgcccagaatgtaggtggcgattggcaggccgatgttattggaattgaggtacagcgaattcagggcgccgatggtggcgtccggggcgttcaggtggaagaacatgcggttgagcaccaggaacaccacgcctaccagcacggcggagaagaacgccacgataatcgagggatggaagatgtcgaagatcggttccttggagaggatggcgaacatcaggcacgggctcgatacgaagaaggagaaccggttgagcaccatctgagcggacggcccgccgattcgcattcgtgcggcgacatatcccaccgcaatcacgatgccgataacgcagaagccttgcatggcgctgattagacctgacataatcctccctttcgccaccccagtgtggcacataaaaatgtattcggccgcaaaatctcatgtagtgggtgtgctgggcccgccgcccacgcggtacgctgttcacatgacgcttgaattgaaccgcaccgcatccactgccgagcagctgaacagcctgctcacccagatcatggagaacttctccgtgtccgaccacgagggccccctcaccgacgaggtcgaggccttccttaacgagcaagagcacctgaccgtccgccgtcacggcgacacagtggtggccggcaccgacttcggcgagccgaaccgtgtgatcttggccgggcacctcgatactgtgccggtcatcgacaatttcccaccgaagtggctggagcccggcgattcgctgattcgcgaagaaatcgcccacgctcatcccgaagaccgcgtgctgtggggccgcggtgccaccgatatgaaggcctccgacgcggtgatgctctacctcgccgccacgctcgacggccgcacgccggaaaccaccccgaaagtcgacctcacctacgtcttctacgaccatgaggaagtcgtcgccgaaaagaacggccttcgcaaagtcgtcgaggcccatcccgattggatcaccggcgatttcgccatcatcggcgagcccaccaacagcggcatcgagggcggttgcaacggtacgattcgcttcgacgtcgtgacccacggcgtggcagcgcactccgcccgcgcgtggatgggagagaacgccatccacaaggcggccgacatcctgagccgactcaacgcttacgagccggccaccgtgaacgtggacgggctcgactatcgcgagggactcaacgccactctgatctccggcggcaaaggcacgaacgtcattccggatgaatgccgcgtacacgtcaactaccgcttcgccccggacaagtcgctggccgaggccaaggctctgatgatgggcgcggatgccggtgccgaactcggcaatggcgagcatgtggccactggcggcgtgttcgagggctacggcatcgaaatgaaggacgaaagcccctccgcgcgcccgggcctgaacgccccgctcgcccaagatctggtccgactggtcaaggagcgcaccggccgcgacccgttggccaagctcggctggaccgacgtggcacgcttctcccagctcggcatcccggccgtcaacctcggtgccggcgacccgctgctggcgcacaagcacgacgagcaggtgcccgaatccgacctggccgccatgaccgcaattcttaccgactggctggtctgacacctctcgagctcccctctctgaggggagctgtcaccgcagggaggggagccgagagaacgtcagcctcgccgggccacgcccgcacaaaatatgtggcatactaaaggatggtggttctgcataaccatcagcgtgcgagatggcgtcgatccccttgcggctctcgagaatgagacaacgcaagcgccggtgtccgccacccgcaggacagacttgagacgaagttgcctttacgcggcgcgttttcgcgcggccacggtgagagcgtggtgtgagtcaagcgtataggcctggaaataggcgtcgtgatgcagcgcgccgcgaggagcattgtgcccactgacaaccgtgaaggtttcgtcaacgacggaaccgataattcaaccgtatccaatgccgattcggctgcagccgtgaacgctgcgcctgccgccgcctcccagcccgtcgaacctgttcgccgtcgtcgtggcggccgccgcgtggtccgcggcaccggtgctgccggcgcctccctggaactgcaagtgcaggaacgcaccccgctgttcgaagcccccgcgcttcccaatgccagcaccgcggccgattccaagtcatccgattccggcgattccgatgaatccagcgattccaaggattccgccgaacgtccaacccgccgccgtacgcgccgcgtttccacggccgacgatgccgccgaaacgccgcgtcgcacccgtcgtacgtccgccgcatcttccagcgataccgatgatgacgacgagactccgcgccgtccgcgccgcgccgcttccgcagtggccgacttggatagcgaggatgatcgtccgcgccgttcgcgccgcacggtcagtgccgatgatttcgatgacgatgacgccccgcgttcccgccgccgttcagtcgtggacgatgacgattacgacgaggaccgttcggttcgccgccgctctcgctcccgccagtccgacgatgatgactacgaggatcgcccggttcgctcccgcctccgccgtgcgcctatggatatggatgatgatgacgaagaccgtacggttcgccgtcgttctcgccgtgcagttgcggatacgcacgaggataccccggatgagcgcctgttcgacgcggtcgaatccctgccctctggccacgagaccgtgcgccgtggcaaaccgatgacgtccctgctgttccaggaaccggtgctgcccgccgccgtggatgcgcacgataccgctgacactcgtgatgacgatgttgacgccgacgaacgcccgtctcgtcgctcccgccgctcgcgcagccacgacgatgacgatgcccagccgcgcagccgtcgccgcgacgatcgcgacgaccgcggccgcgcctccgccgaccgtgacgcttcccgtgacgccgcgtccggcgataccaacgccgatcacgacgatttcgacgccgacgacacctcggactcccgccgttcgcgccgctcccgccgtctgaacgcccaggagcgccgtgcagccgccgaagtcgagcagattgaggaagacctcgagctggacgatatcgcctactcgccgattgccgaggaggagggcgacgaggaatccgacgtcacccgcacccgttcgcgccgtcgccgccgtcgtggttcacgcggcgaaaccggtgccaacggcgagcacgataccgccgagaacgatgccgaggatacgcgttcccgccgtcgtgacgatcgcgatgatcatgaccgtgatcgcgatgaggacgatgaggagcagaccgtcactcgccgtcgccgccgccgtcgtggcggcaagaacggcgagggcaccgacgaccagagtcagaacagcgaacagccgctggtccgccgctcccgcaagcagcagtacatcgacgaaatcaccgatgtggaaggctccactcgtctcgaggccaagaagcagcgccgccgtgacaaccgccgtgagcgcagccgccagagccagctcatggaacaggacttcctcgcacgccgcgagaacgtggaccgcctgatggtggtgcgcgagaaggaacaccacacccagatttccgtggtggaagacaatgttctggtcgagcattacgtctccgacattcaggaagtacagaccgtcggcaacatctatcttggccgcgtgcagaacgtgctgcccagcatggaggccgcattcgtggatatcggccagtcccgcaacggtgtgctctacgccggcgaggtcaactgggatgccgctcgtctcgaaggtcagccgcgccgcatcgagctggcgttcaagtccggcgacccggtgctcgtgcaggtcactaaggacccgatcggccacaagggtgcccgcctgacctctcaggtcacgcttgccggccgcttcctggtgctcgtgccctccggtggcatgaccggcgtgagccgcaagctttcggagcgcgaacgcagccgtctgaagaacatcgtctccaagatcgccccgaaagacatgggcgtgattatccgcaccgcggccgaaggcgcatccgaagacgccatcgtcaaggatctcgaatcactggtccgccagtgggagcgcatcaacgccaagcgcgaggaattctggcacggcaagcgcccgaaactcctgcagggcgagcccgacgtggccatccgcgtggtgcgcgacatcttcaacgacgacttcagcaagctcatcgtggaaggtgacaaggtctacgaccgtatcgaggaataccttgacaccatggcccccgacctgaaggacaagctggagaagtgggacccggccgagcacgaaggcaaggacgtgttcgacaaatggtccatcgactcccagctgcgtaagggcatggaacgtcaggtctacctgccgtccggcggctcgattgtcatcgatcgcaccgaggccatgaccaccatcgacgtgaacaccggccgctttatcggcaagggcaagtccttggaagaaacggtgacgcgctgcaacttggaggcgtctgaagagatcgcccgccagctgcgcctgcgcgatatcggcggcatggtgatgatcgactatgtggatatggtcatgcccgccaaccgcgatctggtgctgcgccgcttggtcgaatgcctggcacgcgaccgcaccaagcatcaggtggccgaagtcacctcgctcggtttggtgcagatgacccgcaagcgcatcggccagggtctggtcgaggcgttctccgaggaatgcccgacctgcaagggccgtggtttcatcctgcatgatcagccgaccgtttcggccgactacgacgatccctacgcgcttcgcggtggcgacccgttcgtcaaaaccaacaagcacggtcgcggcaccgctcccgctcccgaaccggctggttccagcgccgacgtcaaagccaaactggctcagattgccgccgctgccgtcgccgccaacaatacggcggaagagtaacaggtgtgtcgtgcttgacacgcgggcaaaaatcatttgatttagtccgcatggtggtgtaaatttgaaactcggtgtctgaccgcaggctcggtgcgtgttaggcaaggtagctttccaaaacataaaaggaacgataatgtacgcgattgtgaaggccggtggccatcaggaaaaggtcgaggttggcgacgtcatcctcgtgaaccgtctcgacgccaagaagggcgataccgtggaattcccggtctccctcgttgtcgatggtgacaaggtcaccctcgccgccgccgatctggccaaggtgtccgtcaaggctgaggttgtgaacgatgaagccaagggcccgaagattgacatccagaagtacaagaacaagactggtgttgctcgccgtaagggtcatcgccagaagctgactatcgtcaagatcacggcgattgcctgagttatagaaaggaccatgaatcatggcacataagaagggtgcgtccagctctcgcaacggtcgcgattctaacccgcaatacctcggcgtgaagaagttcggcggcgaagccgtcgtggccggcaacatcatcgttcgccagcgtggcaccaacttccacccgggccacaacgtcggcatgggcaaggaccacacgctgttcgccctcaccgatggctccgtgaagttcggtgtgcgtcgcgaccgcaaggttgtcgacgtcatcgcctgagcgatatagcgtcaagctttttcaagccgcgcccgtaaggacgcggcttttttgtaaggtaatcaatatgagtgattttgtggatcgagtaaccgtccatgtcaagggcggcgatgggggcaacggttcggccggcatccgtcgtgagaaatacaagccgttggccggtccgaacggcggcaatggcggcgacggtggttccgtggtgttcgtggccgaccgtaacgccaccagcctgctcgactatcgtttcatgccgcatcgtgtcgccggcagcggcaccatgggcctgggcgacaataaggacggctccaagggcgaggatctgattctgcccgtgccctgcggcaccgtcgtctttgaggcgcgcggcgaacagggcaaagccaagcatcccggcgcacagctcgccgacttgcgccacgagggcgaccgctgcgtcgtcgcccagggcggtgccggcggcctcggcaacatcgccctggccaacaagacccgccgcgcccccggcttcgccctgctcggcgaactcggcgaggaacgcgacgtgattctggaactgaagtccatcgccgacgtggcgctggtcggtttcccctcggccggaaagtcatccctgattgcggcgatgagctccgccaagccgaagatcgccgactacccattcaccacgctggtgccgaatctcggcgtcgtcatcgccggcgactctcgatacaccatcgccgacgtgccgggcctgattcctggcgcctctgaaggcaagggcctgggactggagttcctgcgccacatcgaacgtaccgaaatcatcgcccacgtgattgattgcgccacgcttgaaccggaccgcgacccgatgtccgactaccacgcgctggaaaacgagttggcactctacgccgacaagctcgaactgccattgggcgccatcccgattcccgaacgcccgcgcatcgtgattctgaacaagatcgatgtgcccgaggccaaggaattggccgagttcgtgcgtccggagttcgagaaactcgggctgaaggtctttgagatctccactgcctcgcacgagggtctaaaggagctcaacttcgcgttgtctgcgctggtgcacgagatgcgtgaggaagtggccaaccgcgagcaggccgaagaggaggctcgcgtggtcatcaagccattggagaccaagggccgccgtccgcgtcgtgctgacgagggcggcagtgcgcttgagttcacggtcgagcgccgcgaactcggcaatggcgaagtgttcttcgaggtgcgtggcgtcaagccggagcgctgggtcatgcagaccaacttcgacaacgacgaggccgtgggctatctggccgaccgcttggccaagctgggcgtggaagatgagctgcgccgcaagggtgcccaccctggtgacgaggtgcgcatcggtcgtggtgcccgtatggtcgaattcgattgggatccgaccatctccgccggtgccgaaatgctcgacggctccaacctcggtgcccgaggcaaggatctgcgtctcgaagagcaggacccgcgcacgcaccgccgctccaacgccgaacgtcgtgcccaataccacgagatgatggacgcccgtgccgccgtgcgcgatgcgatgatggccgaacgcaaggccggccactgggccgacccgaccgttgacgacgatcgccatgacgaaaccagtctgttcggccacggtgagtccagcgaagatggtgaaaccgaggaataaatgagcactccgagtcaggccgaggtgcggcgcatggtcgcagcagccggaaccattgtcgtgaaagtcggctccagctcgctgacccagccgagcggtcacctcgacccggacaagctcgacgctctggccgccgcccttgcccaaatacgactgatgggcgggcgtgtagtactggtttcctctggtgctattgcggccggcttcggcccgctgggctttgacgaacgcccggccgacgtggctactcagcaggccaccgcagcggtcggccaaggtttgctcatggctcgctacgagactgcttttggccgtttcggtattcgcgtaggccagattctgattaccgctgaagacacgattcgtgccacccagtaccgcaatgtggaacgcacgctggaccgtctgctcgacctcggcgtggtgccgattatcaacgaaaacgattcgctggcgtccaacgagattcgattcggcgataacgaccgtctgtccgcattggttgcgaacctagttcgcgcggaagctttggtattgcttaccgacgtggacgcgctatacacggcaccgccttcccagcccggctcccgccgtgtggaatatgtgccgaacgttatcgatgcacttggcgacatccaagtctccggctccggctccaaggtcggcaccggcggcatggtcaccaaactcgaggccgcgcgcgtggcggccgtctcgggcatccccacggtgctcacttgcgcctcgaacgcgggccctgcgatgatgggcgatccggtgggccccgtgttcgcaccggttaaggcccgcgttcgaggcgcaagtgagcaccgtggggatgcccgagacggccgccacgcgcgcggcctc

SEQ ID NO: 2347 - DNA, 24300 bp, Unknown
  R50_10m  MAG No. k141_463
cgcgcacgaagttcgagccggtcggattggtgaacaccttcaatcccagatcggagagcatcgaggcgaccatgcgggtggtggtggtcttgccgttcgtgccggaccccaataccacgccaagcggcaactgcccgagcgtacgggtcaggaagcgggggtcaatcttttctacgactttgccgggcaaagccgaaccgccatgtttggtgacgcgggatgcaaaccgcacgaagcggcctgcggccacggtggcgaacgcataccacggtttgcaggtctgcaccacggacgattggtcttgcgaaacatcgcgtgaaacgttgcttgccatcatcacaccccctgattggcgttgtagtcctgcggcatgtctttgaatttggacgtggcaccgaggaaggcgaggtggaaggtttcggtcgggccgttacggtgcttggccatgatgatatcggcctcgccagggcggtcttccttgtcgtagaagtcagggcggtggaccaggaacaccacgtcggcgtcctgttcgattgagccggattcacgcaggtcggagagctgcggcttcttgtcgttacgcatttccgggccacggttcagctgggaaagggccacgaccggcacttcgagttccttggccaagagcttcagggcacgggagaattcggacacctcttgctgacgggattccacggccttgcccgaggtcatcagctgcaggtagtcgatgactacgagtttcagatcgttggtctgcttcagacgacggcatttcgcacggatctccatgaggctcatgttcgggctgtcgtcaatgaacagtggcgcattctgcatcttggtccagaactggttcagggtgttccagcgttcgggggtgatgtcgtcggcgcggcgcagggcggccatcggaatattggtttcggcggagataatacgctgagcgagctccaccttgctcatctccaagctgaagaccacggaagtcatgttgtggtgcaacgcggcggcgcgggcgaagtcgatgccgagcgtggacttacccatggccggacgtcctgcgacgacgaccatctgtccgggctgcaggccctgggtcacgtcgtcgatgtcgcggaatccggtcggcacgcccttgttgacgagaccctgctgcagtttgtccagctggtcgagcgcgtcgtggaccaccgggccgatggcggcatagtcctgacgcaccttgcccatcgacatctcgtagatctcggactgggcgaggttaaccacatcctcagcctgcgatccctcggcggaataaccgagctgggcgattttggtgccggcggcgatcacattgcgcaaaatggcccgctgatggacgatctccgcgtagtacatggcattggcggcggtcggtacggatgcgacgaggctgtgcagatagtccgcgccgccgaccttgtcgaggttgccatccgccaacagctggttggccacgagcaccacgtccaccggctgactggcggaaaacagatcgatgatcgcgttatagatcgtctgatgcttgggctggtagaaatcggtgacgtcaatggtctgcgaaacttcgccgatggcatccttactcatcagcatgccgccgagcacggccatttccgcgtcgtcatcgtgcgggggcacgcggtcgaaaatcgggtcgccagctgccgccgcctgcgcgccgccccggcccgcgcggtcgccacgatcgccacgatccgagccactgccgaacccattctgatacgagtgttcacttccttctgccatagccctcaagtataggaggtggcgtggcgagcggaagatatcgcacgactacgttcattaggtcgattcctcactcattaggtcactgtgcttggtaacaccacaaaccatgcgcttggaatggcggcattctgaggcgctcgatcaatatctctcaaagtccaccgacctaatgaatgcacaatcgacctaatgaacgcatgaaagtgcaagtcgtgccgaatcatcgcgcaccaatttcatcgttggttcaccttgcggtcagcgcggcgacacgctgaagcgtcaaatgtggatagaaaaaatagttatccacattttggggataagtctggggataatccactcatttatccacatattggggataacttggtggacaagctgaggataactttgtacggctgcactaggtgcttgcgcaacgtagctaagcatgatatgcgtgtgagcgtgcatagcaactccaccagcattcatcgccaaatcattgcgttggcgctaccgacttttgggcagctcatcgcagaaccgacttttatccttattgacaccgccatcgtcggtcacattggcgatgccgctttggccggactgtccatcggatcgaccatcatcctcacggcagtcggactgtgtatattcctggcctactcgaccactgctcaggtggcgcatctgctgggagcgggtcatcgtcgtgagggactgcaggcaggcattgacggcctatggctggccttgagcatcggcaccgtgctgggattgggattgttcgcggctgccgagccattatgccgggcactgggcggtcagggcgaagtattggaacaagccgtgacctatacgcgcgcaatcgtgctgggtgcgccaggcatgctgatggtatatgcggcgaacggcattttccgaggattgcagaaggttcgtatcacgctgatcgctgcggtgggcggcgcggtggtgaacacggcgcttgatgtgttgttcgttattgtgctgaattggggcattgccggctccggagtggcgacgctgatagctcagtggttcatggggctgttcctggtaatccccgccattctgtggtcccgggcggacggtgcgagtctgcggcctcgtttggccggtattgcggcagccgggggcgacggactgccattgttcattcgtacattggcgattcgtgcggccatggtggctacggtcgcctgtgccgcgcgcatgggtactgccgtgttggccgggtttcaggccgtgaactcctcttggaattttgcgatgaacatgctggattccgtgggcatcgccggccagacgctggtggccacagcgctgggcgctggcagcgtgcagcaggcgcggcggctgacgcgggcgaccgggcgtgcgggactggtcaccggcgcggtaatcggcacggcttttgcggtagtcggcctgttcgccgggcacttcttctcccctacgccaaatattcagacgttgattgccgttgacatggtgacgatgggcatcttcttcccactgcaaggctggatgatggcaatcgacggcattcttatcggcgcgcgcgactaccgctatctggcaggcacctgcacgctgaccgccgtggtgtatgtgacgctcatactcatactggccaatatggtgacgccggcgctgacgagcgacctgatgcgtaccgccgtgctctgggccgcgttcaacgtggtgctcatgggcgggcgcggcctgtccaacgggctgcgcgtgcgctcggacgcatggatgaagtaggcatcggccgcgcgaagtgctgggcgattccgtttacatcgcggcgcgagcggcggaatacatgccgcgcacgatttgttcgcgccacttggaccagccgtattgcttggtgatggtctcaccggcggtggcaccgagcgaggagccgtcggcccgggtcaggtcgaacagcatatccaacagcatcttgtcgtggtgcaagcggtcggccaactcctccgccacggccggatcataggggtccttacccgtggcaaattcggatagggtcaaatgctcacgcaccagcacggtggcccagtcgacgatgtccggcgcgtagcccatacgcttgagaatcaccggcacatggcgggcaccctcggcggcgtgatcggccacgaacgcgcgcttgccgatgtcatgggtaataccggccaacagcaacgccttgaaatgatcgtcatcataccgtcccccggacggtgtctcacgacccagacgcgacgtgacctccaccatatgccgatcgatggtgtaccggtgggcggccgaggcggacggacggttgcggacgccgagccattccggcatccatcgacccggaatgtccacgaagtcgatgctctcccacacttccataagattcggcccgcatgcaagcagacgaataaacagctcgcgcgattcgtcatcccactggttgtcgtgaatcgggcagtgcttcagattaaccaaggtagacgggttgatgggcaaaccgaattcgccggccgccacggccatacgcaacgccagcttggcatccttggcagtctcggcaccgggtgccaacaccaattcgccttcgtgcttggccacgccgggagccaccacgtcgaattgcggggcttcacgcttgccgccagagcgctgagagaacatctggaagaacgcgaatcgcggcttttcgtgggtcagcgaatgtccagcgcgggatgcggtggaatcaagcgagaaggagatgcgccggccgatacgggcaagcagcgtctgcaaatcgtcgatcgagtaggcggcacgctcgttttcgggccaagtcggatcggcaaggccaagcatggcagccactttggcctgatagggcgtcagcatcaggttggtatccttgccggccaccagatggatgcagtcgcgtacgtcgagcagacgttccacggcttcgtcgtagatgccgtgcgggcggtcggccagccatgaggcggcgagcgcggagacgagcaccgcatcgcgcaaacccccacgggcctccttgatgtcgggctgattgacgtattggagccggccgaattcgtcgagtcgggctttggcggagtcgagcagttcgggcaggcgcttgcgggcggccttgcgccagcgttcgaggatggatgtggcggtggtggtaatcagagcggtgtcgccggcgatgggcttcacgtccagccagcccatggcggcgggaaggtcatggtcggtgacttcctcgcattgggcgcgcgtgcggatggagtggtcgaggtccagaccgctgtcccatagcgggtaccagagtttgttggccaactcgttgagctgctggtcgttcaacgtgcgaggctcgtagatgatgaccaagtcgaggtcggagctggggcccagttgaccacgtgccagcgagcctaccgcggcgaagccgatgccggagtcgggcacggggaaagagacatccttgcaggccgcattccacagctccgtgaggcattgcatggccagttctgtgcgggctttgcgcttggtcgcaccattccggtaaacgccgtcgtcatccggctggctcatatccatgaatcgttgtttcaagccatctactgctgaagtcattgcttcatctttcattgccaaaaaggtccccgcacggcgtcaattcgcggcgtgcggggacctttcccatgcagtccatcccctgctaggcatggacgtctgtgttatcagatcgcggcggaaccggtctcaccggtacgcacgcgggccacggagtccagcggagcgacccacaccttgccgtcaccgatggtgccggtgccggcggacttgatgatcacaccgaccagcgtctcggcatccgcgtcatcggacagcacttcaacgcgaatcttcggaatcaggtccacggtgtactcagcgccacggtagacctcggtgtggccgcgctgacggccgtagccgttggcctcggacacggtcagaccgtgcactccggcggccgcgagggcctccttgacgtcgtcgagcttatggggctggatgatagcggtgatgagcttcatctcacctcacctccttgagaacagagctggcagtaccagcaaaatcgtaagcacgttcgccctggtcggcaagatcgatgccgccgacttcctgagcttcggtgacgcgccaaccgatggtcttctccagagcgaaggcgatgatcgcggtgatcaccgcggagtagaggatggcgacgagagcgatgaccagctgaacgacaagctgcttccagtcgccgccagccagcaggccggtgccttcgccgaagaagccgacgaggacagtaccggtgaaaccaccaacgccatgcacgccgacgacgtcgagggagtcatcgtagccgaacttgaacttgagaccgcaggccaggcaggtcagaacaccagcgatggcgcccatcacgatggcccacagcggggaaaccacatcggcggccggggtgatggcaaccaagccggcgaccatacccgaggcggcacccatagcggtgtagtggccggagcgaatcttctcggtgaagccccaagagagcattgcggctgcggtggcggcggaggtggaaacccaagcgtaaccagcagtaccgttggcggcgaaggcggaaccagcgttgaagccgaaccagccgaaccacagcaggaaggcgccgagcatcacgaacggcacgttgtgcgggcggaacggctgcgtgccgaagcccttacgcttgccgatgatgagcacgataatcagggcggcgactgcggcgttgatgtgcaccacggtaccacctgcgaaatcgtgggcggccgcgccgatagccttggagatggcgccgtcagcagacagcagaccaccgttccagaccatgtgggccataggagcgtagtcgaaggtaacccacagcgccacgaagatcatccaggtgctgtacttcacacgctcggcgatggcgccgcagatcaggccgacggtaatcatcgcgaaagcgacctggaaggcaacgtccacggaaaccgggtagttgttgtcgttcagaccggtggcggtgaacacgccgtcctgcgcgaccatggaatccttgagcaggaagccgctggccgggtcgccgaaaataccgccgatgtcggaaccggcgtatgcgatggaccaaccccacaaagtccaaataatcatggtgaccgacagcgcggccgcctcaagcatcagcatgttcagtacggccttggcgcgaaccataccgccgtagaagaacgccacaccaggcgtcatgaggaaaaccaaggacgcggatgtcaggatccatgcggtgttaccggaatcaatcgctcccatgtctacctccctctctttcgttcagggcaccgggggctttgtgcggccggcgtcttatttgtctctacaatgccgtcccccttatgggggctaacagtttgtcagttaaagccggtctcgttttggtttcgttacgccaagttacgcgattgttaagcgtggctggaagcgtacgtgcgaccactcgaggaaattttggcgcgattccaacggatatgacgaagccccgaccatgtttcgagcatgattcggggcttggtttataggtaagtcgcgcgttttgcgctctcacaacgtggacgttggcttacgcgagaatgccgtccacgaaaccttcgggatcgaaaggtgccaaatcgtccgggccttcgccaagaccgacgagcttgaccggcacgccgagctccttctgcacgctgatcacgatgccgcccttggcggaaccgtcaagtttggagagcaccacaccggtaatgccgatggcttcggcgaacaccttggcctgggccatgccgttttggccggtggtggcgtcgagcacgagcagcacctcgtccaccggcaggttcttttcggtgacgcggcgaatcttgccgagctcgtccatcaggttcgacttgttctgcagtcggccggcggtgtcgatgatgagcacgtccgcgttcgcttccttggccttggcggatgcctcgaaggcgacggatgccgggtcggcaccgtccttgtcggagcggacgaccggaacgccgaccttggcgccccaggtttccaactggtcggcggccgccgcgcggaaggtatcggcggcgcccagcatgacctgcttgccttcggaaacaagcaggcgggaaagcttgcccgcggtggtggttttgccagtgccgttcacaccgaccatgatgacgacgctcggcttgttcgcgccgtccttgtcggcgttgagccggcggtcgatgtcagtgccgacgagcttgagcagtttgtctttcagcgccgcgcgcacttcggccggatcggactggcctgcgattcgggcgtcgttgcgtagttcctcgacgagctgttcgctggcttccgcgccaacatcggcgagcagaagggtgtcttcgacgtcttcccaatcggcttcggagagctgatccttcgcaagaatgttgaacagggccttgccgaacggattgccggatttcgacagccgcgccttaagacgctgcatgcgcgtgccggcggattcgggggtgtcatgaaccggttcgggcttggcttcggtggccggtgcaggagccgccgtttcggaagaggaagcttgagctgaggacttctgctgactttcagccggagctttttcagctgcatcaacattggaatcaacggacggcttcaccgtggaagaatcagatgcggccgactccgcttccgcagcaagacgggcgtcggccttggctttcgcggcttcggtggacttggccacggcagccttgcggctcttgccgaaccaccatccgccgatcaccagaattgccgcgatgacggcgacggcgacaatcgcaataatcacattcgtatccatggctccagcctaagaagcgcaacggacacaccggctccgccccgcggacgcaccacgaatgtccgattcgccagggggataaggtgctctgccatgcaaggcatcgataatgcgatcttgacttcgatacatctggtgacgtttttatagatcatgaagagtgattcttttgtcttccgctgtctgctttgaaggactgcttcctttctttagggaatttgcgtagcgaatcagactcctcgcgatgaggaagaccagaacgaatacggcgattacgcctaggatctcaatcaataatgcaatccatgtccagctcatgattcatcctttctctttctgtactcgtctatgagtattcgagccgtgtcgacgtcgtatctatcgtcaatggcgagactcttcaccaagaggatgaatggatcctccgtatcgttgtcgttcaaccgtattttttcgataagcctgtcaagccggatcctcatggtcgggtaagagacttgatacagctgggacatttgcttcagagatcctgacgatagcacgaagttcttgatgaaggccaaatcctcctccgtaaggctggccaaccattctggtagacgatccacatcaccctctttaataaaatttattatttattaaatatattaaagccgcgatgaagcattgtcaatatgacacacatgtccgattcactagaatcggacgatacgtgggggcggacggtcagggagctatccacggggcgtgaaaaactggacagcatggccaatacatccagaatgacgtcgtatcagcggcgcgagcagctcatcgaaatcggtcgttcgctgttcgcgtcgaagggttttgaagcagtgagcgtggaggagatcgccgccaccgcaaaagtatcgaaacccatcgtatatgagcatttcggcggcaaagagggcctgtacgccgtcattgtggaccgtgagatgcgcgcgttgaccagtgtgctcaccgccgcgcttgacgatccgaccgtgcacccacgccagatcgtggaacgcaccgcactcgcactgctcacctatatcgaagaggacgccgagggattccaggtgctggcgcgcgactcgcccagcaccgaaccgtccggctcgttcagctcactgctgggagacatcgccgtgcgcgtcgaagacatcctttccgaaacgttcaaacggcagaaactctccaccaaaggcgtgccgtactatgcgcagatgctggtgggcatgaccgtgttcaccggccagtactgggccgaccggcccaaggtgagcaaggagcagctggccgcgtacatcgtggacctggcatggcatggcctgagccggctcgattccaagccgcagctgttgtttgaaggcgtcaaggcccggaaggaggccgagcgccgggccaagcgcgggatcgatgccgaaacaccggccccggacggcaaggcatcatcgcccttagagcagacggacctcgaccacacgctcagggaagattcagggttgcagaatgtgagttcaggggcacaggttgcgcaacactctgccgagtcgggagacgaagtgctacggtttgaacaggaaactgaacagaacgactaaatatgtgaggacgtaagactttcatggccagcacggcaaagacgctcacctttgtgatccccgcatacaatatggagtcctatctcgaccgttgcgtgaactcgctgctttcggcaagcgacaccagcgacctcgaggtgctgattggggacgacggttcgaaagacggcacgctggagtacgcgcgcaaactggaacgcaccaatccaggtgtcgtgcgcgcgattcaccaggagaacaaaggccacggcggcgcggtgaacaccggtatcacggcggcgaccggcatgtatgtcaaggtggtggatgcggatgattgggtcgacccgcaggccatcgacacggttctggccacgttgcgcgcgcaacgtgaggccagcgagccgatcgacatgctggtgaccaactatgtgtatgacaaagtgaccaagcgccacaagatcgtggtgaacttccgtcatgtgatggaggccggccgcgtgctcggctgggatgacctgggcaagttcggtctggcgcagtacatcatcatgcatgcgctcactttccgcacgcaggtggtgcgcgattccgggctgaagctgccggagcatacgttctacgtcgatttctattactcgtaccagccgttcccgtgggtgaagcgcatccagtatctcgacgtgccgttctaccactacttcatcgggcgcgagggtcagagcgtgcagaccgacgtgatgattaagcgtgtggatcagctgcggctcgtcaatcggctgatgaccgaggccacgcccgaacgtggtacggtgccggaggggctgtaccggtacatgattcacttcctgacgatcgaatcatgcgttacctcggcgttcctgattctctcgcgcgatccggccaactacattaagaaaaccgagctgtgggatgcgattgacgcctattctccggccatcggcaaggatgtgcgctcgaagctgatgtcccgcgcgctcaatctgcctggtaaaaccggccgctggatcgtgcgcaacggctatctcatcgccgaacgcatcgtcggcttcaactgattcggattgcggctttgccctgctgacgcgttatcagcagggcatccctattacctccccagccgaggttttgctactcggcccaacggtcggacattgcgaagctgttgtgcatcaggttgctggaggtgtatagcacgtcgttcagcagcttggttgtatgctcgcgcaggtagtcggccatctcgtcgttggccgcttcgagcacatccgccacgccctgcacatccttctcatcgccgtggccgccatcgagcggccatgcattcgtacccgtcgattcggcatcgcttcgagcaagcaactgctcatccgtgcgctcgatgagccggtgcccgaacgcgcgcacgccttccgcatagccctcgatgaaccggttcgtctcataccaatgcgcgtcggccacgacggcgatcaggcggttcgtccaatacaggttgccggtggagacttcgggcgtggtgtcgcgcaggtaggcaggcgtgtcgttgacgttcgcgtagaacggcgcggcggcggtgaacggaccggagccgaacgatacccacatcaccgtgcgattggccgccggcacatacgggcggacctgaatcgccaccatatggccggtgcggttcacgccgatcggacggtaacggtggcgcgattccgccgtgccggtcgtgccgtacgggtcgtacggcgtgccttcgaagtgcgaggacagcaggaaatcaacgtcttcgaggctcaccttgtcttccggcacgcggcaccacgggatgtcgtcggattcgggcgtgtagcgggcggccggcgaatcccagtcctcgctggggttgaggcggcgttgcatgtaccaggcacgcggcgtgttgtagatatggtccttcggcgtcgcggtgccgaaggccttgcgcgggttgaagcgggtgggaagggcaacggttgttccgaatccggcgctatgcacgtgacggccgttggaagagaccgacgttcccattgtgcggtcaaggtgatgcgtggccatgaactcgcgcaggtcggcgctgcataggtattcgcgctgctcgccgaacgcatcggcgaggtcgaagtcgtcgatgccgagctggttggggatcgtggcatagcagtcgtcgggcactcggcgggcgatccaatgatggccgccgatggtctcgacgtaccagatctcgtccgcatccgaaataatcacgccgttcgattcgtaggtgccgtaggtttcgagcagttcgcccaaccgcgcgacgccctcgcgcgcggtggtgacgtacggcagcacaagggtgatgatgtcttcctcaccgataccgccgggctgctcggcctgataatcggtgctgtccggcccgccgacagccggccgcaactcgaccatcgggtccgcaccgagcacgcgctcgttgacagcgatggtttcggtggcgctcatcgccacgttgtgttcgttggcaccggcttcggccagaatgccacgattattcagcacgttcggtgcgatggtgtaccggcaaggattgtccggtagttcgatttcgacatggctcagcacgctgcggtagtggcgcggctggtcgtcgggggcgacggcgacgaagcgcttgggatcgtaacggcccgagcccgaatcgtcatcgcgggcgatgatggtggaaccgtcgtaactggcatttttgccgacaagaatcgtggtgcatgacatggggcaccactctaggagccaggctggtcgaaacaaaaaatccttggaaccattgcgattccaaggatctgttgtgccccctgtgggattcgaacccacaacccacgacttaaaaggacgctgctctaaccgttgagctaaaggggcaactcttctaaaatacacaccgttttgggatatttcaactacggcgttgcgtacacgtttgcgtacgcgattggcccaacgcacggcacagcacacgcaatgtggcccaaatcgcagcccaaatcgcatatcgcctctagcgatagatagccgccggcggctacccttgtacattatgagtgaatcccccaattggagcaatcccctgcgcgattcgcgcgacctcagactgccccgtatcgccggcccgtgcagcctcgtcattttcggtgtcacgggcgatctggcacaaaagaaactgctgccggccgtctacgacctggcgaaccgtggcctactgccgccgagcttcggcctgaccggcttcgcccgccgagactggacacaggagcggttcatcgaattcgtcaaggccgccgtccgggcgcattgccgtacgccgttcaaggagtcgacttggcgcaatctggccgccggcatccgcttcgtgcagggtacgttcgacgatccggaggccttcgagcgtctgagcgccaccgtgcaggagcttgaccgcgaccgcggcacgcagggtaaccatgccttctacatgtcggtgccgccgcgcgccttcccgcaggttgccaagcagttggccgcctccggcctgtcgcgctcgtccgagggcgcatggcgccgcgtgatcatcgagaagccgttcggccatgatctggccagcgccaaggaactcgacagcgtggtatccgaagtgttcgacccgagctccgtgttccgcatcgaccactacctcggcaaggaaaccgtgcagaacctgctggccctgcgtttcgccaacgccatgtacgagccgatctggaacgccaactatgtggaccacgtgcagatcacgatggccgaggacatcggcatcggcggccgcgccggctattacgacggcatcggcgccgcacgcgacgtcatccagaaccacctgcttcagctcatggctctgaccgccatggaggagccggtgagcttcaccgccaaggacctgaccgccgaaaagaccaaggtgctttccgccgtgcgcctgcccaaggacctcgccgccaacaccgcgcgcggtcagtacgccaagggctggcagggctcgcacgaagtggtcggctacttggaagaaaaaggcatcgaccccaagagcaccactgaaacgtacgccgccatccgcctcgatatcgacacccgccgctgggctggcgtgccgttctacctgcgttgcggcaagcgcctcggcaagcgtgtaaccgaaatcgccgtggcgttcaagcgcgccccgcatctgccgttcgagcagaccgccgtgcgcgaactcggcaagaacgccatcgtgattcgcgtgcagcccgacgagggcgttaccatgcgcttcggagccaaggtgccgggcggctccaccatggaggtccgtgacgtgaacatggacttcagctacggccgctccttcaccgagaactcgccggaagcctatgagcgactgattctggacgtgctgctcggtgatccgccgttgttcccgaccaccgaagaggtgaacctcagctgggagatcctcgatccgattgaacaattctggtccacgcttggccagccgcaggcctaccgcgccggtacgtggggtccggcacaggccgacgaaatgctggcgcgcgacggccgccactggaggatgccatgatcatcgatatgccgaacacccgcacccgcgagattgcgcacaaaatcgaacagctgcacgaggagcgcggcgaatcggcgaccggccgcgtgctgacgctactcatcgccaccgaggacgcggacctagagcatgcgctggaaatcgcgaactcggccagccgtgagcacccgtgccgcgtgattgccgtagtaccggataccaatcctgccgatcagtccggcgaaggcgaaccgaacgagaccgaagtggccgccgaggtgagcgcgaatcgcgataatccggccgtcgatttgaccgacggcccgaacgatccgaacgattccaacctgaacgcccaagtgcgattcggcgcggacgccggtgccggtgagattatcatcttgcgtccgcgcggtggccttatcaaccacccggatacgctggttatcccgctgcttgtgccggatgcgcctgtagtggcgtggtggccgaccacaccgccgtcgaacccggccaaggatctgatgggtgcgatggcccgcagtcgcatcaccgacgcgctgcactccaataatccggaggccacgatcgagcgtttgcgccgcaattggacaccggaagacatcgacttgtcctggacacgactgaccgtctggcgcgcaatgctcgcctcgatgctcgatcagccgccgcacctgcccatcaccgccgtgaaggtgaccggcaaggccgacttcctgcctctggaaatgctgtgcgcatggctgcgtctgaaactcggcgtaccagtcgaaactgagttcgtgcccgacgcgcaggccgtgaccggcgtgtacctgacccgtgaggacggtgtgatctcactggaacgcccgtatgaggaccaagcgctgatctcgctgcccggccagactccgcaggaagtgtccgtgccgatgcgcaccatcgaggactgtctgaccgaggaactgcgccgcatcgatcccgatgagatctacgccgaggtcatcaacgaaggctgggatctgattcgtcactgaagtcggtagaaccgttgccacagcggcgttggcatgagttcggcaattgtggtcgagccatgccaacgccgttgctcatcgtttcctacctcatgcgatgccgaagctcatgaccgcggagtaataaagtgacatatgcgatgtcgcacaatgtacattgtgttgtcaactgacaacacatttcattgctgcaaatggctggattcccggcatgccacccgtattatgcgttgtcaactgacaacacaatccacattgcaaagtacgacacataccccatataaggaccatacatggcaactcgaaaactcattgtgtatccgaataaagatctgatgattcaggctggcgcgcaacgttttgtcttggcgctactcgatttgctcgccgaacgattgcctgatggcacgcatcgcacacgtgtggatgtggcgctgtctggcggttcggccgcacagccgttgggtttggcgctgaacgatccactggctgatgcggttgattggtcgcgcgtgcatttctggtggagcgacgaacgttttgtgccggcttacgacaccgatcgcaatgctctggaggcccgtcgcctgctgcttgaccagctggtggcggatggcaagctgcctgaatcgaatattcatgagatggcggccgatacccgttcagccgatgacatcgccgatgtgatggatcaggccgatagtgatgacgcttccgttcgcgccgccgccgatgccgcgaatgatgcgctgctggacgatgccgcgagcgactatgagcgcgagttggtgaatgaattggggccggaaccggtcatcgatctgatgattctcggcatgggaccggacggtcactatgcgtcgctgttcccgggtcatgatgaggtcaaggttaccgataggctcaccgtgggtgtgaaccactcccccaagatgccgccgttgcgcgtctcgttgaccgcgccgctgattgcccgctcgcgccgtacatggttcttcgccgccggtgccggcaaagccgaatcgctggcccatgtcttcgagcagcccaacaacccggattacccgtcctcctacgccaacggagtggacgagttcacctggttctccaccgaagaaaccgtcaccgagttgtgatggcgcctcctgtgggccggaccctgaatgaggggcccggcccacagattgtcgcagacgctcaagcctgctgttcctcgggctggccttcctgcgcccagagggtgtggaacacgccgggcttgtcgacgcggccgtaggtgtgggcaccgaagaagtcacgctgggactgggtcagggcggtgggcagacgcttggagcgcagaccatcgtagtacgccagggagctggagaacaccggggtcgggataccggcctccacggcacgcacgattacacgacgccatgcatcctgcgattcgccgatgatcttctcgaagtacggatcgaacaacagggaagccggcaaattatcgcccttgaaggcctcggtgatgcggtcgagcaggaactgggcgcgaataatgcagccgccacgccaaatgcgggccacttcggacaggttgatatcccagccgtattccttagcaccgtcctgaatctcgttcaggccctgagcataggccacgaccttggaagcgaacagggccttgcgcacgtcctcgacgaacgcggccttgtcttctccggccagatcgatggtcttgttcgggccagccagaccttctttctgagcgtcttcacgcagctcaccgtgcgaagacagtgcacgagtgaacacggcttcaccgatagcagccacaggagaaccaaattccagaccagcctgcacggtccaagtaccagtacccttcatgccggcatgatccacgaccacgtccacgaacggcttgccggtctcggcatccttgtggtgcagaatctcagcggtgatctcgatcaggtaggagtcgaggtcgcccttgttccattcagcgaacacgtcgccaatctcctcggtatccatgccgagtccacggcgcagaatgtcatacgcctcaccaatcacctgcatatcggcatactcgatgccgttgtgcaccatcttgacaaagtgaccggcaccatcggtgccgatgtgggtcacgcacggttcaccgttcaccttggcggcgatggactgaagaatcgggcccaaggtcttccaggattccgcagtgccaccaggcatcagagacgggccgttgagcgcgccttcctcaccaccggacacgccgcaacccacgaagtggaagcccttggcacgtacttccttctcacgcttgatggtgtccttgaagaaggagttgccaccgtcgacgatgatgtcgcccggttcgaacacctcttccagctgcgcgatagttgcgtcggtcggagcaccggccttgaccatgatgatggcggtacgcggacgcttcagggacgcggcgaattcctcgagcgtttcggccggcacgaagttaccttcggcgccatgctcgttcatgagcttctcggtacgcgagtagtgacggttgaacaacgccaccgtgttgccatggtgcgccagattacgcgccagattggagcccatcgtggccagtccaatcacaccaatgtttgctgtagcttcggccatgcgccttgcctttcgtttgattgtcccatcgtcatcacgcgcgtcacaaaacagcacatcagcggagggaatcattccttcaacgcttgaaagtgtatcccacttaccaccccacacgcgaaggctgtcttaggttctacgcaccttctgcccgcgaagcgtaattacttgccagccattcacatacgcccggccttggaagggtcgatatgcatggtctggaagcgattggccatgtaagcgtcgctgtagcgttcgctgaaccacatcgcgaccggtgaatcctgcggctggccggccatgcgcccataccagcaatccaaggccatcagcgtgaaggcaatgtcgatcaccatcagcaccgtgcataccgcagtcagcgaataccgtactttccatggaatgcgattaatcagagccagcagtcgcggcaacagccacttgacccacaccacaccaatcagtccccagaagaacatgaattggcccgaagtacgtccgtcgatggacagccaacggccggtgtaatcccacgcggtaataccgaacgccacttccatgaaccagctggtgcagtattcgaacgcgccgccgatcaccgccgaagcgcagaagatcaagaacggattcgccttccacaggcgattcaggcacacggttaccaataccgcaccacagccgtaaatcggcgagaacgggccccacagcaaacccgcgcggtcctgaagttcaccgttatacagcgccatatggtagatcgtctccataatcaggccacccaccgaagcgatggtaaacagccagaagatattgaagaagtccagtgcaatatagcccttgccggattggtcgcggcccagcatgccggccgccaccgccgattcataatcatcgcgatcgtccatgcgtttgagcgcgcgctgcaaacggcgttcctcgctcagggagggatcggcggtcaccgaaatcacgacgagaataatcatctgaatcagcggcagcagcaggttgaagccaaggccggtcagggccagcgacagcatgccgtcggccaacgtcaacggcatcagcacgtaggtccagcgcgcggcataccggcgatgattgcgcagcagcatcacgccgaacacaatcaggcatgcggcactgactaccagcaccaccgcatgaatcgcggacaggatgaaagtcaggctcatcgcatcgacgtgcacatgaccatccagaatctcgcgcacggcatagaggatggaaatcaccataatcggcaatgtggcgagtccgtccagcagcacgaccgcgccatagatgcgcgccagaatcggtaatcgcttggcgttcgggttcaagccgacgtcgtccagttcgacggccaccagatcagccacgactgcggactcggcgtcacggttctcccgcggcttgccaggggtagtggccgtgccatcgtccttgaattcaaccatggtttcctccccacatagcgtctccttacactatcacccgattgcagttttgccgaacttgatggacagccggtacatgtctgtctacattgccggacaccgagcccgctatcgctttcaggaaacatccaaaaaccatccagaaatcttgtcaataagttccagaacgcctttcgctccagccaaggcactgatggccagtccggcaccggcagcagctccggcacaggttctgatacttccggtaactccaactccgaccagtcatccagccagaacgagcagtcggccattgatggtcaatccggcaccatcgaaagctgatacaacggtttatccatggggcggtagctctctcatgaggcggtaattaccccatggggcggttagcccaaaaccgcattccgcggaataaagccattttaagccaccgccccatgggaattttaccgccccatgggccacttaccacccaatgaaggttttaccgccccatggagggcagcctcacaccaacacacacagcacacccggccacacagcaccccagccacaaaaaattaggcacactgcccagcgacacacgataagccgctgggcagcggcgttattccgccaaaaccatcatcaatcaccccaataatctccggcagccgtattacgctactacaaccgtagcgctacgattaacgtatcgctacggaaaacgtagcaaccaagcaacaccaagctccggaggtatcagtgggcaatatcttcaaggtcctcaaacgcgacttcctgcgcctgttcaaggtgccggccgcatgggtgatcctgttcggcatggtgtttatcccgccactgtattcgtggtacaacatcgtcggcttctgggacccgtacggcaataccaaaggcatcaccgtcgccatcgccaacaatgacgacggcaccgacaacgcgctcatcggcaagcaaaacctcggcgatcaaatcgtcaagcagctgaaaagcaacgaccagctcggctggaccttcgtcaccgaagccgaggccatggaccaggtggaatccggcaaggcatacgcagccatcatcatccccaaagacttttccgacgatctcgccggcgtggtgaccggcggcaagagtcggcccactctggagtattacgtcaacgaaaaagccagcgccatcgcccccaaagtcaccgacgtaggcgcgtccactgtggaccgcacggtcaattccacattcgtctccaccgtatccgaagtacttaccgaagtcatcaatacggttggcggcaaagccatcagcaccgaagacaccaccaaagccaaggccctcacggcccttgccgaggcctccggcgacgtgcagcacacacgcagcaccatcgccaagctcaccaccaaactcaccgataccccggagcagacacgcaccgcacgtcaggcgctggacgacgcgcgcgcacttggcatcgacaccgcggaaggtctggccggcgtctccaccctgatcggcactacccaagccagtctgaacggcttcgtcacctccacgtccgaagcgcttgaccaaggctcaagcctgctgagccaggccgcagcacaggccaaccaaagcgtgggcacggtagccggaaccatcagcgccgccaatcagcaggtaggcggactgatcaatacggcggaagacatcaaccaagcgaacgccgacatcatcgaccaactcaaagggctgccgaacgccgatcgagaaccgctgcaatccgccattgccacactggaaagccacaatagcgagcttgccggcgcactgggcaacctcgatagcctgaacaccactatcggcaacgcctccacagacaccgccggattggcgcagcatctcaataccgccacccaaaccacggtgcgcgaggccaataccgctcgcggcaccatcatctccggcgccattcctcagctcaacaccggtctcaacaccctcagctcgaccgccaacactctgtcgaccggcatcacgtcgcaaggctcactcatcgatcagtcgaagagcaccctcgatcaactcgacaaagccgcctccaccacggtgaccgccctgcacgacaccgataaggcgctggccggcatgcaaaccaagctcgatacgctgaccaccgacatcaaagccctgagcgtctccagttcactcagctccctgatcggcaccgacggcaaactggatgccgccacaatcgccgacttcatgctctcccccactgttatcagcgaacgggccgtctacccggtcgcctcctatggttccggcatggcaccgctgttcaccaccctgtctttgtgggtgggcgcgttcgtgctcgtggtcattcccaaactcgaaaccgacgacgagggcatcgacgatctcacgccaacccaaggctatctcggccgtttcctgctgctggccacgctggccgccgtccaaggcctggtcacggccatcggcgatcttgtcatcggcattcaatgcgcgagcgccccggtgtttctgctcacctgcgtcatcacctcactggtgtatatgtcggtgattttcgccctctccaccacgttcatgcacgtgggcaaaggcgtgtgcgtggcgctggtcattctgcaggtgccgggcgcctccggcctgtacccgattgaaatgatgcccgcgttcttccgcgccatctatccgctgttgccgttcacctattcgattgacgcaatgcgtgaaactatcggcggcttctacgacggcctctggttcgcctatatcggcaaattgctggttttcgcggttctggcctttgcgcttggcctcggcgcccggccgaaactggccaatctcaaccgcctgttcgcgcgggaaatcaaggaaagcgacatgattatcggcgagccggtgcacctgcctggcagcgaataccgtgtcactcaggccattgcggcactggccgaccgcgacgaataccgtcatgccatcgaacgtcgggccgccaaattcgcctaccagtatccccggctgctgctgggtgcgcttatcgccggattcatggtgccggccgcgctcattatcgtgtttgtgctgaccaccagcgagaaaatcgtggtcatgggcacatggctggcatgggtgctcatcatcatgggcttcctgatggtcgtggaattcatgcgcgattccatccgccgccaaaccgagctcggcaacctttccgacgagtcgatccgcgccatgctgtacgggcataaggccaagcgtcgcgacacctccgccgaacgccacgaagaagcggacccgagcgccgccgttaccgcaatcatccccactattccgccgaccaaggaaggcagacacgcacgatgaacaccatgtggaaactgtttaccggcgacatcaaacgcctgaccagcaacgtggtctccatcatcatcgtgatcggcttggtgatgattcccggcctgttcacctggttcaacgtggccgcatgctgggacccgttctcgaatatgaagaacctgaaattcgcggtggcgaatgtggatgaggggtatcgttccgacctgatcccgatgaaagtcacggtcggtgatcaggtggtgaacgcgctgcgcgccaacagtcagctcgattggacgatcacgtccaaagccgatgccgtcgagggcgcacgatccggcaaatactacgcggccatcgtaattccgaagtcgttcagcaaagacatgatgaccttcttctccgacgatgtgcagcatgccgaactgacctattaccgcaacgagaagaagaacgcgctggcaccgaatctgctcaacgagggcacggacgaggtggcggcggaaatcaacaccacgttcgccaagaccatcacttcggcagggctggaaatcgcgtcttcgctggccgatcagctgtccaagcccgaagccaaagagcaactgaataccttcaacgccaatatcgccgatttcgccacacggcttgacgatacggcggatttgcttggcacatacagcgcattgaccgatacggccggcgccttgctcgacacctcgaactcactgatcactcaggtttcctctgccgccaaacaaggcggcaaggatcttgccagcgccaaacaggaagtcaccgacgtggccggagccctgggcac

SEQ ID NO: 2348 - DNA, 12567 bp, Unknown
  R50_10m  MAG No. k141_489
caccataagcgatcagcagtgcgacgtggtgaatctcgcgcacgtcgccggcctcgacggccatggagatctgcgtacgggtgtggcggcgcagcaggtggtgctgcacggcggaggtcagcagcagggacggaatcgggccccacgtgtggttggattcacggtcggagagcacgatgaagttcttgccgtcggcgatggcctcgtcgatttcggcaaagatctcgtcaagtcgctcttcgagggccttgccgccgccggcgacctggtagaggcccttgaccacgtacgggcgatagtagccgccgaggatgcgggccttgtcaaggcgcttgagctgggccatctcatcagagttgaccacgggcagcgggatgaggatcttcttggcgtgcagctcggaatcggccagtaggttaggctcggggccgatggcggattcgagcgaggtgacgatctcctcacgctcccagtccagcggcgggttggtgacctgcgcgaacttctgggtgaagtagtcgaacagcatgcggctgcggctggagagtgcgggcataggcgcatcgttacccatggatcccagcggttccttaccggtgttggccatcggagtgagcaacagcttcagatcctcttcggtgtagccgaaggcacgctgacggcgctggacggactgtccggagtggctcacgtgctcgcggcggggcagatcgctcatctcgaccgagttgccttccacccacttgcggtacgggtgctgggaggcgagggtcttcttgatctcttcatcggggatgatgcggccttcggcggtgtcgaccaggaacatcttgccgggctcaagacggcccttggacacgatgtgctcctgcgcgatctccggcagtacgccggcctcggaggccagcacgatgtagccgtcgtcggtgagctgccagcggccggggcggaagccgttgcggtcgagcagggcgccgacctgggtgccgtcggtgaagacgatgtcggccgggccatcccacggctcgataagcgtgttgctgtactcgtagaaggcgcgcacgtccggatcgagatccgggttcttctcccaagccggcggcagcatcatgcagatggcgtgcggcagggaacggccggcgaggtgcagcagttcgaggcactcgtcgaaggtgccagaatcggagtagcccggagtggtgatgggcagcagcggctcgaactcgccgagcagttcgctgctcagacgaccttcacgggcggagagccagttgcggttgccctgaatggtgttgatctcgccattgtgggccagcagacggaacggctgggccagcggccagctcgggaaggtgttggtggagaagcgggagtggacgatggcgatggtggccttcatgcgctcgtcgttcagatcctcgaagaagtgggtgagctgcatggtggtgagcatgcccttgtacgtgatggtacgggcggacagggaagcgaagtagacgcctacctcatgctcgacgcgcttgcggatgcggaaggtcttgcgatccaagtccacgccggccagagcaccgtccggagaggcgaccacgagagtcttgaatcccggcatggcggcaagggcctgcaggccgaggccgtccgggttggtgggcaccacgcgccatgcgagaacttcaaggccctcctcgcgcacgatcttggcgatggcctgttcctgctgaccggaggtttcgatgtcgcggtcgaggaaggcgatgcctgcggcgtagtggccggcttcgggcagttcggcgggcacggtggcacgcatgaactcatccggcatgctcatcagaatgccggcgccgtcacctgtgttctcctcggcacccacggcaccgcggtggtcgagattgaccagtacctcaatggcgtcagtgacgattttgcgttcaggacgcttgttcaaagtggtgaccatacccacaccacaggcgtcatgctcgttggcgggatcatacataccgtccggagcgtggaccgtgagatcgagcggggctttgaatgtcaccggaatcacctcaattgcttgtgggcacgtaagggaatcgtgcctcttcgttcattgctgttgacacagtaccgttgctccatgtcattttcgtttcgcgtgtccatataccgagtcgccataaaagtcaatagtgattctcaagcaattgtttttatggccagttatgggggtatttcgaactttttcgcccgagatgtctatttgaccacacgaaaatacgatacggaaacgtccgtatcgtgaaatgctgcgttgggtgatgttacggattggcggctgtggaccaccctcagtcatgcttcgcatgacagctcccgccagcgggagcgataaatgcgaactgccagtcaacggtaaggttgactggcagttcgcatttatacaaggcgcaatagtctataagcgtttgttgccccgtctggagggtttctcgcctcttgatgctggtgccggactggccggtgaccggagcgatgccggcgtgggcggccaggtgggccgcgcttttgaagttggcgatgtcgccgccgatgccgagcaggatgctgcttgcggtcctgacgcctgtcccgggcgattgtggcatcctgtgcatgtctgacaccatagcgatcggcgcgctccgcgaactcaccgaacatggcatccgcgtgcccgacgacgtacggctcatgggattcgacggcatccccttctccgactgcgccaacccgcccattagcactgtggcgatagacgtccccgcaatggctcgtacggttatcgatcgcatggtgacgctgatcgagtcgaacctacggcatgaacggcccgatgacatcacccatgaccatatccagttccaggtgatgccacgcacgtcgactctggccgcctgataccggccggcacccttatgagtgccggccttcatccctgaaaatatgggtctatgccacgtacagcgcggcgggatacgtgagatatgaaatttcatcgagctgatcgaccgtcacatatccggctggcgcgttgagcacgtccggaatgcggttgacgattgtggcgcacgtatgttcgacggtcgccggcttgaccacgtggaactccacgtccggttcaccctcgatcttccaatcgcacatatcgccatcatccggcccgtacaccttgccgatacaggcagtttccaacgtgatgccctgattcgtttcggtggttaccacggcggacatgccgatgcatttgccgaccggaatcgtctcgtccatcgtctcggaatacacgtcgacatcgctgaaatacggcacactggcctgggtctgcgatgcgatggtaagcccaagcttctgggccagcgcttcattggaattccatacatacgagggcaccacggtttcgggatgcgcaagctcggcctcgaactcctcggcggtcagaccgcagccgtgcgctttggccaaagccaggccgtaatcctcgacgttgtagctcaccgcaccggtgatcttcttgatgctgtggcatccggcggcgacggtggagaccatgttcacccagtagatgtcctgcatgccggagccgaccatggtggcaccggcttccttggcgatgatgttgagacggttcgtggtggccggatcggtggtccacgggtagatgcattcctcgcaggtggtgatcacgctgatgccgcgggccaagcactgctcgcacatggtggcgatttcgttctcgaagctgaatagcgtgactaccgcgatatccgcgtcgcactcgttgagtacagcctcggcatcggcgcgaatcggcacattgatggggccgatgcctgcaaacacaccggcatccatgcccacgacttccggattcacgtcgatggcaccgacgatttgaatgcctttctcgtgcatatagcgaatcgtgtacttcgccattttgccgcagccgtattgaatggctttgattggttgcataccgcatactcctttgcaacagtgcatattggccattggagaagtctcaccgtcgagaccaagccaatagccttaactctaccgacatcaggctgggcattcactgatatcggcggcactggagcgtcgggaagagtcggcgtagcggtaccgctaccgagcagaaggactgggccagtacaggtcctcccgccgaatcacggcatctcggcatccgtcagttcctgttccgtcgtatgggagaggccgatgactatcgtaaaaaacggcatatcagcaacttataactacccttcctgtatccttaatgtacaagccccgtgttgaccgccgtttttcatgtcaccggggcattgcaatacgaggtaagggggcctcgtgattcatgcgttacaatcatccgttatcaccaatccgcagtggattgaggagtggctttccgccccgcgattccgtacataccttgacgcttgccaccaagatgcgcttacagccttactttatacgagtggaatgttgaccttggtcaaatcctcgtgaaggatgtcgcctttttcgagatcgctctccgaaatgcttatgataggaacctcgctaaccattggcagaagggtcagcattggctgtttgaccaacaatcaccggtgaatcggcccattccacgccgaacgagctccggcaaacctttcgacgcgaatgctctcagcggccgcgccaacgcctgtcgaacgattcctagccaaaactccatgcccagccattgcgcggtagcatggtgccactcgacttaccatctacttccggttacgcagggcgtggagcatggcgacgaacacgataacgataacgatgaccacagccatgatcgcgtagtcaatctatgcgccggtcacggtggcggcggcatagccggcggaacccaccttgcccgagccggactggaacacggagatcacggtagcccaccacagtggtgccggccgcacccgtgaactgctgcagcgtggagaacatcgcgttgccgccaggaagatgctgcgctggcggaagcgacggcgcagccatgcgctgagcggcacagtaatcgacacgaccagcggatagccggtggtgagccattggatggtggcctcgctgatgtggagcacgcccatcagctgcgggaacagcacattcatcacggtttcggtcaggatgccgaagaatgcgagtgagccgacggccacgatcgcgcagatgagtttgccggggatgcgttcgtcgcgggccgattgcatcgcggcgtctgccgctgagatagtgcccgaggtctggggctgagtcttcagagttaccgattgttcaaaagtcacactgtaacaataacactacggaaagcgattaccataaagcgtgctcacagtcgcccatcatgcggacttttcgaaaactgttgataaataggcattttccgcaaggaatccttgcataacactatgattcagaacatctattagtatgacgtaaatcacattacgaactatttaaggtaagcgcttacagttcggcatgggagactcctcgtcacgatatgaatgcgctacagtcactatcgattgatacgcacgccccatcgactacgcgatttcgccgtcgccgtacgcgcgttcggaggcacgcagacacggcttgccttgcaccacttcgacctgcgagggcggcgcgtcatcgccggcacgcttggcctgaatctgttcgaacagcatccggaaggaccgctcccccatgtccaggaagttctgggtgtaactggtcagcgccggattccacatggcaccgaagttgcggtcgtcaaagcctacgacgctcacgtcagcaggcacgcggcgaccaacctcccttagacctcggatcacagcgatggcggtctcgtcgttgccggcgaaaatcgcagtcacatcaccacgacggcccaaggtgcgcccagccttgaccgactcctccaaatcatcgtcgggcacgatgattgggtcaggtaccgtgacgccgcgctccttgagcgcgtcacgccacccattggtgcgggtgttatcggtcggtccttccgggcgccccacatggaacactgtgcgatggccgagatccagcagatgcatggtcatccaacggccaccatccctttcggcgttgatgatctggtattcgccgtcgccgaagctgccacccaccacgaccatcggcatatctttgggaatgtattccagtgcggcgatgccggcccggtcgtactcgtagacgatcacgcccgccggcctgatcgacaaacccatgcgcacacgagccttgacggagtccatgtcggactcatccaaagaaacgatattgagcaggaaccgacgtttacgggcggcggcctcgaccccatggttcgtttcggacgtggagaaggcggaaggattggccgcgaacaccaccacggagtccatctcccggttcgacagggcgcgcgccacaatgctcggctcatagcccagctccttgatggccttggcgatgcgttcacgcttgtcttcggtgacattgacggtgccgttgagataccgggagacggtcggtgccgagactccggccagtctggccacgtccttgatcaccggtcgggtgcggcccgcacttctcgccatccttgtctcccctgttgttgtcagttgttgttgttgcgtacgtcaaggagaaccggcatcaccatggcagtcatccagtcacacccatatccgttcagccgcgctccgacttcggttccccgtttttcgccgcgattcattgtagttcatgacggggaacctatatccaaatcaataacttcgcgaaaaccgtacgctgagttgcggtgagtgtacggtttccgcgaaatcatccctaatttcgtgaagaacgtacactgaatcgtcgtcaacgtacggttttcacgaaatggggcctcatctcgtgaagaacgtacactgagtcattctgagcgtacggttttcacgaaatggcagctgatttcgtgaagaacatacgctgaagatgccctcggtgtcactgatgactgttctcggtatggaaggcggcgcagcaaggtgtcctaggctaatatcgcctccgacaagaccgtcggcaaagccgtcgacgtcgattcaagttatccacaccaacaattcgcgtgacatagtattcacatttgccggttgagcttgtgcaacaatcaaaatcacccttagcgtcgagatatgaaagaacacaaggaagtttctgcactgctgcagcaggcgaagcaggagcgtcgctgctgctatggcaccagtgatgcgcaacggcgcgccctgaaacgtcgcctgcatgccggggagctggtgtcaccgtataagaacctgtacgccgaccgaatactttggaacaccatgaccagagagcaacagtcattgcaggtcatacgtgcgctgtccgcaatccaccctcagtgggtatttgcggggttgagtgcggcgtgcgtatacggactgcagcacaactattccctgcacgacggcacagtgcacatcgcctcgaagtccggcatcggcggcggagacgaggcgcgtctcaaccgcatctatatcaatcggattccgacgcggaagcataatggcattctcttgacgactccggcgcgaacgctgctcgactgcgcggcattcccattcccacaggcgctgcccatatacgattcggctctgagaaagtccctgacgaccatcgaagaggtgcagtcgctgatgattcaaagcgtctgcgacgaggtctccgtgaccaagctgctgaagtacgcggatcccctgagcgaaaacggcggcgaatcattgatgcgtggccagatcaccgaattgtctttcggcattcccctgctgcaggtgcagttcatgaatcccgacaatcccgcaatgccatatcgcgtcgatttctgttggaagctcgcagacggccgcatcatcgtggcagaatacgacggcatggccaaatacgccgacaccagcaacaagaatcgcgcaagcctccaggcgaaaatggagtacgaccgcagacgtgatcggcatctccgggaacagggcgtcaccgaaatcgtccatgtgttctatgaggatctgctacgccccatcaatcttgagaccaagctgctcaaggccggtgtgcccaaaatccggtgaagataggccccatttcgtgaaaaccgtacgcccagaacgactcagtgtacgttcttcacgagatgagaccccatttcgtgaagaccgtacgcttacgacgactcagcgtacgatttccgcgacatgaggccatttcgtgaaaaccatgcgcccagaacaagaccgtcagaaagtcgactagacagcctcttaactaccgaacggtatctatagaacggcgatattccgccagaaacgccgagagcggaatagtccccttgcgtttgtcatcggactgcgttattctgaaaccggtttcagaaagaaaccgataaacaaaactcaaagccacaaggttttgaccaacgaaaggaaacatgatgtctctcaaggattccatgattcgcggtctggctatgtacggtgccacttccctggcccagtccggtcacgccaactcccagatgattctcgacatcatcaacgacaccgataagaacgctcgctgagcctcttccctgactcgccgctcacacacggcccgtctcataacgtaaacaacaacacatcgcaaagcccacggctttgcaagtcaagacaaggaacacattatgtcattcatggattccatgattcgcggtttcaccctctccggtatggacgccatcgcccgcgccggctacgccgactccaagatgttcgccgacatcatcaacgccgccaacaaggacgctcgctgaatctagcgaacgatcccattcatgagattgcacgacacatacgaaggcaatcccccgcaggccgcaatcggccggcacaccacaataattgaataacgcaataattcaacacagtaataactgaacaataaccgggacaacggggtccatatattctttcttttcccatcgtgtgtgcgccgtgccagcacaggttcacatacgatgcacacggccaccaatacacgatgcgtcatcatcaacgccctcaccgcatcatgagatactccccccgcccgttgtccacactgttgcctctgcaatgcctgtgatgcacgccgaacggcatcccgcgcagtgactgaagaacgaaaacaccaagggacggaaatggataacgaactcttcgaaaaggcgccgattccgaaggcgtatttctcgctggcgatgcccgtggtgctcagcatgctggtcaccttggtgtacagcatggtgcgcatatcttcctttccgaattgtgtggctccctctgacgagggagctgtcagcgcagctgactgagggagagaagcagacgaatgactgtatcggctgaaagccgatgccattttttgcggctgcgccacaagtctcccccctcagtcacggctttgccgcggcagctcgtcccgcaattatggagccttcggctgggttgactgtcgtcaagccctcgcctggaaacgcctccggcgtttccttcacggctcggcccatcagagggagcttgtgaagctgcttcagttgtagggttcgtacgacttgttcggtggtgcgggtcacgttggcggccgcgtcggccagcagttcgctgaggctggcggcaccgggggcgatgccgaataccgcgtcgatgccgacctcatgcagttcgtcgatgcccgtgccgatgtgtccggcgacggcgatcacgggcttgccgtggcgcttggcggtttcggccacgccggccggggttttgccgaacttggtctggaagtcgatggagccttcgccggtgaacaccacgtcagcccattgcgcggccgcatcaagtccggattgttcgatgacgatggcgatgcccggacggaattcggcgtcaaggaagcctttcagcgcggcgccgataccgccggcggcgcccgcgcccggcacgtcgttcacagcgacgccgagccggctttcgatgacctgcgcgaagtgcgccaacgcggcgtccagtgtggcgacgtcggcctgggaggcacctttctgcggtccgaacacggcgctggcgccggtgggaccggtcagcgggttggtcacgtcgcaggcggcggtgatggagacgttcttgagagccgggtccatcgtgctgatgtcgatggtggccagatcagcgagggccgctcccccgtgcttaaggtcgttgccgttcccgtccagaagacgaacgccgagggcctgcagaagtccggcaccggcgtcgttggtggcgctgccgccgagcccgacgatgatgcgcttggctccggaacgaacggcggcgagtatgagttcgccggtgccgtaggaggaggcaatcaacgggttgcgttttttggcttcaagcagtgcgaggccgctggcttcggctgtctcgaccacggcggtcgtgccgtcggcgagcaggccgaagtggccttcgacaggtcggccgagcgggtcgtggaccggcacggcgtgcatcgatccgccagtggcgtcgacaagcgcacgtgcggtgccttcaccgccgtcggccatggggaggcaacggacctcggcatcgtggtcggcattctcaatcccctgagccatcgcccgggccgcctccatggcggtcaggctctctttgaaggagtcaggggcacataagtatcgcgtcatgcttcgagcataccgcacgacacgcggaacggtaagcgctttccataattcgcgtgattatttttgttcaaaattcaggctttccaatccacaatgctactattgcaagcaaaactgcgatatcattgcggtaagcgtttagacatgttttccgtttcagggaagaaaaggaccgattcgatcgtgactgtacagaacgataaggcgcaatcgccagcgacattgatggacgtcgccaaagaagcccaggtctccatcgccaccgcatcccgtgtgctcaacggcagcacccgcaaggtacgcaaccaatcgtatgtcaaggtgatggaagcagccaccaagctcaactatcgtcccaacgcctatgctcaggcagtggccaaaggcactgcaccgaacatcgtgctgctggtctccgatatctccgatccctacttcgcatccgtgtcgcaaggcgtggtcaaggcggcggccgaacgcggcatctccgtgaccatcggcgtggcagccaccccgcacgaggagttggaggcggtgcgtaagtccgtatccaccaggccgcgcggcatcatcatctccgaaagcgaatacaccgacgcgccggaacgccaggcgttgcagacggaactcatccagtacgaatcgtccggcggacatgccgtgttcgtactcaaccgcaacctgcccttcccggccgtggacgtggcgaacgacgtcggcgcgcgtgccatcgcaaagcttatcgtcgattccgggtatacgcgccctgcgattctcaagggcgatgacgcacaccgctcctccaaagaacgactggccggtgtgatggaagtgttggacgaggcaggcatcaccgtggacccgaaagccgtggcaaacggtaagttcagccgcaccgacggctatgcggccgtcatgcaaatggcccgatccggactgctgaagccgggcgaaggcgcactgtacgacggcaaaggcatcgattcaatcatcgcgctcaacgacgtgatggccatcggtgcgatgaccgcgttgcgcaccaacggcatcgagccgggtcaggaaatcggcgtcaccggtttcggcgacatcccctactccgccgacgtgttcccaccactgaccaccgtgcatctgccgctggccgaaatgggccaggccgccgtggacagcatcctgtccaaccgcgatgacgcggaggccaccggcggcactgccaaccgcctgatctacgtgcaaagcgccccggacgtagtcctacgcggttccctcccccgccggtaaaacaaaaaagctccctctgacggtgtaaccacaactagcgaacgggtaatggcgactgccgcgcaccataccaccgactcatacaccgacgtaatcaaagaactgttcgattaccgagtcattgagcaaccggccacgacgagtgggcaccactcgatgattatcggatacggtaatcaggccttcgctgatcatgggggcgagttggtcaaccgaaacggttcggagagtctggggcgtgctgctcatacctgcatcgttgatggcgcgattgatgcggtcgaggccaaggccctcgtgcaggcgcagcccgagcatgatgagctcttcgaggttttcctcgggagtgatcgtctcgctatcggcccacggcacacggttctcgttgatggccgtgccccacaaacgcgggtgcgcgatgtcccagctgcgcagaccgtgtgagacagaaaccacccccagtc

SEQ ID NO: 2349 - DNA, 3085 bp, Unknown
  R50_10m  MAG No. k141_578
aaccgcctgcaatcagcgctcggaggcttcctcagtggcggcctcaccctcgcgctcgatgcgtagcttgtggccttccgcctgggagacgccgtagtaagcaccgacggcgatgtccttcatgtcgttgatcagcgggatgcgcgggttggccggggtgcactggtcctcgtaggcgcgcatgccgatctgatcgagcacggaccagaagtaatcctcgtccacgccgcaatcctggaagctcttgttcataccgagcttgttatcgcggtagtcctcgacagccttcgccaggttctccacggcttcggccggggtcttgccggtgtcgatgccgaggttgcgggcgatgtcctggtagcgctccggagcgatgtacttgttgtacttcggccaagaggtgggctcctcaggaatctggccgttgtagcgaatcacgtacggcagcaggatggagttggtacggccgtgggcgatgtggcacagggcaccgatggtgtgggccatgccgtggcacatgccgaggaacgcggagccgaatgccatgccggccatggtggcggcgttgtgcatcttctcctgagcgtcggtcttggccaggccgggctcgccgttgacggactcagccaggttgtcccagatgagcttggccgcgtgcagggccatgccgtcggtgaagtcgttcgcgtacacggacacgtatgcctccatcgagtgggtcagggcgtcgaagccggcgtcggaggccagcttgcgcggctgggtgcgagccagcaccgggtccacgatggccacggacggggtcagcgcgtagtcggtgatcgggtacttgtagccggtcttgtgatcggtgatcacggcgaacggggtgacctcggaaccggtgccggaggaggtcgggatgcacacgagcttggccttcttgcccagcggcgggatcttgaaggcgcgcttacggatatcgaagaacttctcgcgcacgtcggagaaggcgatttccgggtgctcgtagagcagccacatgatcttggaggcatccatcggggagccgccgccaaccgcgatgatcgtgtccggctcgaactcctcgcgcatcatctccgcgcccttttcgacggtctcgacggagggctccggctcgacgtagtcgatgatgcggaaggtcacacggttggagcgggcgcgcagctggtcgatgaccttgtcgacaatgccgagctgctccatgaccttatcgcacacgatgacggccttctcgatgccgtacatgtcgcgcaggtacttgatggcgttcggctcgaagtaggtcttggccgggatcttgaaccactgcatgttgttgttcctccgagcaatgcgcttgatgttgacgagattcacggcctgcacgttgccggacaccgagttgccgccgtaggagccgcagcccagggtcagcgacggggcgatggcattgtagatgtcgccgatgccgccaagggaggaaggctggttccagatgatgcggcaggcgtgcatacggacgccgtactcacgcacgagctcctggttgttggtgtggatggcggcggtgtggccggcacccagcttgagcatcttctcgcacatctcgaaggcctgctccttgttgtcggccttgagcacggcctgcaccggagcgagcttctcgtgggtcagcggctcgtcgtcggagacttccttgcactcggcggccagaatggtggcgtcggccggaatctcgaagccagcagccttggcgatgaactgcggggacttgcccggcaccacggagttcagcacgggcttgacgccggaaccggcggtgcagccgaacatgtactgctccagcttggccttctcttcggcgttgacgaagtaggccttacggaccttgagctccttgatgagctggtcgtagacgtccttgtgggcgatgatggcctgctcggtggcgcagatcatgccgtaatcgaagtgcttggagagcaccagatcgttggcggcacggacgatgtccacatcggaatcaacataggccggggcgttgccggcacccacgccgagggcgggcttgccggaggaataagcggccttgaccatgcccggaccaccggtggcgaggatcgtggccacgcccgggtgctgcatcagcgcgccggtggcctggatggacgggtgctcgatccactggatacagttctcgggagcaccggcctcgatggcggcgtcgcgcacgatcttggcggcctcgacggagcacttctgcgcgccggggtggaagccgaagacgatcgggcagcgtgtcttcagggcgatgagggacttgaagatggcggtggaggtcgggttggtaaccggggtgacaccggcgaccacgccgacgggctcggcgacctcatcgatgcccatcacgtcgtcttcgcggatgatgccgacggtcttctggccggccaggtagttggtgacgtgctcacaggcgaagatgttcttggtggccttgtcttccacgagaccacggccggtctcgtcgacggccatcttggcgagaacgaggtgcttgttcagagcggcgatggaggccttggcgacgatacgatcaacttgcttctggtcgaggttctcgaattcgtcgagagccttcttggcgcgggcaaccagcgcgtcaacttcggcctcagctgcggcctgcttctcttctggggtcggattggcagcttcgactttcttctttgcttctgccacttggggtcctcctcgatcttcttggggtatatggcaaagttctgggccatcgcctcgtcacctcagttgcaccagcgggataccgcctcagtaaccgaaaatgaccggtgatgcgttgtcacattgcatatgtgacttgagtcacaatataccgaacggtccggcgcgatgcatacgcacaaaatcgacggcgtttcacgtgcgatattgaacagtttttgttaagagttgtgcgaaatatcgaacaaatcctcactttattcggcgatttggtactttttgttcactttttaccgaaaatcacatgcttgcaaacaacgcaatccgacaactttcttaaatc

SEQ ID NO: 2350 - DNA, 37285 bp, Unknown
  R50_10m  MAG No. k141_674
acctgcaccgcttcccggcctacctgcagcagctgaccatggaatccaacggcaagtccgtgcgttgggacggcacccccgtcacctccgagaccggcgagatcttctggggcgagccgggcaccaacggccagcacgccttctaccagctgattcaccagggcacccagctcatcccggccgacttcatcgcgttcgtcaacaccccgaacccgaccaaggacggcgaccaggacgtgcacgagctgttcctgggcaactacttcgcccagaccaaggccctggcgttcggtaagaccgccgacgaagtgcgcgccgaaggcaccccggaggagatcgtcccggcccgcgtgttcaccggcaaccgtccgaccacctccatcttcggtgtggccctgaccccgttcgcggtcggcgagctgatcgccctgtacgagcacatcaccttcgtcgaaggcaccgtgtggggcctcgactcctacgaccagtggggcgtcgagctcggcaagcagcttgccaagcagatcaccccggccatctcccaggacgacgacgccctcgccgcccaggacgcctccacccagagcctgatcaagttctaccgcgcaaatcgcgaattctgattcgctttgctcggtcagaattcgtgattcgcgcgaccgcggctgtgctgtctggtgggcagtctggcgactgcccacgtcgcgagttctgattcgttcctctggtgccccctcgggtgagaggaggtgtcagtgtagctgactgagggagtctctctcacgactagtgcccgacatcttcggatgccgggcactttgcatatacggattgctgtcagtcagatgagtcgaacatggtcatattccgcttcggcatctgtttgcaggcataaaggcactatctagccaactcacgtggctgattcgcttattcgcccttattcgcctcatccaggctcagcagatcgtcatcggcatcgtaatcgaagagctcgccgtaacggccccactccacggcgatggcgaactgctgatgcgcctcgtcgttggagtaacgggcgcgcagcaggtccagcatgagctcgccgcggagcttgccttccgcagacttccgcagtgcatgctcaatgttgcgcaccagcggcgcgtgttccatcgccagtgaggcgaacacctgcttggcccgcagaatgtccgccttatgccaggcgtcgcccgcttcggtgatctgcacatggccgtcgcgtaccacgatgacgcgcagcatcgtaccggcatccaccagcgggaacaggtcgtccacctcgaacgaaagagccgaggccaaatctgccaagtcgatgccgtgaggatgctcggcaaccacatccagcagaccggcaagcccgcccggcgtggcgttgggcagcggatgctccttgattttctcgatggtcttggcgggctgaaggtctgatgcgtccgtgacagatgcgtccgtgacgggtgcgttcgtgagcgatgccgatggcgatagagcctcggcttgttgcgtaggctgcgaggcctgtccggtcaaaatcgcgtacagtcggtccaccatcgcctcgaattcgacactgtgacggtcgcgcggacgctgcagatcaacccgcacatcggcaatcagatgccccgggtgcgagcccaacaccaccactcggtcggccatctccacggcttcctcgatgttatgcgtgaccataagcaccgacttgatgctgcgctgttcgctcgaccacagcttgagcacttcctgacgcaggttttcggcggtcagcacgtccagggcggagaacggctcatccatgaacagcgcgtccggccgcagcaccaaggcgcgtgcaatgcccacgcgctgcctcatgccgccggacagttccttcggatacgccgattcgaagccgtccaggccgatcatgtcgatggcatccagagccagtttggtgcgttccgcacgtggtacgccgcgcgccttcagaccgagttccacattgtcttgcacggtgagccacggcatcagcgcgaaggtctggaacacgagtgcgatgccgggattcggaccggtcagggcctcgccgcgatacttgaccgtgccgctggtcggcttgaccagtccggccagcgcacgcaggaatgtggacttgccggcacccgaacggcccagaatggccacgatctcgccctcgtacaggttgaacgatatgttgtcgaacacggtgagttcggtgccgttgtcggccgtgaagcgctggccgacgtgctgggcttcgatgatggtgttctgcggggtcaccgcccgcagcgaacgaatggtttccattgcaacagtcatattattctccttaagtctttagttcagtgcgaaacggcgctcggccatgcgctgcagcgggttccagaacaggcggttgacggccaccacgaacacgctcatcacggccacaccgatgatggtcctcacggtgttgccgctttcggtggcctcggcgatatacgcgcccaagccggaggcggtcagcgtatgccgtccataacttacgatttccgagacaatcgaggcattccacgccccaccggccgccgtaatgccgcccgtgacccacgagccgaataccgccggcaaaatcaaatcgcgccaccgctgccagcgccccagctggaagctgcgcgtcatctcacgcagatcgtcgggaatctggctggccccggcgatcacattgaacaggatgtaccattgcgtgcccaacgccatcagcagaatactgccccagttgatatccacgctgcatgccacgaaccagagcgtgacgaacgggaacgtgaagttcgaggggaagctggccagcacctgcacaatcggctgcataaaccgcgaaacgcgcggattcatgccgatcatcgcgccaatcggcacccaaatcaccgagcagacgagcgtaagcagcgccacgcgcaggaacgtcaccatgcccaacacgaacgcctgcccgagctcgccgaatcccgcatcgcgatggatcaccagcataagctgcaccagtccgaacgcacacgctgccaacaccagcactgtgaataccacgtcaagcgcgcggctgcgtgcggacttcacgtccgccgcccaacgtccaccggtccgacccaacgggcgggccagcgtgtcgaacaggtcgccgacaggcctgaacagccaggccaccatctcatcgatatgtgactgacgaatgatggtcagcaccacactggtcttgcgcaccgccgactcgctttgcgtaatgcggaacttctccgcccacgcggtcaacggcttccacagcagtacgtcgataagcagcaccaccagcaccatcgtcacgatggcccagcagatggccgcgagattctcctcggccgccgcctgtgccacgaagctgccgatgccgggcaacgcataggtgcgattgttcaccgagatcatctcggaggcggtcaggaagaaccatccgccgcccacgctcatcatgcagttccacagcagcggaatcatcgcgttcggcacgtccagtgtccagaatcgttgccagcgtgtgagctgtagtgagcgggccgcctcgtcgagttcagttggttcgctggtcagggaccgggtgaacgagaacgccatgttccaggcctgactggtgaagattgcgaaaatcgacgcggcctccacgcccagcatcgagccggggaacagcaccatccagatggtgatggtggccgaaagaaagcccagaatcggtaccgactgcagaatatccaacagaggaatcagcacgcggctcaggcggcggcagcgcgcggccgccgtgccgtagatgaacgtgaacaccagtgagaagaacagtgccacgagcatgcggaacaccgagcgcagcgcgtaatacggcaggtcggcgagattcgtactgacttgtgatggcactcctttcgggccgatcggttcgccgatcgccggcagaatccaagcgatcagaccgaacagcgccagaataccggccgcgaccagtacgtcggaggccaggcgcacggcgaatggttggcggtcggacgcggcggtggaagggttgcgggccgacgcatttggacgcgcaccgacgcgattgaatgaaaacatggtcatgaaaagacctccctatgcataggaaagacgaattatgcaagggttatccggggagccaaggaacactacaggcgagagcccgacttccggataacggaatataagaaaacatggtcatcaccaccgcaactatgactgttgccggcggcggaactactggaataatcaccgtccatcggactctcacctccttcaagccgtgcgctgaaacgccagatcaataccatcgtcggtatccatgcgaccagcaggaggggcggaaagtattcgaatccgccgattcgagccatcgttcaagcttcagcatcgcagggcggtggaattgcgttagttcatgccttgatccgacaagaactgctgacctgcgtgcagtgtctccactgttagcggcagcaacccatatccctgcggtagcctcgcctaccgacgctcccaagataaagcccgcctgcaggtctgtcaactacgtcgcagtgccttggtgttggaatgccatcaggcagccattctgtccgcaataatccgtagaataatcgattgctgtgtcgagaagtgggccgccgcataagcccacgtctccatgggtccagtccgaacggccgcaaggcctgactttcggcggatcggcaggcttcccaagggcaaacccgagggataacgagaacaggccaacgcacgtgatgcgcaatcgcgtggatggccccagatctgtggctgatatgcggcagcactgaaggaaaacaatggttaacgctgttgaggcttttgacgccaagcacatgaagccggctgaggaaatcccggccttccgtcccggcgacaccgtcgacgtgaacgtgaagatccaggaaggcaacaactcccgtatccagaccttcaccggcgtggtgatcgctcgtaagggcgctggcgtgcgtgagaccttcgtggtccgcaagatcagcttcggcactggtgtggagcgtcgcttcccggtgcactccccgtccatcgactccatcaagctcgtgcgtaagggccgtgtgcgccgcgccaagctgtactacctgcgcgctctgcgcggtaaggccgctcgtattgccgagcgccgcgacaactccgctaagtgagtcgattcgcgggtgcaatcgtgggcctgatgatgcaggtgcgcgaataaaccgtgaaattcagcccggaaccgtttcggtttcgggctgtttccgtattttccacgtatgatggacgggcgccggcacccctcatatccggcagcatgaatcgcgaggagatggtatgcaggacgatcaggataacggcgaattcccgatttccgacaatccggagagcaatcagacctcgtatgatgacgaggccgatgcccgcgattcccgtacgttccaagtcgccgaccacggcatcgccccgtccccggttcccccggcaccggcgcgcccggcgtacgccgcttcttccgctggcgcgaatgccgcggcagcatcatcgatggatgatgaccacttcaccctacgcgactttttcctgtggtgcggcgttcccgtgcttatcgtgctgctgattcgcattttcgccgtcggcttttacgagattccttcgcgctcgatgatggacaccatggtgcccggcgatcgcgtggtgaccagcaagctcacccccaagatcttcgatctgcagcgcggcgacgtcgtggtattcaaagatcccaacaactggttgaacgaggagcagagcagcgctcccggtggcgggtacctcatcaagcgactgatcggcctgcccggtgacgtggtcgaatgcaagggcgcgggccagccggtgaccatcaacggcgtggccatcaatgagacctcctacattcgccccggcgtggacccgagcgctttcccgttctcggtgaccgtgaccgagggccacgtgttcgtcatgggcgacaatcgcgccaattccgccgactcccgctatcatcaggatgacggcgatcgcggcttggttcccatctccgatgtggtcggagtcggaatcgcgaaatactggccgcttgaccggcttggtgcgattgatgaccaccacgaagtcttcaaggacgtgtctgacgcttccggctcgaattcctgagtcttttttgaaccgtgtgagtctttgaactgattgagttccgggccgtctgaatcctgaaccatttgaacctggaccgtctgaatcctaaccattgtgagacgatgggagccgcgcatgattaccccgacacttgacttggaacgcagccttgcggcccagggctatgaccttattactggattcgatgaagtcggccgcggcgcgctcgccggcccggtgatggtcgggtgcgccgccatctgggcctgtgatttggcgccgcttgacggcgatgattccgccgaactgtccgggcggacctacctcggcgtaccggacggcgtggccgactccaaaatgctcaccgaacataggcgcgaggcgattttcgacgaactgcgcgactggtgcgcggcctacgccgtaggccaggccagcaacaccgagatcgacgaatggggcatcacctatgcgctcggcgtggccgccctgcgcgcgctcagccaagtcgaacgcgaacttggcttacggcttggagggggattgacggcaaaaaaggctgcgggggagattgtggaaggtcgtccgggagactccgtaggggaatccattggaaattgtggggaaagcgttcgcgccctgcccaaagtcgccggaattctcgacgggccgagcgattacatcaccaaggcgctcaacacgttcgacgcgccggacgtgccgattccagccgatataacgaccaaagtcaaaggcgaccagcattgcgccaccgtcgccaccgcggcggtcatcgccaaagtgacccgagaccggctgatggtcgacctcgcgcaaagcaacccacgttacgccgcctacgaatgggctcataacaagggctatggttccgccgcacaccgtgccgccatcgccgaacacgggccgactccgctccatcgtgtctcatggcacctgacctgagccgcgtgcgacacgacagtgtgagcgctaacgcaaaactgttgtggacgcgctaaagtcagtattgattaaggtacaagcctggccgtgcacgggtgccggccgccagcggggaggttaggtagcatggtgaccagccgcaagccaagcaaacgtccgtccatgttcgaagtggccaagctcgccggagtcagccaccaaaccgtctcccgtgtgatcaatgactcgccggacgtttccgacgccacccgtgcgcgagtccaggccgccattgaccaactcggctaccgcccctccaactccgcgcgcgcactggcttcccgccgttcgcgcaccatagggctgatcgccggaggcctcaaattcttcggcccgatttcctccatctcatccatcgaatccatggcccgcgaacacggtctgttcatgagcgtgatgatggtccacgaggccttgtgcatgcagtccgaattcgacaacctgtgcgacaccttcaacgagcagaacgtcgacgctttcatcttcctgaccccgaccgacgtgatgttcgccgccgcctgccgtgcgcgagtcactcagccgcgcgtcatcgtcaccgccacccacggccaaatgaccgtgcgtgagggattgggccttatctccaccgaaaacaagcgtcgcactgcactggtcggtatcgaccagtggggtgcaatggccaaagtggtggccttgctgggcgaatacgggcacaaatcggctctgtattttgccggtcccaacgaatggcgcgacgcccacacccgactggatgcgtggcgcaagctcgccgcctcccgatccatcgattcacagatcgtgcgctgccatacgtgggatgcctctgaggcatatgcgcacatgaatcatctcattgatgagtatgggcgtcgaggcacggcgttgcccaccgcggtcgtcgccgcgaacgacaatcaggccgtcggcgtcatgcgcgcgttgcatgagcatgggcttcggattccgcaagacatcagcgtggtcggattcgacgacatgtctggcgtggataacatgtacccaccgctgaccaccgtgcatcccgatttcgaggggctcggcgtggccgccatgcgcgagacgctgcgtttgctgggggagggcggcgagccgaccttcctgaccacccagcacggcgtggggctgagtcccgccgaggtgcgtgctcggcggtccttggggccggctcctcggcggtaaattggcgctgttatcaaaccgttatgatgcgtgactcggtataagttgtgtcgaatgcaggttatcggtacaatgttttttgaaattgtgagcgctaacatcctccccaaggaaggggataacaacgccggcgctccaaggcaaaggaaagatatggcagcaaccgacaacgcggccgagcaggccgcccacatcgccgagaagattcgcgctggcaagaccacgctgggcatcgaattcggctccacccgcatcaaggccgtcctcatcgacgacaacttccagaccatcgcctccggcgactacagctgggcctcccacttggaggatggtctgtggagctacaccaccgaggagatctggggcggtttgcagtccgcttacgcctccatggccaacgacgtcgagaccgcctatggcgagaagctcacgcacgtcggccgcatcggcttctccgccatgatgcacggttacctcgcattcgacgaggccggcgaactgctggtgccgttccgcacctggcagaacaccaacacctccgaagctcacaagaagctctccgagctgttccagtacaacatccccgagcgttggtccatcgctcacctgtaccaggccgtgctcaacaaggaagagcacgtctccgaggtggcttacttcaccacactcgccggttacgtgcactggaagctcaccggtgagaaggtcctcggtgtgggcgatgcctccggcatgttcccgattgacccgaccactcacacttacgaaaccgcattcatcgagaagttcgacgctctgcctgaggtcgcagcccagccgtggaagctggagaacctgcttcctgagccgctcgtggccggcactccggctggcgagctgaccgaggaaggcgccaagctgctcgatccgtccggtgccctgaatcccggcatcgtgctcgccccgcctgagggcgacgccggtactggcatggtagccaccaactccgtgcgcgtacgcactggtaacgtctccgccggcacctccatcttcgccatggtggttctggagcacaagctcaaggccctccaccctgaggttgacttggtcaccaccccggccggcgatctggccggtatgagccacgccaacaacttcacctccgacctcaacgcttgggtcggcctgttcggccagttcgccaaggccatcggccagtcggttgatgccggtatgctgtacggcaccttgttccgcgcggccatcgccgacgacgtggacgccaactgcggcggcctgctgaactatccgttccgttccggcgaattcctggccggtctgcctgaaggccgcccgctgttcgcccgcagccccgaagccaacatgaccctcggcaacttcatgcgcgcccagctgttctccgcgttctccccggtcaagatcggcatggacgtgatgaccaagcaggagcacgtgcaggtcgactctctcgtgggccacggcggcatcttcaccactccgaaggtggctcagaagattctcgccgctgccttcaacaccccgatcaaggtcatgtccaccgccgccgaaggtggtgcctggggtatggccgtgctcgccaactacctgtggaacaccaacgaggatcacagcaacctcgctgacttccttgatggtttcgtgttcaaggacgcccagtccaccactgagaagccggtggcttccgatgtggttggtttcgaggacttcttcgcccgcttcaccaagggcctgcccatcgagcacgctgccatcgaaaccatcaacctcgaagataagtaagcctttctgacctccctctattgagagaggtccttgagattttgaaaaaacgtccatccatcacagtggaaaggaaaaccaataatggcaactttggctgattacggccccgaggttcgcgccgaggtcaagcaggttcgtgaggtcgtctccaacctgcaccagcagctgatcaagtggaacctggtcgtgtggaccgcgggcaacgtttcccagcgtctgcacaccgccgacctgttcgtcatcaagccctccggcctgcgctacgagtacctgaccccgtcctccatggtcgtgtgcgaccttgacggcaacgtggtcgacggtgccgaagccccgtcctcggacaccgcttcccacgcctacatctaccgcaacatgcccgacgtctacggtgtcgtgcacacccattccacctacgccaccgcttgggctgccactggtcagaacatcccgtgcggcctgacgatgatgggcgacgagttcggcggcccggtgccggtcggcccgttccgtctgatcggctcggaggcgatcggcaagggtgtcgtcgagaccctcaagaagtacccgaagtccccggccgtcctcatgcagaaccatggccccttcaccatcggcaaggatgctgaaggcgccgtcaaggccgctgccatgaccgaggaagtcgctcacaccatgtgggccgcccgtcagctcggtgacatcatcgagatcgaccaggccgacatcgataagctcaacgaccgctaccagaacgtctacggccagcactgatttgatggagtgtccgccgcgttgcggaaggctcgacgtaccttcgtacgccttcgccttccgcgccttgcgggcacacacatcaaatcagcgctgactccgccagcacggtggtgtcttggctcccctctctgaggggagcctcggtcggcgaatgaaacttaaacaaacccccataaacaaagaagtaaaggaagtaaccctatggttatggaaaaccccgtcgagggcaaggaaatctggttcggcgttggttcgcaggacctgtacggcgaggaagccctgcgccaggtcgccattcactccgctgaaatggtcgactacctgaacaacaccggcaagattccggccaagatcgtcctcaagcccaccctgaagtcctccgacggtgtcaaggagttcatggtcgaggcttccgccaacccgaacgtcatcggcgtcatcacctggtgccacaccttctccccggccaagatgtggattcgcggcctcgaagtgctgaccaagccgctgctgcagctggccacccagcaccacaaggaaatcccgtgggagaccatcgacatggacttcatgaacctgaaccaggccgcccacggcgaccgtgagttcggttacatcgtctcccgcctcggcatcaagcgcaaggttgtcgtcggccactacaccgatcctgaggtcgtcgagaaggtcggcacctgggcccgcgcctgcgccggctgggatgcctccaacaacatgaaggtcatgcgctggggcgacaacatgcgtaacgtcgccgtcaccgagggcgacaagaccgaggccgagcgcgtgttcggcgcctccatcaacacttgggccgtcaacgagctcgtcgctgcgtacgacgccgtcaaggacgaccaggtcaaggagatcatcgaggactacaaggccaagtacgacgtcgacccggctctgctggacgccaagtacgactccctgttcatcgccgccaaggaagaggccgcgatggtcaacatgatgcgcgccaacggctgcaccgccggcgtcgacaatttcgaggacctcggcgctctgccacagctgccgggcgttggcccacagcgcttcccgtccgagtacggctggggcttttccgctgaaggcgactggaagaccgccgtcctcgtgcgcatcggcgccgtcatgggctacggccttgagggtggcgcctccctcatggaggactactcctacaacttcaccgagggcgacgagctcgacatgggctcccacatgctcgaggtttccccgtccatcggcaccatcgccaagccgaagctggagatccacccgctgggcatcggcggcaaggccgacccggtccgcctggtcttctccggcaagcccaccaaggacgccgtcgtggtctccatgtccgacgttcgcgaacgcttccgcctgctcatggacgtcgtcgacgtcgttgagccgcagggctccctcaaggagcttccgtgcgcccgcgccgtctgggagccgaagccgagcctgaagaccgctgttgagtgctggatcaccgccggtggttctcaccacacctgcatgaccacctccgtcggtcgtgaggcttgggaagacttcgcccgcatcgccggtgttgagctcgccgtcatcgacgagaacaccaccgctcgccagttcgagaaggaactggagctgtccgagatgtaccaccgtctcaacaaccagcactgattggcggagcgtataccgcctttcctcaggttcgacgtaccttcgtacgcccctcgccttcggacggcggtctccgcacgcgccaatcagcgctggcaagccagcaccgatgactaaatcagtctgctgactgctaccgctgaaaaagggctgttccggaaaaccggagcagccccttttgctgttatcggcaactccccacaaacgcatcaaaaatcgcctgcgagcgtggatctaccttgtagagaaactcgggatgccactgcacggcccacaggaagtggcttgccggccggtacagggcctcgatcacgccgtcgggcgcaacggccatgacttcgagaccgggggccacatcacgaaccgcctgatgatggtagctgttcactgcaatctcagtctgccccgcgaacaatgaagccaggggagtgccggacaccaaggaaacgctgtgcccgaacgcatcgtacggcggattcatatggtgttcgatatcgctcggatgctggcttggcaaatcctgccacaacgtgccgcccagtgccgcgttgatgaactgaatgccgcggcagatgcccagaatcggcttgtcccaagccattacagctggcagcagaatcgattccattcggtcgcgctcaggagagagcacctcgctacggccggtggcggaggccgctgcaccaaccatcggtcccacatccggcccgcccgtaaacagaaacgcgtcaaaccgttcggcacattgcgcaagaatgtcggcgtcatcggtcagcggcaacatgatgggcgtaccgccggcccgcattatcgcctccatatatccgggcagcatccacagactatcgcgcccgtaatccatcagcggagtcaccgcaatgagcggtcgattcgtggtcatgcctgcctcttttcgcccaagtgtcgctttcgtcgttctgccgcaaatcgcttgatccagtggccaataatgccgtcactgtaccgaaccaatgtaaccggtcggccagcattatttcgtcagccagccgcgacgagattgcacaatgtgccaatgatgggggcattcggtgcggccttgtcaatgttcgggccattgcacgttcggcggggaaagcatgcccctgtccgcgcatcgtgatgaacgagtaaggttgacggggagggagaatcacatgaaccaggcatgcgtacgcaacgacaccatcgacgcgggcaaccatcatggccgaccgcaataccgggcgttcctgcgatttctgacatcgcaggaacgcaacgtcatttggctgttgctggccgtcgcttttcttccggtggacggcaccacgcttggcctgtacgcgccgttctggtcgccaatcagtccggcgctgttcgccgtgtactgcctatgcaattggcggcaactgcgcatcgcagccaaccggtacctgccgatgttcctcctaccggtggtctgtataatcctgtccatcccgggatggctgaagttcggcatccacctcaacgccgcgttcatgagcatcaccggattgctgggcgtgctcgccacgctgggcacgctcgccatcgccttcgacatcaagcgcgttccctggcacacccccatacgggtgctcatcgcatcatactgggtttccttcggagtgggcgtcgtgcaatggctgtccatccgtctgcgcgccaaaccgttgaccgactatttctcgcacctcatgtaccggcaatacatcagcgacaactcggtgtggggcggcggccgtccgcagttcctgttcgccgagcccagctatatcggcatgcacctgttcggcatactgcttccgctcatgtggctcatgcgcgggcgcgaccgcatctacgccaaacggctgcgtgacctcatcgtcacgtatgccgtcggcgcggtgctcatgcaagccggcaccagaatcgtcatcgattccgtcgtggcgttgctgatcgcccttgtggcgcgcaccgattggcatgacggcgcacgccgcgtccggggcatgctgcagattctcggcgcatgcgcactgggcctgctgggtgtgctggcggattccagactctccgccatcgcggagaacggggccgagggagacggctcgttcttcgcgcggatctaccaaagcctcgatccgatatgcggattgctcacccatccgtggacgctgctcaccggttatggcgcgggcaacatcatcaatgcggtgtgggccggcgcggccaaagccggacggctgctggacggtcttggtatgaacggcggcgcggccacgggattcgcggccggcgtgaacgcggacacggtgtggacgatgtgcgcgtataccagcgtcatcgtcgaatacgggctgatcgggctggccatgctggtcggagcctcgatggtctgcatgacgcgcgggaggacggtatgccgtggcggtgcggatggcgcatcgtccgacgggctggcgcacggtgtttgtgtcaccgacgttgccgacgttgctgatgttgccgggggcaatagtggtgatggcgttgccggcgcgggtccgggcgaatccggcgtctggcacaagaccgtcatctgctggctcgtcctggtcgcatacctgtacatccaatgcgagaactatgcgttcgccgctctgcagctcctcgtgttcgccgcctcgaaggtgaggcgcgagcgctgattcctctcgggccgacgcatcgacgcggcccgagatggaccaaaatccagaataaacgacatttgccgctgttccgtttttcgcccaaggcgtatctcttcccgtatcttgaggtgcatcatgtattgtcgcggctaactaaccggcgaaacgcggcatgtttcgcattttgggcgaaaagcccaaggcccacaggaggtattgatgacgttcgttgcacggtcggtgcgctatgtgctcagaaaacgagtacgaaccatagtgctccttatagtattgaccatcataacggcgagcatgctatccacgatcgcggtttctcgggcagctcaacaggccgccggacgaatcgagaaggaagcggtcggcgggttcgtgctggccagcaacctgcagggcagcatgctcacgcctcgcggaggcggcatggtgcgtcccgccgacgtgcgcaggatcgcccaactgcccggggtcgattcgtatatggtccgtcagaacgccaccgccgatctcgtgggggcgaatgtggcgaaggtccccggcggcgatgattacgatgcgaccaaggagcagcaattcggcaacgccgccaacgtcataggcacgaatgattcgtcgaaactcaacgtgttcacgtcgcgcacgctcggcatggccgaaggacggcatctgaaggcctccgacaagtacacgtcgatgatccatgaggatctcgccaaagccaacgggctcaaagtcggagacacgctcacgctcaaggccaacgcctacgacgccgacaacgaatcacattcgacggcgaccgtcaagaccaccatcgtgggcatattcaagggcgacagcgccagaaaggtatccagccgagcggaactcaccgccaacaccatctacaccgatctggataccacacgcgatctgtaccagtacaaggacggcaaggaaatataccaggacgccaccttcgtgctgtccaagggcgttgacgtggagaagaccatggacgccgcaaagaaactcccggtggattggaacaactatcagatcacacgcaacgaccagtattcatcgagcatgctgcatgccgcccgcggcgtgcgctccatgatgcgcggcgccctgatcggcgttaccgtctcggccgtgctcgtgctcagtctcatgctgctgctgtggatgaacgaccgccgtcaggagatgggcatactggtgtcccttggcgtcggcaagccctccctggtcgcccaatacctcgccgagatggtgctgatcggtctgccgtccctcgtcctcggctggctgtgcgcgcagggaatggcccaatggctcggcaccacggcgctccattccgtgaacgcctccgcggcgaaggagctgagcagcatggggcaggtcggcggcgaccttgaatccagcatgtcggtgcgcaccctggattcgctcacggtgtcggtcgacgggaccgccatgctgtacgtggcgctcggattattggcggtgatgctggtgtgcgtcgcggtggcgtgcatgccgatgctgcgcaaatcgccgcgagacctgtcggagaatcgatgatgagcatgaatgtgtggaagcgtgccacgttggcgatcgtacgcaagccggtacgcagcggcatcatcggtctgctgatgctgatggtcttcacgagcctggtggcgcaggtcggagtctcgacggccctgcgtaccatgtccgacggcatcggcgcgggcatgggcatagggtttaccgtcagcgccggcgagaatcccatcagcgccgaggaggcgagccggttctcgcgtatccccggtgtgacgaagaccgcctatgcgacgaagaccttggcgcaggtggatggcgcgcgcccggtcatgccccggcagggcccccgattggactccgatctggccatgcaggtcagcgtgctgggcaccaccgattcctcattgtcagaggaattccagagcggcctgtaccgcctggagcagggccgccatatctcgggcgacggcgacgatgtgctggtccaccgcgacttcgcgctgcagaacggcctatcggtcggctcgacattccgtctccggcaggaggggcgcaacgccacggtgcgtgtggccgggatcttctccggcaacgtgcaggcccaaagccccctgccctcggacacttccgagaacctcatctattcgggcaggcgagtgacctccgctctgaccggaaacgaccagatcggcatgatccgatgcctgtcggataatccgcaggacctgtccgcggcggtcagtcaggccaagaccatggccggtggcaagtacgacgtcaccgacgattcggcccggctctccggcgtcctgcaatccgtgcagacggtgcgtgatctggtgcgcatggtgctgctgtccgtctgcctcgcggacgtactggtgctggcgatggcgctggtcttctggattcgctcacgcatccatgagataggcacgcttctggccctcggcatcgacaagatgcggatcgtcgcacaactcgccatcgaaaccggactcatggcggcggtcgccgccctgtgttcgctgggcaccggcgccatgctgtcgggatacgtgtcttcccgactgttgcgcgattcgggcgtcgcgccattggaatcgttgcacgtggaggccttgccgcctgagcagacggtgctcatcctgctgctcggatgcgcggtcatcgccgtggcccttgccgtgtcatgcgccgccgtgctgtccaaatccccgaaatccattctttcctctatgcgttaggagtcaccaatcatgtctaactgtctgcaactggaccatgtcgattacgcctacggcgcggcgaagatccttgttctctcggatgtcagcgcggatttcgaatccgggaagatgtatgcgatcaccggcccgtccggcgccggcaagagcacgctgctgtctctgctggccggcctggacgccccctcccggggagtggtccgcttcgagggggaggacatcgccgcatcgggctatgcgaagcaccgtcgggagcacgtgtccctggtgttccaggaccataacctgatcgactacctcacccccgaagagaacctgcggctggtcagcaccaaggccgatatgaagatcctcgaggaactgggtttgagccgtgaggaatccaagcgcaacatcatgcacctgtcgggcggccagcgtcaacgggtggcggtcggccgcgcgctggtcgccccgggccgcgcgatcctcgcggacgagccgacgggcagcctcgacccggagatgaccgacgaggtgattcatctgctgcagcatgccgcccatcagctcggcaaatgcgtaatcgtggtgacgcattccaagcgtgtcgccgactccgccgatgtcgtgctgcgtctcaggagcaagaaactgacccgggcgtgacccacctgggccgggcggcacccatacaccgcttcggcatttcggcaccccggcgaccgggcactccggtatcccggcccttcggcattctggcacccccgcgctccggcaccccggcgacccactcgcgttgccggggtgccgtattcgctctgcgccataatgtgcgtgataatggaatcatgccagtgatgaatgatgaagtgcccggcgaggttgaaccgcaccccgattgttggactggagtaatccagattcgatgatcggaggtgcggttcaaaaggcccttttttgtgtcggattacgaaccgcgcgtttcaccgcttgccgttgtagatctcgttgtcgatcacatcggcgaacacgcggttgacggccgggcgcactaccttcagcgacggcgtcaggcacttgttctcctgcgtgaactgcgtgcccagcacggcgaacttgcgcacggattcggcacgcgagaccgtcgcattcgccttgtccacgtactgctggatctcctcgcgcaccgcggcgttcgtggcgagccggtcgaccggcgtctccgtggacaggccgtgcgcgggcagccaaatggccagcgactccgggtcaagtgtcaccagcgcgccgatgaacgggcgctggtcgcccaccaccacgcagtgctccacgatcgggcacttggcgatctcctcctccagcggaatgggggagacgttcttgccgccggcggtaataataatgtccttgattcgaccggtgatgatgatgcggccggcgtcatcgatctcggccaagtcgccggtcctgagccagccgtcggcggtgaacgcctcggccgtcttctccggcagattgtggtagccgcggaacacgttcgggcccttgacctgcagttcgccttcgtcggaaatgcgaatcgaggagccgggcgcgggctggcctacggtgccgatcacattgtcggtcacgcgcgtggcggcgaacggggcggcggtttcggtcatgccgtaaccctgaatcatcggcagaccgatgccgttgtagaaatgcgctagatcgagcgacagcggtgcgccgccgcaggccacgtacttgatcttcgggcccagagcgccgcgcaccgtgcggtagacgagcgtttcgtacttggcgcgctcggcgatttcggcaaatgtgtgctgctcgccggcctgctccttgcggctccagacgcgcgcggcctcggcggctttgacaaacaggcggcccttccagccggcaccggccttatgtgaggcggcgttgtacaccttctcgaacacgcgcggcacgcccagcaggtaggtcggttcaaacgaacgcaggtccggcagcagggttttggtgtccggcagatagccgaccacgccgtcatcggaggcgatggaggcgtactggatgaatcgtgcgaagcagtgggccagcggcaggaagagcagcaggcgtggatggtcgtcaagcaccacttcatgaagcgcctgcgaagcggtgatggtgaaggacacgaagttcttgtgggtcagttcggcacccttcgggttgccggtggagcccgaggtgtagacgatggtggccagatcgtcggcgcgcacggtggccacgcgctcgttcagttcctcgtccgaaacagccacgcccagaccttcgagcgcgcccagtgcgttgccctcgagcatgagaatctgcttcaaggcagggcagtggtccttgaccgagtcgagccggtcgaagcgctcgcgattgtcggcaaaggccagcttgaccaccgaatcgttcatgatgcgctgggcctgcggggcggagtcggtgtcatagatcggcacgcttaccgcgcccaccgcggccagtgcgaaatcgagaatgccccattctagacgggtggaggaaaagatggtcaccgcgtcgcccttggcgatgccgagcgcgatcaggcccttggcggccgagaccacgcgctcgtggaattcgccggtggtgacgttctgccagcggccggggccgattttcttggcggcgattaccgtgtccgcgccggtgcgggcaaggcgatcggtaagtagggagtagatggtctggttgtcgcggatttcgatggattcgccaggcgtggtgtagtggtcaagcataagcgggccgtgtccttacgtgcgttgcgtgatggctgttgacaaaatcgagccattctgacaagttaggttacgctggcgtaaggttgcgcgcgttgtgggcaatggagaagttgtctgtctggttttgtggattgtatacaacgccgtgtctaaccggtttgctctacggttatgacaccgtgtccatttcgggagccatcgacttcctgcaggacaagtacgcgctgagcccggccctgcagggtctggtcatcagctccatcatgatcggcggcgtgatcggcgccggcttctccggcttcctgtccgataagtacggccgccgccgaagcactggtcgccgcgcaaaaagcagcactaggccgcgtttgctgcgtctattggcgaattgatcatatgggtcgtctgcgtgcagacgacccttttgcgttccgtcggcttctgacaccgtagaaacgtgctttctcggcttcgaggggctgattttgccttatccggaagtctacttccacttcgaggggctgatgcccaagtagacgcggccctaaaacggcggaatgacgttgacgtgtagctgtttatacttccgattacatggatgaggagcccctcgaagcggagatagacttccggcaaatgcgaaatcagccccttgaaacggaagtaggcctccggcaaacgcaaaaattagcctcctcgaaacggataaatgcacgtattgggtgtagtggatgcttcagcccctgatatcgaagcatattttttctggttggcgcgtctagcatgcgcactccgcaatcgataattctgtggcctctctcactttaaaagtctggcgtgtgcgagggcgttcgcttaaggtgaatgggattgcgaggaatgtggagcgcagggtcatgaccatgcgcgtgctgcagatccagctgcgctcgctgaccgccatggatatcgtggcctacggcggtgcggcggccggcattggtgtggcgttatggcaatacgcgcataccaccgcagcagtatgcgcataccaccgcagccgccgcaggagccagcaccgccggctggtcgccgatcatgctcgccgcccacctgcccggcgcattcgcctacctggcctacggcctgcaatacctgatgccgttcggtgcgggcttcccgctcaccctcgccggactgctgctgattgtgctgctgtccgccgaattctttattcccatgcgtcagcttggctcgttcttccacgtggcgatgaacggcatgacctccaccaagcgtatcttcgctctgctggacaccccggagcccgagcatggcacggcgaccctgccggccaacgattccgattccgctgacgacggtctgacggtccgcttcgaccacgtcggctattcctatgatgatgccgggcacggcgactccaagtccgcatccgcaaagaccgataagcaaggtgaaaccagccccaattccgccgtcgctcctgcgctcaccaacatcaccttcgccgcacggcccggtcagttcaccgccattgttggcatctccggttccggcaagtccacggccgcctcgctgctcgccggtacactggccggttaccgaggttcgctcacgctgaacggcgtcgaggtatccgatttgtcaggcgaaacactggccggagccgtcactgtgattggtgccagcagccatctgtttgcgggcgcattgcgcgagaatcttctgatggccttgcccgatgacgagattcctgattcgccggattccgtggactcccgtctgtggtccgcgctcgagcaggcgcgcattgccgacttcgtgcacgcacagccgaacggactgggcatgccgattgagtccgatgccgccaacctgtccggcggccaacgccagcgcatcgccatcgcccgcgcgctcctgcatgattcgccggtatttgtgttcgatgaggcgaccagcagcgttgacatggaatccgaagagctgatcctggatacaattcgcgaattggcgcaatcccgcggcaagacggttattatgatcacccatcgcatggccaacgccgaacacgctgatcaagtggtggtgctcgaacacggcaagtcggttgagaggggcacccataccgagctgatgacggcggacggcgtctacgccaagctgtttaccacgcaggcagatattgagaacttcggagaaggccatgctcggcgtgtgctgcaggttggttcccgcaagcaggagctgtccgacgacagtcggactgagggtggcgcagcgcgcgtaagcgcagaggcgggtatgacggttgaccgcctgcagtcagctttgccgacggcttccgttggcgggagtgagcaggcctcggctgagactccggctggtgttgcaaatagcgattcgtcttccaaaatgagcacattccaagtgatcaggcgactgcttaaggaagcccgacctctggcaggactgatggcagcggcctccaccgccggcaccatcggccatctttcggccactttcctgcccgtgttcggcattatcgcggcatttgcacttaccggtaatccggtgtggggcatgggtgttgcgcccgccgtcatcatgatgattatctgtgctcttctgcgtggcatcacccgatacattgaacaatatctgaaccacaatgtggcattccatctgctcgcactcttccgttccaaggcgttcgccgcgttgcgcagactggcgccggccaagctcgcgggcaaaggtaagggcaaccttatcgccatgctgaccaccgatgtggaactgcttgagatcttctttgcccacaccatcagtccggtggccatcgcggtaacctccaccatcatctacacgattgtggccgccaccctaagcccatggatggcgctggcgttgattgccgcccacctggttatcggcatccttgtgccgcgattttttgccaccggcgtacgtaaccttggccctgccatccgtggcgctgccggagaactcgacgatgtgatactcgatgacatgcgcggcctggacgaaatcatccgatttggccgcggcgaggaacgtgcgcaggccatcgaggaccgtacccatgcgttgtggaaggatcacaccaaactcagcaaggtcaacggccgtttcaccggaatcagcggactcttggtggctgtgctcacagcggcttcggtcgccgtggctattgcctgtgccggcgcgaacccgcagagcattccggctctgattgccgccttcgtgctgttcgccagctcgttcgaaccgactttggcgctcgccgccttgcccgctaacctgactcagaccttcgcgtccgctagccgactgttcggactgatggacgaggtgcccgctgtgaccgagaacggcactgttgtgccgcaggagtatatggacatgcgtcttgatgacgtcacctttgcatatgcgggggagcatgaagtcctgtccgacttctcgcttgacgtgccgcagcatggcgtgctgggtatccaggggccgtccggccggggcaagtccaccatgctcaagctgctgctgcgctactgggatccgcagcgcggtcaggtgacgttgtccggcacgccgttgcccgaggtcgatgtgcatgctcgccgacgtattcaggccatgatgagccaggaaacccacctgtttgatggctctatccgagacaatctgctgattgctttgcctgagtccgaggttgaagctgcaaatgttgcaggcaatggggaagtgggtgccaagaccgttgattcccgacagcagcagttggcggcgcaatcggcagagggcgatgccgttcaggtggcagcagctgacggtctcgatgctcgtttgcgtcaggctctcgccaaggcctccgtgcttgatctcattgattccctgcccgatggccttgatactcaggtaggcgagttgggcgaccgtctatccgaaggtgaacgccagcgtatcggtttggctcgtgtgttcctgcgcaatgctgatctggtgcttttcgacgagccgaccagccgtttggatgctttgaacgaggctattattctacgttccattcacgctatggccgtgggtgagcagcatgcagacaaggagcgcggcgcggctgtggtgctggtctcccaccgcgaatccgccatgcgcattgctgatgcggtactcaatctgtaactgcctgtaactacgcgggaatcgcatcgcattgcgttacgttaccgcgttgcattgcggttcctcgcgggtggcggcgatgccatctccggtcgtcattgcgttgctgcgtttgtgttgcgatatgtgatgcggcaacgcagcaatgcggcaatgcaatgtgatgtggcaacgtggcaacgtagcgatgcaataacgcggtaacatggcaacatggcaatgcagtaacgcaacgcagcattcacgccttgatcaaagcgccgatgacgctgtcgaacgcagtgagactgaggggagccaaagcccaaaaccggcaaacacagcaccggccatgagccgatacaataaaggatttgattaatatgactactcatagagcatttaggtggccgtccctgctgacggaatccggccgcggcatcgcgttcggcggcgactacaacccggaccagtggcccgaggagacgctggacgaggatatccgtctcatgggtgaggccggcgtgaacgtcgtgtcgctggcaattttcagctgggacaagatcgagccggtcgagggcgcgttcacgttcgagtggctcgaccatgtgatcgacaggctcggcagagccggcatcgccgtggacttggcctccgccacagccgccgcgccgctgtggctgtacgaatcccatccagaggtgctgccggtagaccggtatggtcataccgtcaacgcgggctcacgccagtcgtggcagcccacaagcccggtgttcaaggaatacgcgctgcgcctgtgccgcaaacttgccgaacactacaaggacaacccgtatgtgaccgcctggcacatgggcaacgaatacggctggaacaaccgctacgactactccgacaacgccttggccgcgttccgcacgtggtgcgaggccaagtacggtaccatcgacgcgttgaacgaggcgtggggcacggccttctggtcgcagcacgtgaacagtttcgacgaggtgctgctgccacgtcacatgggcggcgacgccatggttaacccgtcgcagcagttggattacgagcggttcggcaacgacatgctgctcgacttctacaaagccgaacgcgacgccatcgagcagatctgccccgacaagccgttcaccacgaacttcatggtctccaccgaccagtgcgtcatgaactacgccaaatgggcggatgaggtggacttcgtgtccaacgatcactacttccatgagggcgaatcccacctggacgaactcgcctgctcggacgcgctcatggactccctcgcgctgggcaagccgtggtacgtgatggagcactccacttcagccgtgcagtggaagccgctgaacacacgcaaacgggccggcgaactcatgcgcgactccctggcccacgtggccatgggcgccgacgccatctgctttttccaatggcggcaatccaagtcgggcgccgaggcgttccactccgccatgctgccccacgcgggcgccgattccaaggtcttccgcggcgtatgcgagctcggtaaggcgctgaagaccctctccgacgccgggctgcagggcactgagctcgagcgtgccggcacggcgatcctgttcagcgcggaatccgaatgggccacacgctccgaaaccctgcccagcatgaaactcaaccactggcacgacgtgcgcgactggtaccgcggcttcctggatgccgggctgcgcgcggacgtggtgccgctcgcctacgactggaccggctacaaaaccatcgtgctgcccaccgtgctcagcctgtccgacgaagacgttctccgtatcgccgacttcgcgaaggccggcggaaccgtcatcgtcggctatgccgccggcctgatcgacgagcacttccacatcggcctcggcggctaccccggcgccggcaacgggctcctacgcgacatgctcggcatccgctccgaagaattcaacatcctcggtgaagaagccgaaggcgagcccagcgaaatcagcctgtccaatggtctgacgacccgcctgtggcagaacgacgtgacttccgtagccgcggacaccgcagtgcttgcctcttacgcaggtgagtccgccgccgactgggagctggagcgcacccccgccatcaccagccgcccctatggcaacggtaccgccatctacgtgggctgcgacctcaaccgtcacgacattgcccagttgctcaaagcacttggctcccgatggcaggagttgtcggcgcagccgactgagagtggtcaaactccaacctatcccaccacagatccccgcatcctgcacaccatccgccgatccgcagacggctccacccgcttcgatttctacctcaaccgctcaaaccagcccgtcgccatcaacggtgtggaaggtgatcccatcatcgcacaccgttgcgagactgacgccgttggatatacgctgaaccgcaacgccattcttatcgctaaaacgtcctgctagaccgcgctagaatggcaatgttgtccggatagaggagtgcggcatgagcgacgagaaaacagccaagcgtcgagtgacgctacgcgatgtcgctcaggccgccggtgtatcgctcaaaactgcgtcgaacgtgatcaatggctccgggcgtatgacagatgagacccgtgccaaggtcgagtcggtcattaaggacctcgactaccgagtcaacgtggccgcccgcaacctcaaccgcgatcacaccggcttcatcaccctcgccgtgccttcgctgattccgccatatctggccgagctcgccaaccgcaccatcgaggccgcccgtcagcgcgactattccgtatacgtcaccacgtatgcggaaggctccgcgaaaggcgcgcgcgatctgctgaagaagttcaactccacggtgtccgatggcatgatcctttccatgagcgaggtggaaaacatttcgcccgatgatctgaaggttgattttccgctggtcatcgttggcgcgcgtaccacgtggggcattgtggatcacgtgaccccagacgatgtatccgcagccgccatggccgcaggctacctgtatgaccgcggttccaccagacttgcagtgatcggtgcccgtgacgtttacgacgaagatgcattgctgaatgccgtagaaggcaacgcgcagctgcgtctgcgcggcatcatcgaagagacccgtaggcgtgggctctccttggatccgcagctgattggcaacaccgatcaggattggaccatcggagccggtgcccgtgtgacccagcggctcattgattccggcgtgccattcgacggtgtgattgccttgaacgatcagttggccatcggcgcattgaccgctctgcgcaccgctggttatgaggtgcccgtgcaggtgcaggtcatcggcttcgataacaacgaggaagccccctacctgcagattccgctgaccaccatggattcccgccttgactggacggctcccacggcagtggatcgcatcctcggacgcatcgacggcagcatcaccaagtccgaactgctcaccaccgaatcccaggtcatcgcccgcgcctccacacgctgaacgacattgctgtaatgctggtgttgctgtactgggccgtacgaggcgttgatacaccggttgaccaacacggcataaagtgctaaggtgacgattgcgtggtacacagctgtaccgcgtggcgcataaggaaaggaagcgccaagcatcactgggcgttcgttctgagcgttcaccattcaaaggagaaaaagcatgcgccgaaataccgcgcttactcgcattatggcatccggcgtggccgccataatgctctgcgcaggaggcacgttcactgtaaacgccaccgaagaagaaccagttaaagccgacgtctcggtcaaggccatccaaggcttaagcgatgatttcatcggcggtatggacgtctcatccatgctctcgctggaagaaagcggcgtcacgttcaaaaacgccaatggcgaggtcgaggatttgttcacgttgctcaaggaatccggcgtgaactatgtgcgtctgcgtgtgtggaacgatccgttcaccgcagacggccaaggatatggcggcggcaacgtcaacgccgatcgcgcactgaccatggccaagcgagccacggcagcagggctgaaagtgctggtcgacttccattactccgatttctgggccgaccccagcaagcagcaggtgcccaaggcgtggaaatcctttgaaggcgacgcggacaaaaccgccgacaccgtatacgactacaccaagcagactctgaccacgttcaaacaagccggcgtggacgtcggcatggtgcaggtcggcaacgaaaccactgcgaaaatcgccggcatctccggctgggacggcatgtccaaagtattctccgcaggttccaaagccatacgcgaagtgctccccgaagccaaggtcgtcattcatttcaccaacccggagaaagccggcacctacgccacttacgccaaacagttgagcaaccacaatgtggacaaggtctcactcgtcaaaaagaccgaaactccggtgaagccatccacggagaacctggacaaggccgtggccgaagccgggaaaatcaatcgcgatgagtacaccaacgagtcgctcgccaaactcgatcaggcgcttgccgccgctgacgtgctgcttgccggcagcacctacaccgagcaggacgtgaacgatgtgatcaagcttgttgccgatgccattgccggcctcgcccaaaaggaggtctccagcctgaccgtcacgccaagcaaaaccacctatcaggtgggcgatgccatcgatgccgaccatgatctcaaggtcgtgggcaactattccgcaggcatgggcaacgtgacgctttccgccgaccagttcacgctcgattacgatttctccgctcccgctgatgcggcgaaggttaccgtaacgctcaagtcgaatccgaatgtcaccgaaacctatacggttgcggttaccgctcgggccgaagatggttccggcaacggctcggacggtgcgggtaatggcggggctactatcaatcccgatacgggcgagggcgataagaccaacggtgcgaatggcgacaagatcactggtgtgctgagcaataccggtagcgcggtgactgccgtgggtcttgcggttgtcgttctcggcgtggccggcggggtctcgcttgctttgcgtcgtaagcgctcctgatagagactgatgcggcattatgatgcggttgccggcagccggcaaccggctgtcagatgccatctgtcggctgtcgtttatcggttgtcggctgtcagatgcgtctgtctcggcgcagcgatgcgattctgtcccggttcgtgcatcaatcgtttgatgtgggtaccaggacagaaatcactgtcctggtttgcgaaaacgggtgtttttcgcgtaccgggacaattcccgttgccccggtttgcacgtcaatcgttctacgtgagaaccgggacagtatgttgatttcgggattggctgtattccgccgattctgtttgtcggggtatgtggactttggggattgtcttgtcctggttctcgaaaatggcccgaaattgcgtaccgggacaacgatttctgccccggtgcaaacgtcaatcgattgacgcctgtaccggggcaaattcgcgcccgggaacaatagggcgagggccggtcgcaggagtagagcgtgatgttgtcatgattgcgcccggctctcccacacggaaggccgggcgcaatcatgccgtttggttgcagcacccgcacatcgcctgcataaccgtgtacagtggcgtgtagttgcagtacatgaaggagcatcacaagccatgaccaacggacacatcaatcccgccaacgtgccggacatcgccttgaaagacggccattccattccgcaggtcggccttggcgtgctacgtatcgatgacgagggcgtggcccctgtcgtcgaatctgcgctggaagccggataccgccacatcgatggcgccgccggatacaacaacgaggccggcgtgggtcgtgcgctcgccgcttccggatacaacaccggcgccaagcgcgagaccctgtgggtcaccaccaagctgcgcgactccgagcagggctacgactccgcgctcaaggcattcgacaactccctgaaactcctccagctcgattacgtggacatgtacatgatccattggcccacgccgttcgactggcgcagcaccgacacctggaaggcgttcgtcaagctgcgcgacgaaggcatggcacgcacgctcggcgtatgcaacttcatgcccgccgatctgaagcgtctgcacggggagaccggcgcatggccggccgtcaatcagattgagctgcaccccacgtggcagcagcgcgaagtggtggcgttctgcaagaagcacggcatcgccgtggaggcctactcgccgatggcgcgtggcgccgacctcaacgccggcgacggcaccatcgagaagatcgccgccgcccatgaggtcagcccggcccaggtgattctgcgctggcacatcgaaaacggcacgatcatcatccccaagtccgtgcatgccgaccgtcagagggagaatctcgacctgttcggcttcgccctgaccgccgatgaacacgctgccatcgacgccctcgacggccccacccgcgccggccacgaccccctcaccttcacctatgcgtgattgatggcacgtcgtaacgcccacttccgccgtcgtttcaacgcctctggaccgctggagcgcgtgctgattctcatcgttctcgccgtagcaatcggcgtgaccatcggcctgttactgccgcaggtcagctccgacgtggccaaaatcaccggtggctacactgccaccggttcagccgccgacactttgaacgcgctcgccgtagacgacaaccaaagctcctccggctacgaccgcgattccttcggtttccgcaccaccgacgtcgacggcaatggctgcgacgtacgcgacgacgtgctcgcccgcgatctcacggacatcacctacaaatacgccggttcctgtgtggtcgagtccggcacactggccgatccgtacaccgcccagaccatccatttcgtacgtggccgcgccaccagcgccaaagtgcagatcgaccatgtggtggcccttgaaaacgcttggcaatccggtgcgcacgactggtccactgccaaacgccatgaattcggcaatgacccctataacctgctggccgtcgacggtccggccaatcaggagaagggttcggcttccgccgcctactggctacccaccaacgccgactaccgttgcgactacgtggcccgccagattggcgtcaaagacaagtaccagctcaccgtcacctcccaagaaaaggacgccatgctcgccgtcctccatacctgcccgggccaggccgtgcccgcagacgaataggggctaccgctcaggattgttgagcataggtgcctgcccctcgtcataagcgcgcaggagccgtcggagcaaaaatgtggtgaagtatggtgcggtgaacacgtgttcgctgctaccgatattgccggcggatagtttcacgccgaactgaatttccggataagaatccgaagcgattagcgtccgcatggatttggcggtgccttttttcgatttcacctccaccggcaccagccattcgcgcgtgcggacgaagaaatcctgttccagtgtggaatcctcttttttgtagtagtacaggtcatagccggatttccgtagcgcttcagagacgatgctctcgtacatagcacccttatagacaccaagattacgattggcccgcagatcatcactggcctcgtcgtcaagcatcgctacgaacagaccggtatcgccgaaatatatcttgaacttgttttcgtcataattgcctttcaacggcagttcaggataggacatacatcggcagatattcaccattcccgaggtctcaagccattccacgcatcctcgatagtctttgaaacgcgctccgctggcaaccttgctgatttggaacttcttgttttccttggcgagttgcacgggaatatggttgaacacgttgagaattcgtgcctgatcgagtccttgcgcgtatttgcggatatcctcctggtagtccaaaataagctggcgctgcaattgcagtgttccctcgaacgtgccagtgcgtatatgggaggcgacaaccgcaggcatgccgccaagcacgcagtaatccataaatgccgtggagaagacgttcatttccacttcagagaatggcgtagcatcacacaggtgggtgaacatgctttcgatgacggcctcatcgtatccgcgagcccacagaaattcttcgaagtccaacgatcgcatttcgtagtcggtcttatatcccacgctattgctttcgatttgcttatagctgatgcccagcattgaaccgctgcaaatcacatcatatttgccgtcgattttaaagaacttcagtgcagtggcgatatcaggatgggcctggatttcgtcgaaaaagatgagcgtatcgcccggaatgaactttttggctgggtcgatcagggaaatattgcggacgatggtattcgcgccataaccgtccgcagtgattgcacgatatttcggttcctcaacgaagttgatttccactaccgaacggtagttgtgtgcggcaaagtaatcgatagtctctgtcttgcctacttgacgagggcccttgatgattagcggggagcgattcgggtcggatttccatgcattgagataggcatcggctttgcgtttgagatacatgaggagcccctttccgaattactgctatatcaatgattttacactttcatgagcgagttttcggcggtttttcacatttcatgagcgagatggcgggaaatgccagctgccagtccgccggtcatccatcaatcgtccgcagattgtccgtctgttgactcgggaaacatgcctgcgctataactgtgcgcggtatgaagggaacaggtacaaacaatatggcagtaacacacaccgtggcagataccactgcggcaaccactatgacgaacgctgtggcagacatcgaacaggaaacaccggaaatcgggaaggaacgccagcttgccggagtcggaaccggggtcggagcagggacgaacaacaagaaaaagccgcatgaccatgcgctggccagcatccttggccccgcgttcgtggcggccgtggcctacgtcgatcctggtaatgtggcggccaacatcacctccggcgcacgatacggctacctgttggtgtgggtgctggtgctcgccaacgccatgagcgtgctcatccagtatcagtccgccaaactcggcatcgtgaccaacaaatccctgccggaactgctgggcgagcgtatgagcgatgccggccgcttcatgttcttcatgcaggccgaggtcatcgccatcgccaccgatctggccgaggtgatcggcggcgccatcgccctgaacctgctgttcggatttccactgttcatcggcggtttggcgattggcacaatctccacggtgatgctgtggttccaaggcggcaagacacagaccacattcgagcgcatcatcatcgtgatgctgctgattatcacattcggcttcatcgcgggtctgttcgtagccccgccgaaccccggcgaagtggtcaaaggcatgattccacgcttccaaggcgccgactcggtgttgatggccgcctcgattctgggcgccaccgtgatgccgcacgccatctacctgcactccacgctggtgaacgaccattacgcaggcggcgaaaagccgtcgatcaaaacgcagctgagaggctcgaaaatcgatgtggcctgggcgctgttgctggccggcaccgtgaatctggcgatgctggtgctcgccgccaactcgctgcatggcatgtctggcacggactccatcgacggcgcacagcgggcgatcacgcaggtgctcggcccggtgatcggcacgatcttctccatcggcctgctggcttcgtcgctgagctccacatcggtcggcacgtacgccggctcggagatcatgcacggtctgctgcacgtcaacgccccgatgtgggcctgccgcgtggtcacgctggtgccggcactgattgtgctgtggttcgccaaggacccgactcaggcgctggtcatcggccaggtggtgctttccatcggcatcccgttcgccgtgattccgctgatgcgatacacgcataacaaggaactcatgggcaagtgggctgatggaaccgtcaagcacgtgatcttcatgatcgtcgtggcgctgattgtggcgttgaacgtgctgctgattgtcctgacgctaatgggcagggcgtaatagactccagctgaaatcctgcgatagcacaacataataagaagccccggtgttggaaaccggggtttcttattatgttaagaatggttgaatctgccgtcagttcgcagtcatacgccgcgcacgccgttcgcgcagcgaacgcagggaaataatgtctcgcgtacgaccggcaccgtcgcccttgacgccgaagaacaccatcaacaccattgccagacagatcattgcggagatgcgcagcgtccattgaatgccgaaaatcgaagcggcgacggcggaggcgccgccctgcttatgcaaagcggcaaacgtttccatcagaatcaccaacacgggtgcgcccacagcgcccgcaatctgacgcgcggtattcgtcaccgatgatccggcggacacttcgctcggcccgttcaggcaattcagggaccacgtggtaatcggcatcagcaggaaacccatgccgatctgacggatgaactggcagatcgatacccaccagatccacgtatccatcgccaccagcgacatgcccaaggtgccaagggtcaacacaatcgaaccgaacaaagccacgggtcgtgcgccgaatcgatccatcgcacggccgccgaagaactgggagacgcactggccgatagcgcccggcaacatgatcagaccactcatcgtggcagaatacccacggtcggtctggatgtagagcggcatgatgaccagaatcgaactgaaggcgaaaaatgccagcgacgcggtaatggtgccgacggtgaacgaacggttcttcagcacttccaagtccagcagcggcggctgggggagtgccgacttgtccttggctacggcctcacgatagcgcttgccggcgcgcaggttacgcagcacgaaccatacgatgccgatcagacctacaaccataggtccccacgttaccggcgccgtaaatccataggtctccgaattggtgaagccgaacatcagcccgccaaagccaatcaccgacaggctcaccgagaaaaagtccgcgcgggcagacgggtcatgcgagccgaaattatgtagtccgaacatggccgccacgagcgagattacgccgatcacggtcatagtcagaaagatggaacgccagccgttcgcatcggtttgccagccgcccagcgtgggtccaatggccggcgccacgctcatggccatgcccaccgtgcccatggcgaacccgcggcgagacaggggataaatggagaatacggtgatctgcagcaccggccacatcacacccgtgcccgcagcctcaagcacgcgcccgagcagcacccagatgaagctcggcccgacccaagccatcagcgatccgaccgtgaacaccgccattgagcagatcacgatttggcgggtggagaagcgccgggtcagaaacgcggtcaacggcaccatcacgcccatgaccagctggaacacggaggtgagccactgtccggtggtcacggagatatgaaactcggaaacgatgatcggcagtgccgagctcagctgcagctgcgtgaaattaccgacaaaagt

SEQ ID NO: 2351 - DNA, 13894 bp, Unknown
  R50_10m  MAG No. k141_787
tagtacgtgcgttggtgattgtatgtacattgttcttcggttttggcgcagctctgtacgcactcggctggtttctgatgccggatgtacgcgatgggcacatcttggccgaggacctcattgccggccaatgggactggaattgtctgggatgcttcctgttcctcgccgtggcaatcgtgattccaggtgcggggtggggttgtattgcgctcgccgccttagcgctatggctgttggccaaaagcggcattcgccagcaggaagggtacggattcggggcatctgcgccgcgaccggtttcacagcctgtgtcgtatccagctccacagcctgcctcatatccagccgcgcaaccggtccctctatctcctttgtattcagctccgcaacctgtttcacaatctgtttcacgaaccgcgcctagtgtttcacaacctgtttcacagcctgtctatcagtcgatgcccagcgtgatgccgggcacagtgcccagcgcgatgcccggcacagtacccaacgggccgtttgcccccgaccgtatgaatgcgacggcttatgcccccaccgagtccaagcgccgcaagccggcgggcccaatcgtggtcttgagcatactgggccttaccttcctctcctttgccggtctgatgggactgatttgggtaaacgacatgggcattatcggcattatgcgtctgagcaccatctggattgccgcagtatgcatagtgatggggctggtggtcatcattctcggattcagagggcggcgtaccggtggtctgattcctctcggactggttgccggtggatgcgcgctctgcatgaccatcgtttcaggcacgtatggcgtgcactaccgtgatcttggtgccagcggcatcaatactgttgtttcactgagccaatctgtcagtgcgagaaacagcgacggcatgaacgatgtgcaaaaggatggcatcttcgttgccgatgccagcgatgccacgttcgaaacattgcagcaaggtgtggcgttcaacggtgaaaactacaacaccgaccaggcaatcattgattggtccgattgggacaagacacatggaccgcacacagtgaagatgctggatggcaaaacctccatcagtaattgcccggtcggtaccatcaccatagccgcaacacaggcgcaagtgcatatcgttctgccggattcctgcacttacgccttcggcaccgccgactcctacttcacttcgagtggcgttggcggcaaatacgagatggtatacaacaactacatgggtctaagctttgttttcttcggagctgaaagcgccaccaatcccatgaatgggcctgattacgaatggttggataagggatccgccatgccggacaacggcccagaattaaaaatcaatattccctatgcagtggaagcacgcgtcaacgtggtgtacgcctccgattggaaaggctccacgttccagccgcttgccgatatatacgacggcaacagcacaagcaagaacacaaccgggcaatcggaatgatcaagccgttacaaccaggagatggaatcatgactgatgaaaccaaggaattcgcctccatcgaggatgcgacaccgaccacggccataccttccgaaaccgacgcgaccaccgcgacaacaaccatggtgaccgtcgatgaccgaaccgataccacggtgctgccatccgcagcggatgatgacaaaacggctgtgctacccgtccccgacgatcatgcggatgcgccagtctcggatgtggatacgcaggcaacagctgcctctccatcgcccatcgaaccatccacagatcggattgccctggaagcagttgccgatgccgtggagggggatggtgggccgattccatctgccgatgatgtaccgatgtacgcagcatcttcagcgcaaccttcctatgagcagtctcagaccgccggcaaaccatgccagcctggggggagcgccaagaacgtccagaatgctaaggatgtcaagagtgccaagaacatccagaaacagagcatcagcgcgcttactgtggtattcggactattaggcgtgattatcggcgtgatcgcgctggttttcgggtgcatatctccggatcggatgatttcgctgttctcgccgaatccgcaattgctgacggctattatctgcgccgtagtgggacttattctggtaatagtggccgttgtatgggccatagtcggtgccgtcaagaagagaaaatagcgttacaaccattgcattacggtcccagtagaagcacattatgacgggagccgaccgataagagccgaccgttctatgctgatggggggaggcatagtaactatgaaacggatttcggcgcggcgggtagcgagcgtcatcgccaccgcgatggcgatgacgctggtattcgccacacttggctgggcgatgatgccgcaatggaacacacggccctacaccaagcacatcgctatcgcttctgccgacaccaccatcacccctgcccatgcgaacattccccacgaggggcgatatagtacgcgtgaaacccgactatccatcaagaccggcgacggcgtcacgctacccgccgtactacgtgaaccggtcgacgctcccgggccacgcccggcttgtctgttcattcacgggtccggtaccagcggtgccgaggatttcggcgatatcgccaacgccatggcctctgccggcatcgtgaccttggtgccggccaagcgcaacgacaactacaccgtgctgcatcgcgactacccgcgttttgctcgcgaatacgggcgttcgctcgacgtgctgcgtggcataagcggcgtggaccccgccaaaaccggcatctacgccgaatccgaaggcacctggatcgccacgattctaacctcgaaacggcaagacattgcctttgccatacttacatccgcaccggtgttcaatggacgtgagcaaatggccatggctgtcagcgcctatacgcatgaggccggcgcgcccaagcccgtggtcaaagacatggccaaattgatgtcgctggactacgcgccattcgatctggcctatgccgactttgatgccgaccggtatctgaaatccctcaccatgccggtgctggtgaactacggcacctacgatacggccatgcccatcgaacagggggcgcagcggatcatcgccacggccaacaagtccggcaacgagaacgtcaccgtacgctattttgccggcaaccatcagatgcgggctggtgagggcttattcaccccgaacctgccattggccgaaggctatacgcaagcgctggaaaattgggtgaacggtgtgactgccggaaccaaagccgatggatgggcaacgccccaagtcgccggtgcgacacctcaccagcgcttcgccgcgccgcaacgtaccagatccggtatcgtcggctcgctcggcgtgctggccggtctgatggtggcagggcccgtgctgatcgtgatggcggcgatattaggtattggcttgactgtgttttcttggctacagacgttgctggccgggcgacgtagtgtggcgactgtgcgggccatgcatgcgacgccgagtgggctgggagccgcccaacagcgtacgttgcacggcattgccggcttatctgccggtatcggcacagcggtgatggtgattaccgtgctgttgtatggctatatgagcgccgtaggcgtatcggctgtattggttatgcctcaaccgcagttgttttcccttgggtggagggcattgcaggtgctgaccgtgctgttggtcatgctgttcgcgtgggaactggaacgtatgtggcggtatcgcgccagcattatcggcgtgcgtcgtgtcatttgcgtgatggtgacactggctgcacttgtcacattgacgatattgtctttctgggggttgttcagtctgtgatattcacggtcgttaccggctccttcccgaatatgtgccactgagtcgccgtgagcgtcacaaattcgggaaggtggatggggcgtgacggcgtggaggcactgtcgtcagcgctgagcggcttcagcctcatccaaagtgtcgaaaccgccgagctggactgtgtgcaacaaggtttcctcagtgatattgcgttgcgggctggctgcggcgcgctcgctaatcatcacctcgtagagctggaaggtccgttcggaatacgtaccaagctcgccgcgcagataggtttcgaatgaggtggcagatggtgtgtcttcggtggtggtgagtacgcgcatcgcctcgccgagcttggggtagcgctcgcggaaatccttggcccaggcgacttgctgggcgatgacctgttcctgacgggccacgcgctcttcagagggacgcggaatatacggctctatgttcttcgtgaaatcttccggcgcggtggaggccatcatgcggccgtatttttcggtcacgaggttgcggcccacgtggtcggccgcgtcaagatcagcggcatagctggtgagtaatggccgctcccatgtgaggaactgggccagccgcatctggtggaacaccggccagttgccttggcatgccgcgcgtccaccctcattgttggtgcgctggaactgatcccattcatggcgcacaatagcctcgcgcagttcatcatcagtcagttcgttggtcatcgacgttcctttcactaatatctccctctgatgagggagatggcacgccgaagccgagacagaaggagcttgaatctacaaacttttaagcaccggatcatcggagacgatgtggtcctcgacatacgggcgctgccattcgaggaaggtctcgccggacgtggtcaggtgttcgcgtttgagttctctgacgatatccgccgcaatctgctccacgatatcgttgattttctcgattgctgtagccgcgcccttgccgccttcgccgaatccggcccctccatagcaggctgccgaactcaatcgcatcacggtttccaactgttcgcccacgttcggcaacagcgcgaacatcgagccagacagcttgcgcaatgctgcgaactgccacttgtaatacggcatatagcccaccaccatcggcacgttaaccaggaacaccaacgaggcggtggcctgcacgaactcgtggatggacagccatgcggccgcgccgtcgccgcgcttcaacgaacgcggcagattatattgaccggcttgggcgatcatgcccaatcgcttggaaatcaaggcaagccgcacgtcgtcgggcatatccttgaacccttggcgtgttttggagaactgcccagtggggtctgcgaatacttcgccattggtggctgcggccagagtcgattcagccagcatcagccactcgtgcggcgcggtttgcgcgggcgcagtgcgatacccggtgatcgactcaaagaagtcaccgatgcggaacacgccgtcacggcggttggcaccttgtgcgcggggcgtgacggggaagagcggtgcatcaatcggagtcgtcatcgcttccgccacatcagaggacgccgcgcctgacttggcagtggcggcatcgtccgtagcggtaccgggggtgggtgcgtttgccgcatcgggtatgatggtggagcctgcacctgcggaggggaatgccccggaagcatcggacctggcatgcgcctcgaacgtcacgcggccttgcgcatccacgctgaacttgcgcggcagcgcctcgtaatcggcctcaagttgctcgccgatggccgcgtaatcctcatccgtaagccacaggcagaagcgcgggccgaaatcgtggtcctgcgaatacgcatcatcgaatccgtagcattccgagccatgacccaccagaccggaggcgatacgcccggcatactgcggatacttcgccgcaatcatcggcttgcccatctgcgtccagaacgcgcgggccagcttcagtccggacaccgggcatgcggaaacggcctcggccgcgcccgcagaaccggtcgacaccgaaacggtggatggggaagatgtcgcgtccgcaccggtcttgccctgtgccgggctgtccggcagccgtgatccggactggggcagcgcgcctgcatcgccggcaacacccgcattgtcaaccgtcaccccggccttcgccgcctcttcctcggcctgccgcagattgtcggcggtgatacgccagtaatcggtgtccttgccgtaacattcctcgatcacggccagcgcatgccggtatccagtaaccgcatccgcataccgtctctcggcaaagcacacctgcgcgaagcccgccagtgcggaggcataatgcgcggaatgttccagatggccggtgcgatagatttccagtgccttggctgcatgccaatgcgcgccctccaacttgtgttcggtcagcagggtcaacgccagattcgtgtgcgagctggccacgtcgatatccgcgtccgggttcacgctcgaggcttcgataatgcgcagcgcttcacgcaactccagttccgccttgtcgggccgattcgtctcgctgtagagcatcgacagattgttgtgcagtgctgcgagcctacggtcggtgggtgccagcgaatgccggcagacactctgcgcctgatgatacaaatcctcggcctgatcgtattgttgggccgcgcgcatcgcggtagcgcaattgattagcgtggtggcccacgcctcggatgtgccggtggtcaagcccatacgagcggccagttccagcgcccgctgcacaatccactgattctccttgtgccggccctgcgagcgatagaagcccatcgtttcgttgagtacggtgagcagtccggcctcgtcgccggcgttttccgcgtccaccatcgcctgttccaagtacggaccggcttcggtggctgccgcgtggcgatcgaaaatcgcgtccagtccgttcaggaattgttgggtatcaaaggttgcgggcgattgatcggcatcgtccgtggcctggttcgcagtagaatcggcaccttgcgctgcggccgccgcatcggtgtcgtcggcatcgtctggaccatgcgcgaattgtgcggcgaattgtttgagcagtgcttcctcgtccataccgccagacctccctgaatcgtgtctgatttcagtctattaatactgtgaacaaacgcgtcagggagtttgctgtgagcttggtctcagtccaccttgatttcgcgcatgcgatgaatggcgtcggtatcggtttcgcagcgccacgagtagaaggccagcagccctacggcaagcagagccagcggcataccgcccagaccggtatagcgatagttcatcgagaaagtggtgagcatcgcgccgccgacaatcgagccgatggcattgccgaagttgaaggccacctgcacggctgcgccggcgatgagctcgccgccgccttggccggcttcggtcatcaacagctgttgcggagcggagatgaagaacaggccgaaggcgatccagaaggtcagcaaagcagtagtgccctggtttcccggcagtagcaaaaccatcagcaagccgatgcaggaaatcgtctgacccagcgcggcagtgccggcgtggcgccatttatctgtgatgcgaccgccgataagaccgcctatcaccatgccgaagccggcaagcatcatcaatagcggtaccaggttagacgaccagccaccggtcttctgcagccaaggggagacgtagctccaccagcagaacacgcctgcgttgccggtgaatacggcggccagaatcacccacggtccacgacgagtaaggaatttgaactgaccggcgatgccggcgtccttaatcggcgcaacgaaggggatccatgccagaactagcacgatggtcattgccgcccatgcagccagaataccgaatgcgaggcgccaggataggaactcagccatcaaggtgcccgccggtacgccgagcatattggctacggtttggccggtgaccattaccgatacggcttgtgcttctttgcccttgtcggccaaggttttggcgatgagtgtggcggtgccgaaaaatgcgccgtgcggcaggccggcaatgaagcgcgcgacaatcagcgtggcggcattgaccgagaacgcggaggccagattaccgataagcgcaatcgccataaacaatatgatgaggttcttcggcggcaccttgcggccgaacaccagaatcagtgtgccgaagcacacgccgatcgcatacgcggaaatgtaatggcctgcggtggggatgtccacgccggtggcggccgcggcctgcggcagaatacccatcatcacgaactcggcggcaccgagaatgaacgcgcccgaagccagtgcaagcagactcttcttcatggttcctctaattacttcagtattacttacaaaaacagtgcggcaatcgattgattcgagcgatatattacggtggtccgccaacaaatacgggccttgccgcgacgcggtttgtcgctgtgcgcggcgggttgtttaccgctgtccgatcgcttggtctgattgttgggttaggaaacgaaaaaccggattgctgatttctcaacaatccggtccagttgtcgggctggcgggatttgaacccgcggcctcttcgtcccgaacgaagcgcgctaccaagctgcgctacagcccgtttggcaacagacgtagatattacattgtggtggtggacaatgcaaatcggcatgtcgcgagtgttgcgtgatggtggattcgccgtgtgtacaggtctctcaagccttgtgcagagccggttttgcgtcatgtgagcgggtgttcagatggccgtacggtctgccgggctcataatcgccggccttgcgtacactgatgaatcatggctgaagttgtcgaaaataccgaaaacactgagaatgaaaccccggccgtcccgcagatgagcaccgtcgaacgtgcggaaatgctgctcgagcaggacgccaccatccgcgagaagatcaagtccggtgccacgctggacgaagccgtggacccctccaacaaggagttcggcccgctggctcaccccgagcaggtgcagatgcgcgtggccaagcgcgcgatgatgcttgaggccggcatcgccccctacccggtgcacttggacgtcaccgacaccatcgaggcggtccgcgccaagtatgacggcaagctcgaggctggcgaagagaccgaagacatggtcggcattgctggccgcgtgctgttcctgcgcaacgcgggcggcctgtgcttcgtgcagctgtccgccggtgacggtaccaagattcagggcatgatctccaagaaggagattggcgccgactcgctcaagcagttcaagcagctcgtcgaccttggcgatcacctgtacctcaagggccgcgtcatcgcctccaagaccggcgagctgtccgtattcgccactgagtgggctatcgcctccaaggccctgcagccgctgccggccctgcacaaggacctgaacgaagacacccgcacccgcaagccgtacatcggcatgatcgcggacgagaacatccgcaacatggtgcgcaaccgctccaaggccgtggcctccctgcgccgcacctttgacgaccacgacttcctcgaggtcgaaaccccgatgctgcagaccctgcacggtggcgcggccgcccgcccgttcaccacgcacatgaacgccttcgaccttgacctgtaccttcgcatcgccccggaactgttcctcaagcgctgcctggtcggcggcatcgatcgcgtgttcgaaatcaaccgcgacttccgcaatgagggcgtcgacgccacgcacgcccccgaattcaccatggtcgaggcctaccaggcctatggcacctatgattccatcggccagctggtcaaggagctcgtgcagaagaccgccatggacgtctacggctcgcacaaggtcaccctgctcgacggcaccgaatacgacttcggcggcgaatggaagaccatcagcatgtacgattcgctgtccgaggcattgggcgaggaaatcgtgccgaacggcggccctgagcatcccggcacctccgttgagcatttgggcgccatcgccgacaagctcggcgtggagcgcgacgacgtggagaaccacggcaagctcgtcgaacacctgtgggagcacttctacgaggacaagctttacgagcccaccttcgtgcgtgacttcccggtcgaaacctccccgctggtcaagggccaccgcaccaagcccggcgtggtggagaagtgggatctctacgtgcgcggcttcgagctggctaccggctactccgagctcaacgacccgatcgtgcagcgtgagcgtttcgtggcccaggccaaggacgcactcgccggcgacgaagaggcctgcgacatcgatgaggacttcctcgaggctctcggcgtgggcatgcctccggccggcggtatgggtatgggcattgatcgactgcttatcgccttgaccggtgccacgattcgcgagaccatcaccttcccgctggtcaagccgctcgttggctgattaggcatactctggctcccctcagagaggggagccagagttatatatgaaagggattgcttatgtctatcggcttgtgggttcggggcgcgcgtcccaagaccttggtcacttccatcgcgtcggtgatggttggggcggtgatggcgtacgtgcatatcgagcggtcgggcacctgcatcgcaatatatccagaaccggcctcctgcgccacggcccgtgaacagcagaccctgctgatggaccgattctggccggtgaccatcctgtgcctgctagtcgcgctgttcctgcaaatcgccgtcaactatgcgaacgactattccgacggcatccgcggcactgacgccgggcgtgacacggacgaatcgaaatcaggcaaaccccagcgactgaccgcatccggactggtaccagccaagcatgtactgttcgcggcgatgatttgcgccgccatcgcctgcatatgcggtgttgtggcggtcgtgctcgcccaagcatggtggttgctggccgtgggcgcggcctccttgctggccggctggttctacaccggtggcaagcatccgtatggatacgtcgggctgggagaagtcggcgtgttcctgttcttcggcttggctgcggtattgggcaccgaatacgcgctgtgcggcacggtggacgtcggcggactattgggtgctgtggcggctggcctgttctcctgcctgatcatgatggtgaacaatatccgtgacatcgacgaggatcgtgagcatggcaaacacacgctggccgtacggctgggggagtccggcgcgcgtacgttgctgattgtgtgctgcgtcatcgcatggatcatcgccctgctgatgtgcggtacattatggtggccgtggggtgcggtgctgttgctctcgggcaccggaatacctgtgcgcatggtctccagcgtgaataaacgtcaattccgcccggctctgcccgccgccagcttccagaccttgctgtttgcggtggtgctggcggttgccgtggcgctatgagagcgaaataataagacgaatactcgtgtttgggcgcacgcggctgtagactgaaccgtatgacttataaactagtactgctccgtcatggacagagcgcatggaataaaaccaaccagttcaccggctgggtcgacgtaccgctgaccgagcagggtgaagccgaagccaagcgcggcggcgagctgctcaaggagaagaacgtccttccggacatcgtgttcacctccctgctgcgtcgcgccatcaacaccgccaacatcgctctggatgccgcagatcgtctgtggattccggttcagcgtgactggcgtctcaacgagcgtcactacggcgctctgcagggcaagaacaagaccgagatccgcgaagagtacggcgacgagaagttcatgctgtggcgccgttcttacgccaccccgccgcccgagatcgacccgaacgaccagtacgcccagaacaacgacccgcgctacgccggcgatccggttccggaagccgagtgcctggccaacgttgttgagcgtgtgaagccgtacttcgagtccgccatcgagccggagctcaaggccggcaaaaccgtgctgattgccgctcacggcaactccctccgcgccatcgtcaagatgctggacaacctgtctgaggaagagatcgccaaggtcaacatcccgaccgccatcccgctgctttatgagctggacgagaacttcaagccgatcaagccgcgtggcgagtacctggacccggaggctgctgctgccggtgccgccgctgtcgccgctcaaggccagaagtgagcctaagccgctaacacggtacaagctgtaaggggagtcgcacataatgtgtggctcccctttgctatgcctgccaaatccccatggggcggtgattaccccatggggcggtaaaaccctcatggggcggtaaaactctcatggggcggtaaaactctcatggggcggtatgccagaatggcttaattccgcggtttcacatatctttcaaaccgccccatgggcaagttaccgccctatgggtgttttgccgccccatggatacgccggtgtaccgcccagaagcaacaaaaaaacggcgtccagccgtagccggatcgccgctttcgggcatcctcctcaaaccataggaggacaagtgttcagttattcgcccaatgtgaggacaagccccaatcagtcgatgtcggtgccctcgtcgcgggtcggctccttggtggggtcgaagccggagacgatgtacaccacacggcgggcggcggacacggcatgatcgccgagacgctccaagaagcggcccagcagcacgatatccacggtctgctgacgggtgatgtcatcggacagcgccagatcgaaggtctggtggtgcaggttgtccagcttgtcgtcggccaggatgatggcctcggcggtcttggcatcgcgatcggagagcatggccaccagctggtcagcggtgttgtccaggaagtcgatcatctcggcgaacaccggctgagcggattcgggaatcgcggcggccgggtaggtgcggcgagcggcctcggccacgtggcgggcaagatcgcccatacgctcgaacgtggaagccagacgcatggtggaaacgaccacacgcagatcggtggccaccgggttctgcttggcgagcagcttgacgcactggtcgatcacagaggactccagggcatcaatctcgatgtcgccgtcaatcacagtctgtgcggtttcaacgtcctgattcagcagggcttctccagcgcctttgatcgccttgcgcacgttctgcgccatacggtcgaggtcgtcagcaacctgcttcagctcctcgttgaaaataacgcgcatttctctagcctttcatgcttgcttattgcaacctgtaccagtgtattattccagtacttgttccccacctcaacgtaggtaatggcaacctcaagttgttctactgttcattgagttgttcacctgaaattcatgttaccggcgcgccggcaaaccgcaatcccggcgtgtggtgtgaaagaatgggggcatgacacagatgccgctcgtcgccgcgattgctcttattgtcgcggctgttttatttgtggtaggaatcatcacgctcatcgtgggatttgcgacacatcgagtgtctgtggaatcgccgctggccgatgatgacgacaatgacgatctgtccgacgacaccgccacgctgctgtccatgctgccgggtgcgtccgtggtggtcga

SEQ ID NO: 2352 - DNA, 6362 bp, Unknown
  R50_10m  MAG No. k141_852
gcggcgaccccggctctgtggtggaaacgcagaccacagccatcagcaccgacggcctgtccttcagcccggagaccacggtgattcgccgcccgaacgaagatttcggccttgatttccgcgacccgaaagctgataacacgttgttcgatggtaccgcgcttgcgggcactcccactattgtggtggccacaaatctaccatccggcgaggcaccagccgcaggagactccggctccacgccgcggccggaaggcgaatactggtacggcgatggtgcgttcgccgccgccggggagcaagagcctgacccaacccgcacgcctgcattggcattgttccgtgccaccgacaccaatttaggcaaggccgcatgggagtatgccggtccactgctgttcgagacgggactcgccgaaacctatacctacgagtgcccggatgccttctcgctggacggctcggcggtggcggtcggatcgatgatgaaactgcatgattcgaccggtcgtttccagccaattcgctggtacacaggcgttatcgcggattcgctcgacgctccgcgtctggacgtgcagcacaccggttggtgcgatttcggctcatgctattacgcggtgcaatccttcctcgatcgtcatacgtcggtgaacggcaccgacgtggaccgtcgtattgccatcggctggttgtgcgactggttcggcgtacgcatcgaacggcctgactatgccaatggcgtgatgagcctgccacgcgaactgcacgtggtcgatggtcggcttatctctcgcccgatccaagaggtctacgacctgttggtgggcgatgttcttactgcaacgccagcaggcaatagcaatacgttccaagtgcccaatcacgcttattacgcggatatacgccccgaactcggctccgcgttctctgcgacactggtttcgggcacacgcactcagccggatggagccacggccgaggtctcgctgcgattggtcagcgacggcgctgccgtgcacctgacctccaccggcctaccgactgacagattcgactatgtgtccgccaccaagcagatcgaacgggtcgaggtcttctacgatcacggtgtggccgaagtgttcgtcaacaacggcgaagacgcaggcgcgattctcttcgattgcgacactgtcaacgccccggatttcaccaccgagctgaccgtcacggagctcagcgggactatcaccgtccacgagctgcgcagcacccgctaaaacataacccatatctcagtcgaggggcgtgatcagcgccccagacatctatctgcgttcaaagaggtacattcggggtcttgcggaatgctatctgctttcaaaggagtacctagactgcaaaactgcgagtatggtcgttggaatatcaacgctcatactcgcgatgtcagagtttcgatacccctttgaaagcagatagtattccgcaatcaggcaaatgtacctctttgaacgcagaaagcccctcctttgaaggaggggctttcgtatgttctgcatatttctctcactgagtttgtgccagcgagaaagctccaggggaaactcccctcacccgcttcgcgggagctcccctcaaagaggggagccgagatccggtgcgctactggctcccctcaaccgaggggagccagaggaatcaggcctcgtagtagccgtcggcaccgaggcgggcgtccgggttgaggagcatcgccttttcgacctcgtggtggtcgtagccacggtgatcctcgcggaagcgacggttgtcgatcggctcgtagagcgcggcgcgacccatcatgccttcctcgaggtgacgctggccggcggccaggcgggcgttggcacgctcacgccaggcttccagcgcggcctcgccatcggccttggccacggccgcttcgaaggcacccggatgaaccagggccacgaagccggaaacatgtccgaagccgagcgaggtggccagaccggccttgaccgggcgaccagcggtctcgcgaccgaactcgtcctcgccaccgccgatgcgcaggggcttcctaacccagaccatgtggtcgtcgcgctggagcttcggatccacgcaatcaagcgccgcgttcgccggaatcacgccggacttgaacagctgcgtcagaccgttgacctggaagatgcaggcaccacccttggcgtggccggtaagcgtcttctgcgagatcacgaacagcgggttgccgtcggtgcggccgatggcgtgggccagcgtgttgtgcagctcggattcgttcgggtcgttggcgttggtggacgtgtcgtgcttggagaccacggcgatgtcgtcggctgagacgccgagcttagccaggtcgtacacgagcttggagtccttgccaccgaggccggcagccagggcaccgaggcccggagccgggatcgaggtgtgggcaccatccgcgtaggagtggatgaagccgaccacggccgcgaccggcaggccgagcttttcggcgatgtcaccacgggtcacgaggatcgtgccgccgccctgggattccaggaagccgccacggcgacgatcgttcgcgcggctgaagaagcgcgcgtcgatgcccttgccgtacatttcctccgagttggcggtggcgttcatgttgccgaagccgatcacggattccacgccgatgtcgtcgatcgcgccggtgaccacgaaatcggccttgccgagggcgatcttgtcgacgccctcttcaagggagacggccgcggtggcgcaggcggagacgggctggatcatgttgccgtaaccgccgatgtaggactgcatcacgtgagccgcgaccacgttcggcagggcctcctgcaggatgtcggtcgggatctcgtggttgaggaagcggtcgaggtacagcttgcgcatcgacatcatgccgccgaagccggtgccctgggtcgaagccaccagcgaggggtggatggactcgaggatttcggccggggtgaagccggcgcccagataggcgtccacagtggtgacgatgttccacagggcgatcttgtcgacgtcgccgaccatcgaagcggggatgccccaacgggtcgggtcgaagcccttcgggaactggccgccgactgtgcgggtcatggtggcgcggcgcggcacgcggatcatcgagccggcgtggcgggtcacgttccattcgccggattcctcatccggggcgatggtggtgtgagcctcgtccaacttgacgtattcggcggcgacttcgcgggtgggcacagagaaggtgacgtcgtggtcgaggaagacctcggcttcttcttcgtcagcaccgtccttgtagtcgttgcccatgccttcctcgaacgggcggatgccggagcgggccacgacctcgtcgtggcagcgctcggcgatgtcctcttcgggcacgaggttgccgtcggtgtcgtaccagccgggcttcgggctgtcggcccaagtcagcagacccatgttccacgcaagttcgagcactgctccggcgctcaggtctacagtgccgtccgagtggatgccgagctcggcctgggtgcgcgtacgaccggagccccacgggcccagctcaccgacggaaacgatgacgatttcgtcttccggcttggcggtgacgttggtccagtcgttgaggtcgaccgaagcctgcttggtgatgatcggggtgggcagcgccttgatttgctgcccacgcgaggagtcggacagtccagtggactgtccggcgacggagccatccgtttcctgagacgaggccgcagcagcttccttctccgcatcggccatggcctccgcgcgcaacgccttgatgtcgatgggctcggagccgaggccaccggtcaggtccacatcgagcggggccttgagggcctgctcgcgcgattcggcagtgcacaggtcgagcagcttggccgcaatctgtgcggtggagtaggtgtggatgccgtgacgctcaacgacggcgaccagcgggtcgttaccgcccatcaggccggtgccacgcacccagccgatcttcgggtgagcgaaggtgacgcggctcgaccacaccttttcagcgcgggcacggttgacgatggcgtcaaaggcgctcttgacttcgccgtaggcaccgtcgccgccgaatacgccgcggttcggggagccgggcagcaccacgtggagcttgtgctgcacgttggtgtcggcaccgatgtggctgaagccggcgatggcgcgttccacgccccacagcatcagtcgcgcctgtgattcgaacaggtcgccggagtcggcgagcgtgccatggaccggcggagcggcgaacgggaagaacagggtcggctcccacgcgggcttcagaatcgtggtggtggcaccggaggtcttcttctgctcgtggcccacccagtcgaccagagcgtcgacgtcgcggtagctggagaggttggccggaaccagccacagcttggcgttgccggtggcgtgctcgcggtaggcctgcttggcccaagccttgatggacggcttgaagctgtgcgaggtggccaccacagtggcaccgcctgcgagcaggccttcgaccacctgagcggcaatcgagttcgggctcacgccggtgacgatggcgatatcattcgcgtaacgggaggcgttcttgttggaagcgacctgttcgagggcctcggagccggccttctggaaggcggccttaagctcctcgctctccgactcgttggcgaaccactgggcttcggcggcgatggtcttgccaaggccgatgaagctgccgttcaaggcggcggggtcgttgccgtagtaggcgcgggcgaggtcttcacgggcggaggcccaccggtcatcgaagaggatggccttgttggcgtcgaagcgcggagcgacctgcatgggccagtcggagccaagttcggcttcgaccgcggccacgacggcggcgttctcgtcctcggattcttccggagccggagcggccacgccgagctcgttcagcacgaagcgggcggtggcggcgagcacgccgttggaaccggtgaccttctcggcgaaggcgtcgagcgcggcggaatcgaccacagcgccaccagcggcaccaccggcggacggcagggccacggcaacacccttgagctgggcgacgacctcaacggccgcatcgatcagcttgtcggcttccggcttgttctgcacggcggcggtgggcagcttggccaggtcgccgccacgggagctggcaccctcgcgagtgtcgagcagcagtgcggcgagcacgctggccacccagccttcgccgagctgccatacgttggtcacgcggtcgcggatgtactgctgtttgacgccggcggcaccgaacagcgagcgcaggcggtcgcgcagcgcctcggagagcacggcaccgaacggcttgtagttcggggcggccttgttgacgatttgggcgagcttgtcgagcgtcgcttcagcagcaccgtccacgctggcgactcccagctcggagctgatgtccatgagcagctggttgcggcgagaagagacaccgttggtcagggtgtcggtggtgtcgttgctgccgatctggtcgaggcgcaccttggcggagtaggccatgagtacgccgatggcatcggaagccttgaagggcaggtcggcgacggcggcaccagacggtgcgccagcagcggcctgccctgattgcaggccgcgcgaggaggcggacagtccagtggactgtccggcgacggagccatccgttgtctgagcagcctcagtcgcggcatttgccggagcagcacccgatccgagcttggcgacggcggaaccaccggcaggagcggtttcgaccggggccgaggccgcagcctcttccggctcgtcgtcgggaaccagcgaatcggtgtcggtcatgtagacgcggccttcatcgcggccgacgttgtagacgaccgtatcgttgccggcgaactcgggcagacgtagggtcttggtaccgaggttggccagggtcggggcgttgccgaggccgacttcgacgtattcttccacgccgaggccgccctgttcgcgctgaccgaagagcagcgcctgggtttcaatccaacgcaccggggaggcgaactgccaggagagcagttcggtcaagagcagacggccgagcttctggtcgtcggcggcgtaggaatcccacacggccgggtcgtccagtgcggccttgatacgctcggagggcacgacttcgaggatcttggcggcgaattcctttgtcatctcaaacggcgaagccacgaggttcggaatgtagcggtccaccagac

SEQ ID NO: 2353 - DNA, 11135 bp, Unknown
  R50_10m  MAG No. k141_972
aggggctgattttgactttgcggaacatctacttccgtttcacggggctgatgccaaagtagccactggttaaaaacggcggaatagtgatagaacaatgccatttctatctgcgttccgccagttgaccagccccttgaaacggaagtagacctccggcaaacgccaaatcagccccttgaagctgattttgactcagcatcatgcagcgcagctatatcctcagtgcgggtatactattccgggccgtcacgacgacgcctatggaacgcacgcatggcaaagagagaaacatgagtcagcccgacaccgacacggcggcacagtcgccgtcctcgcagcaggaaccgcagattcagacggatggccgtcaaaaccagccggaacaggtgaaccaaccagcgcaaatcagccagtccgagtcgccacatgacggcaaaggcgagcacgcgctgcataccaacctgaagcgcggcatggaatcccgccacctgcagatgatctcgttgggcggcgtgatcggcaccggcctgttcctgagctccggatacaccatccagcaggcgggccccatcggcaccattctggcgtatggcatcggcgcgctgatcgtctacctggtcatgctcacgctcggcgaactgtccgtggccatgccggtgaccggctccttccatgtgtatgccgagaagttcatcggccctggcaccggcttcgtgatcgcgatccagtactggctcacatggacggtggcgctcggatccgagttcaccgccgccgggctgctcatgcagcgctggttcccgaacagtcccacatgggcgtggagcgcggcgtgcatcacactcatcttcaccctgaacgccttgtcggtgcgtttcttcgccgaggcggagttctggttcgcctccatcaaggtgttcgccatctgcgcgttcatcgtcatcggatcgctcgccatcttcggcgtcatcccggtcgccggctaccaacatgccccgatgttcggcaatctcatcaaggacggcgtcttccccaacggcttcatgccggtgttcgccacgattctgaccgtcaacttcgcgttctccggcaccgaactcatcggcgtgaccgccggtgagacgagggacccacaaaccgccgtgccgaaagccatccacaccaccctgtggcgtctggcgctgttcttcatcggctcgatcaccgtgatgtgcgcgctgatcccgtggcgccaggccggcgtgggcgaaagcccgttcgtgctcgtcttcaacagcatcggcatcccctatgcgggcgacatcatgaatttcgtggtgctgacggccgtgctttccgcctcgaattccggcctgtacgcctccacgcgcatggtgtggtcgatgggcaacgaaggcatgattccgcgctggttcgccaaaacgaaccgtcgcggcgtgccgatgctcgccttgtgcgccgcgatggccggtggcctgctggcgctcctgtcttccgtgatcgccgcctcgactgtgtacctggtgctggtggcgctttccggcctgtccgccgtggtggtgtggatcgccatcgcctactgccagatcgtgttccgtcgccgttggctggagtccggccattccaccagcgaactcaaataccgcacgcccggctatccgtacgtgtcttgggcggcgttcatcctgtgcaccgcatcgttcgtattggtgattttcgacgtggagcaacggttcgcgctcgtggccgagctcgtgttcatcgtggcctgctatggggcgtatttcctgcaacagtgggtacgcaagcgcaaaaaggcgaccgaggccgacgacctcgatacgctttgggtcgcgcgcgactgaacggctcgcgacctaccggcgcaccgctattcgcgccgtgaacgtgcactgatccaacgcaatgccagacccagcaaatccacaccgccacgattgcccatgatgtgggtttgagcgcggccggggagaacggcagcacctgcaggccaatgatgattaagccggcggccagcagcgaagctgagatgaccataccgaacttcttccagtcaaggccttcgcttgcctcttcggcactctgcggaatcgtgtcgaaaccggtgtagaagagcggcgtcatcaccagcactccgggcagaaacgacccgaccatggtaaccgcgccggacgtcgagccgatcggcagcagaaacacggcgtccagcacgaaggcgatcatcgcctcgaccgggccaccgccgacgatcatccagtcaccgaccagcagcacccatacggtgccgatgattgcgccgaatcccatggtgaagtagttccacaggctcagcgatctgaccatgccgccgtcgtcgccgctgccatcggcactactgtcgccgttgccgttgttaccatcctcgtgcacaggaatagcggcactgggcaggccagtcgattccaccaaactggccgtcatcgtgcttgacgggctgaatgccgtggatgcggcgaccatgaccgagcctcctttaattcggcctgactgtgatgataacgccgttcacgatatgccgtattatgaacgcagtgagagcccgcttcaccggccctattcggctcatgaataaacttcgcctatctgcggcactgaacacatgaccataatgtgatacacgtcacttcctgaaatacgtagtcgttatggaatcacccgcacgtttcccgtatcggagctgtacgatagctgtgagacaggggggtcgtcagatttcggggggagggttccggaaacggtccgactgcaggatgcaccgggccgtgcgacacatgtcaacttgcgtattcacgccaaactcaattgagcaagccgattctcgtaaatggccagaagcggaacaacgccacaccttggatatcgtcgtatggcactagcccattgttgccgtcgtcaagatggtatcgagaatctctggaattggagcgattatcaccaagcacgaacacgttgccgtcagtaacggttacggaaaaaggactgtcgcttggattcacgccggacttaagataagcgctttcatcaatgggtttgccgttgaccgtgatgggctccccggatcccttgcaggcgacggtatcgccgggcagaccgatgacacgtttgattaggtaacgattgctgtcgattatcgacatcagattggtgggaagctgctccccctccatccagtctgcgggatctttgaacacgatgatgtcgccacggtgcagtgcaaagagtctcggagtcaatcgcgaggcaaatacgcggtcgccgatttgcaacgtgtcttccatgctacgggatggaatcacatagacgttgaacacgaaggtgcgtcccagcaacacgaccagcatcaccgcgatcaccgtcagcagatagccgcgaatttcactccaaacggagggctttcgcgcatgtctcctcgactgtccacgcgcttttttgctatgacgccccaccatcatatcctttccgaccggtaacgcaacaccatagtcctcaaaccatgccgttacctacgcccatgtttgagctcagctgtcacaccagcggttcgcgcacgtctagttcacaggcgatgccggtttccttgcgggcccattcggccgcctgcagtgcggcgatgttccataatgcgcacggcactccgccaaggtccggatgcgatgcccagaatgtgaggtcatcagcgtatgcggtgatgaccgattcttccgtgactggcatgatcgtgtggtacagacggtccgcaagcgtggccacgaattcgttggccgcggcgaacgtgtcgataagatgctgttcggcggtcaccggcgggccgaccagctcccaggattcgacgtccgtggcgctccaatgcgcggcttcgccgtccacatcgcgttgcaaagagacgaacagcctggcgaactcatccgaagtcagtcccgtaacccggcgtcgggttgacaattcaatcggagtcatcagataccgttcctttcgcttcgttcattccgttgtctcgctggtttgatttgctgccaaccggtacaaagcctatctcgcacacctcacgatagcccaaaccaccggcatggccatgattgccagccctacgaccagtgaccacgaggagccggcgattccggtcagattggtcatggcggcggagacgtcatacatgccatgagccacgatcagcggtgtaatcatgcccatacggcggtacaacagcacggcgagcactgcaatcagcacacgcggtggcgtgccgccggcacaatggccctatcgagcatcgccgcatgattcgtgcggtccacaatcgaggcggcatcggtttccattcggttcatgcggccagactatcgcccgttcttgccgattgcctgtaagcaggttcggatagactggcgcgagaacaatgcgagaaagaggcaagaatgacccggaaacggtcacaacagcacgacgcacaacgcaaaccgtcctggcgcgtacgctggaagaccatgagccgagccgtagacatggaaatccgcgaacacaaaagctcattcgcggtctatgtggtgctgcgcatgctggtgctcgccatggcaatactccagttctttaacggcgactacgaaaatgtgttcctgtgcatcctgacgttgctgttgctgttggcgccggcgttcatccaggtgcagttccgcatcgagctaccttcggtgctggaagtcatcgtgctggtgttcgtgttctcgtccgagattcttggcgagatcagttcgttctatgagatcttcccgttctgggacacggtgttgcacacgatgaacggcttcctcgccgcggcgatcggcttctcgctggtcgacctgctcaaccggtccgaccgggtgaagttcgagctttcgcccctgtatctggcgatcgtctccttctgcttctccatgaccatcggcgtgatctgggagttcttcgaattcggcatggaccagttgttcgggttcgacatgcagaaggacgccatcgtgcattccatcagctcggtgatgctcgaccccacgcacaccaaccatgcgattcgcatcaacgacatcacccaggtcacggtcaatggccaagacttgggcctcggcggctacctcgacatcggtctgatcgacacgatggaggatcttatcgtcaacttcatcggcgcggtcgtgttctccgtgttcggcttcctgtacgtgaagaaccgcggcaagaaaaactccatcatcagtcggttcgtgccgcgccgcaagtccgccgaccgcgattatctgcgactggtgatcgatggcgggagcgcggctgatgccaaggccaaagccggcggtgccaacgctgacgatagtgctaacgccagtgcggccggcaccgattcagctgatgcagccggagccaaagccggcaatgccgacgccgctccgaccgtcaccgccaagccctgagtacgctctacagcactttcgaagcgtcgaaacggtagtgcccggtgaccgtcatgtgcttcttgaaggcgaagtagtcgttttcgcgctgccgctgcgccatgttgtgaatcacgtacggtgcacgccccgcaatcggccggcggatagccgccctgatagtagccggaatcgtaagccggatggttttcggcgtccttgcgcgcacccgccacgatatccgcgtaatcgtccacaccattgtcattgaaatcgaccgaactggcgactctcgaatacttgcgggccgccccgccttgtgattcgatgattcatgaacgtattcgggtcacactgtgatcgtccgacccgccgcccgcacctcccaatccgcccggtgcttgaacttgtggggctttggcggtatcgcgaccgcagcatcgccatgctcatctccagccatcagctcaacgaattgcaggagttgtgcgggcgattcctgttcatcaaaggcggccggcttgcggacgaattcgccggcgaacagaagcggatcacggttatcgagcttggccggccgctcggtgtcgcgaaacgtgcggcggtcgcggctttggatccggccgccgtcattcatactgattctgccggccgtgaacctgttcaactccgatttcatgaaagtcagcggaaagaccggttcggtgagtgtgctggatttcctcgctggcgagttcgtcgtacagaacatgctgatgctgccgatggtggtcatggcctatctggtggctggtgccatctatacgcccgtggcctccggccgcatgttcctgtacaaggatctggaccgcgccacgatcatcaatgcgaaaatccttgccctgtttggtatctacgccgtgtacgtggcattgcagacggtggtgacggtcgctctctacatcctgtacatcgcgcgcttcgactacgcttccggcacactgctgccggccgcaggtgcggacatcgcttcggatgtggcctccatcgccggcatcctgtgcgccggtgtggtgactatactggtggtggccgcccttgccacccggttctcgaccggcagtacgagagcgcggaccacaccgtgcacctcgatgtgaaggtggacgaggatacggtgtggcttaacagaaagcaattggccttgctgtttggccgcgatatcaaaacaatcggcaagcatatcggcaatgcattgagggaagagctcaatggattttcagttgtcgcagaatttgcgacaactgcatctgacggtaagacataccaagtcgagcattacaacttggatatgatcctgtcggtcggataccgcgtcaaatccaaggaaggcatctattcccggcgatgggccaactcagttctgaagcagcatctcgttgatggttacaccatcaatcacaagcggcttgacgcacttcacgccgtcgtcaaggtgctatcgaggtccaccgaaccggaaattgctggcaccgcagagatcttggaacgatatttgccgagtcttgtgctgcttaacgactatgacacaggcaatgtccctatacccaagggcgacgagtcccagtgggtcttgacctatgaggacgcgatgctgttcatccggtcgatgccgttctacacgcaatccgatctgttcgggagggaacgcaacggttcgttccaaggaatcgtcgcaggactctaccagacgttcggaggcgaagaactgtaccgttccacccaggagaaagccgcgaacctgctgtatcaagttgtcaaggatcacccgttctccgacggcaataaacgttgtgccgccgcactgttcgtgtatttcctgaacggaaacagtatactgggcgacgatgactcccctgcttgtggagggtaacgccttggcggcgatgacgctgatgattgcgctgtccgcacctgcggggaaggacacgatgatcgccttggtcgagaacttccttatacggcatgaatcgcaggagatcaattgagagaccgtcaatgaagggtgcacatcaatcacgttctagcattgcgcgactatctgtacgagtcgtctgaacgatctgctgggagtgctcttcgcggaaaaccaacagcagaccggaggccgcatccactatgtgttgttcaacccttgggccgtgcgcagcaatgaggcattgaacagtttcgattcgccactgatgaagctgctggcgcgtgccatttacgccattgtgggcgtcagcgtcgaggaggcgattgcccccatcacccacttgatcgacaacccgccgcacaccgcgctgtcagcgttcatcaagaccaaacccgtcgatctcactatgaacaccttcgacaggggcaaggcggtccggttggacgatatcaccaaaagctgctgaatcgctagctgtcatagcacaaggccttagacagaacacccagaaatcgaacgggtagatggatcgcgtctccccttgacttccggcaagcgcacgccaatcatggggcgtatgggtattgcaatcaaacgtatatatgaagagccgactgcgtcggacgggtatcgggtgctggtggatcgcctgtggcctcgcggcatgacgaaagagcgtgcggcgttggacctgtggctgaaggacgtcgctccctctcccctcctgcgcaaatggttcggccatgaccccgccaaattcgcggaattccgcatgcgttacatcgccgagctcgacgccaatgccgccgtggacaatctgcgccacatctgcgcggagcatcccgacgtgaccctgctctatgccgccaaggacccgcacatcaatcacgccctcgtactgcgcgattatcttaactgaatattgactcaggacgaccgtcgtttcagtccatctgctagattctcgccgattttcgtatctttgaatcgaagtgcacagtcgtcactccttggattgccaagtaaagggatgcctccaaaccaaatcaatccgtcatcgattatggcaaaatcggaacacgattcgacggtccggacaatgcacccaatagcacgcagccgattaatattccgttctattcgtgttctggttgccaccgcagcagtcgccggcaaacggacataaacttcgatgagcgctttcctgtcggccagtcggagcaattcatcgtcaattgcgctgagtccctgttgtgatacatattcagccgagataatcagggaacgtgcgcaaccggcaatatccttgcggagtatctctgcataattcgtggctgtaacgatgctgccttcgaataatccgtcagaccgggtgtcgagcaacgcatccgcagcatcttcgccctgcgtcgcggccgtcatgcaagcgcgcaacgcttccgcctttgcactgagcatgtccattttgtcagtatggtcaggatttaccgaatatccttgatttgcgtatgccttcagccgttttcgatacatgacagcggataaaggcacggtcacgtcgatgtaatcatagacacgaacctcggtcttgccatcattctcgcgatgaagtcgccctacatattgcgagagagtaccctcaaacgagaccggagcggcaagcagaagcgtgtcgaaacgcttctgatcgaatccttctccgatatagctacccgtagccactacagtcaggctctcattattcggcaccaaggatagatcatgcatttttttggttattcgctgtttgcggtggggcgggcatgggttagtgtttcgggttcgatttcctgtcagaaaaaataatcgagtgcgggattacggccggtaaggctcctgctgtggatgcggatgcgcgccggtcttacggtggtgctttcccaaaacgcggattgtacgaggtgtgggacggcacgcggattcggccgttttccgcccgccgtcccacagcgctcgctatgaacggttgtgcataatcatggagctgcagcgagaatcggcgttattccgcggtttcgacagtcgtcggtgtgggacgctacggacgttaaacggttgactcgtctgccatcccgcgttcttgagggacggcgcggacgacaaacgattgacttgcctgccgtcccacagatattgggaggcgcgcggctgcctgctgcccataacgggtgtcggtcaccccaccgatcgcccccctgcttgaaatacgcgactcgactttctgcaggcatcatggcggcatggcgacggcggacagtcgaaaagatccccatgatgcctcaacagccatcacccacgcacatcacagccatcaaccgcaaatatcaagaggctgaaaatctatgagacaagcaaccccggaaagccccagaccctacaaatggctttattgcaagggtatatgccggttcaaactccactgatagaactaatagaacaaatagaacagccgacttaggcacggcgcggtaaatggcgcaaaccggccgcgatagtagtagcgtggtgcataccagtacaaccatgcgaggagaacagccatgatcaatgaggaatacaaggccatgcttggcggcaagtccgtgattcgcgagctgagcgagtatgccacgagccgcggtgccgaaatcggctaccagaacgtgttcgattacagcctgggcaatccctcggtgccggctccgaaatccttcaccgacgccatggtcgacctctacgaaaacggcgatccggtggccatccacggctactccccctcgctcggcatcccgtccgtcaaggatgcgatcgccgaaaacctcaacgaacgtttcggcatggcatacaccggcaaccatatcttcccgaccacgggcgcggcgggcgcgctgtcccacgcgatgcgcgcggtgaccaagccgggcgacgagatcatcaccttcgccccctacttccccgaataccagccgtacgtcaagggcaccggcgccaagctgaccatcgtgccggccgacaccgagaacttccagatcaacttcgaggcgttcgaggccgcgctcaacccgaacgtgcaggccgtgctcatcaacaccccgaacaacccgtccggcgcggtgtattcggcggacacgctcaagcgtctggccgcgatcctgaccgccaagcaggccgagtacggccacgacatcttcctgatcagcgacgaaccttaccgcgaaatcgtgttcgacggagccacccagccctacccggccagcttctatgcgaactcgctgacctgctactcgtggtcgaagtcgctgagcctgccgggcgaacgcatcggctatgtcgcggtgaatcccacagccaccgacgccgacctgctcgtgcccatgatgggccagatctcgcgcggcaccggccacaactgcccgccgagctcgatccagctgggcgtggccaaggtcatcgaccagaccgccgacctcaacgtctacgagacgaacatgaacctgctctacgatgcgctcaccggcatcggcttcgacgtggtgcgccccggcggcacgttctacatcttccccaaggcgttggaggacgacgccgtggcgttctgcatgaaggccaaggaatacgacctgatcctcgtgccgtccgacagcttcggcgtgcccggatacttccgcatggactac

SEQ ID NO: 2354 - DNA, 12817 bp, Unknown
  R50_10m  MAG No. k141_1258
ccggccgcatcatcggcagcggcttggccttcctcaccatcctgattacgtgcctgacctatggtcgcattgatttggttcacctgctgctgggcggcattaaggtttgagttcgctgctcgcagagccagatcggcctgattcacgtcgctatcgagcttgtcgttgttgatggtaaacagtacgtcgccggcgttgacggttgcgccttcctgcaccttgacttcgccgatggtgccgtcgatctgcggggcgacgacggtggagttgatgggttctatggaaccggtggagctgacttggtcgacgaaatggccacgttccaccgttgccgtggataccggagacacgcccccatctgacggggtaataatcgcgtgcaccaccataaagccgataatcagtaccgccacgacggcgacggcgatgatgcgatgcaccacgcgctttttcttgcgcgtctcacgttcgcgcattaatcggttgaattcggcgacttccgcgttctccgcctcgccttgggcaagggcgtcgacacttgattccacggtgtcggtagcgtccaacggttgtatgattgcggtctgctgctgatccttctgcatgtgctctcccccatggctggctccgagcctcgtgcccggatactggttccaagcctatggaggaatgacgtggtttccatcatgcgcaggattgaattgatggggagttgtcatccttaaggattagttggggtggggaatttatgggctgttttcagtcttggctctcgccttcgcttccgcttttctctcccccagtcatgcttcgcatgacagcctcctcgtcagagggggcttatgaataagcaaagggctcgggatgaaaatcccgagccctttggtgttagcgaactaacaacaccgtggaggtgttatcactcgttgtcgccagcggtagcggcggtagcggtgacggcacccttcttgtcggtgttcacgccggagtacacccagtcggtgtagtccgggtggtcgtagcccttgtcgacggcgaactggaaggcctcatcacggaacttctcgagctcgtcgatcttgtcggcgtacttgtcggcgtcgatcatgcgcagggcctcagcggtcagctcgtagcggtcgatgcggttgacacgaaccatgtcgtacggggtggtggtggagccctcctcctcgtagccgtggacgttgaagttgtcgtggttcggacggtcgtagatcaggccgcgcacgtcgtgagcgtaggagtggtacgcgaacagcaccggcttgtcggcggtgaagatgtcggcgaactcctcgtcggtcagagcctcgtcgttctccttggcggactgcagggagagcaggtcggcaacgttcacaaccttgaacttgacgcccagttccttcagcttgtcagaagcagccatgatctcctgggtcgggacgtcgccagcggcggcaagcacgacctcggcctcatcgttgttcttggcggtggaagcccaatcccaagcggcggcacccttctcgagctcggcacgagcctcgtccagggtcagccaggtggcagcaggctgcttgccggcgatgatggcgttgatcttgttggtggacttgtagcacttctcggcgatggccagcagcatgttcgcatcggtggcgaagtagatgccgatgacgtggtcgttgtggaagcacttgttcagcaggacggaggtgacacccgggtcctggtgggagaagccgttgtggtcctgacgccaaacgtgggaggagaccagcaggttcatggaggcgatcggcttgcgccacggaatctcgcggacggtagcctcaagccacttggcgtgctggttcagcatggagtcgatcacgtggacgaaggactcgtaggagctccagatgccgtgacgaccggtcagcaggtaggcctcgaggaagccttccatctggtgctcggacagctgctcaacgacctggccggagacgtgcatgtgctcgtcgacctcgtcggagatgtagccggcatcccactgcttgttggtgacttcgtaggaagcctgcagacggttggaagcggtctcatccggtccgaagatgcggaagtcgcgcgggttgttcttgatgatgtcgcgagtgtaggcacccagggtacgggtggcctcgagctggccccagccgtggccgtactcagccacttccttgacctcgtagtcctcgaggttcggcagcttcaggtcgtcgcgaatcacaccaccgttggcgttcgggttggcaccgatacgcagctcgcccttcggcatgaaggcaaggacgtcgtccttgacagcgccgttggcgtcgaacagctcttccggcttgtaggactcgagccagttcttgaggacctcgaagtgggcctcggtgtcgcgggcggaagccagcggcacctggtgagcgcgccaggagccctcggtcttcttgccgtcgatgtacttcgggcaggtccagcccttcggggtgcggaagatcagcatcgggtagaacggacggtgcacgttgtcggtctgagcggtggccttgatgtcgcagatctcatcccagatggtctcccacagctcggcgaagcggcggtggatggacatgtggtcctcatcatcgaagccagcgacgaactcgtagggctcgtaacccatgccgtggaagaactcgtggagctcttcgtcggagatgcgggacaggatggtcgggttggcgatcttgtagccgttgaggtgcaggatcggcagcacgataccgtcggtgcgcgggttcacgagcttgttggactgccaaccggtagccagcgggccggtctcggcctcgccgtcgccgacgatggccgggacgaacaggctcgggttgtccatgatggcaccgtaagcgtgggacagagcgtaacccagctcaccaccctcgtggatggagcccggggtctccggagcgaagtgggacggaataccgcccgggtaagagaactgacggaagaacttctgcagaccagcttcgtccttggtgatcttcgggaaggtctcagtgtaggtgccgtccaggtaggactgggaggtaccggccgggccaccgtggcccgggcccatgatgatcacggtgttctggccgtggtcagcaatgaaacggttgatgtggccgatgaggaagttcaggccaggggtagtgccccagtggcccaccagacggtgcttcacatcttcgcgggtgaagggctccttcatcagcgggttggaacgcagataaatctggccgatggaaaggtagttggcaacgcgccagtacttgtcaacgccttcgagggcttcctcggaaaccggagcgttgagcttcttccaaggggtgccaataacaggactcgtcatgtgtactcctgtactcctgcacgtgatcgtgcgattgattatttctgttcggtcacggttcctgacccttgcggtgccaaggttttccgttcccaatcaatcgtcatggtacgaggacaacgcgacttttgaacgatttcttgcgggtgtgttcgaaattgttgcggaaatttcagtatttgtgcggttcaactgaccgtttgtcaacattagttttttcaacatactttttcagaacggcggaagcatgcggaaatctagcatctgactagaacagcgcacgttcgatttcccatgttcgaaatcggcgtgttgtccgactacaggcatgtagtttgttcgatttgcgcacatagtccctgcgtgtcggccttgtcgccttgaccagtgataatcaggggtgttcagcccacgtaaaattccaatgaacgttaggggaatatcaatggcaaacggtcctgtgcttgtcgtcgacttcggcgcccagtacgcccagctcatcgcccgccgcgtgcgcgaggcaggcgtgtactccgagctggtccctcattccatgccggtcgacgagatcctggccaaggatccgaaggcgattattctgtccggcggcccggcctccgtgttcgagcccggcgcgccgaccatagataccaaggtattcgaatccggtgttccggtgcttggtatctgctacggcttccaggtcatggcctatgagctcggcggcaaggtggataaggccgctctcggcgaatacggcaagacctcagccaccatcgacgacgccgacggcatcctcgccgactcccccgccgagcagaccacgtggatgagccacggtgtggcggtcgaacaggccccggccggcttcgaagtgctggcccacaccgaaggcgcgcccgtggccgccatggcggacgaatcccgcaagctctacggtgtgcagtggcacccggaagtcaagcactccccgcttggccagaagcttatcgaaaacttcctgcaccgttgcgccgcgctgcccaacgactgggacgcctcctcgattatcgaggatcaagtcaagaagatccgcgagaaggtcggcgacgccgaggtgatctgcggcctgtccggcggcgtggactccgccgtggccgccgctctggtgcacaaggccatcggtgaccagctcacctgcgtgttcgtggaccacggcctgctgcgcaagggcgaggtcgagcaggtcaagcacgacttcgttgccgccaccggcatcaagctcatcaccgtggacgcggccgacgacttccttgaggccctgaagggagtctccgagccggagcgcaagcgcaagatcatcggtgagaagttcatccgcacgttcgagaaggcccagcgccaagtgcttgaagaggccggcgcgcgcggcaaggaagtcaagttcctcgtgcagggcaccctctaccccgacgtcgtcgaatccggcggcggcgacggcgcggccaacatcaagtcccaccacaacgtcggcggcctgcccaaggacatcaagttccagctcatcgaaccgctgcgcaccctgttcaaggatgaggtgcgcgccatcggcaccgagctcggtctgcccgacgaaatcgtctggcgtcagcctttcccgggcccgggtctgggcatccgcatcatcggcgagatcaccaaggagcgcctcgacctgctgcgcgaggccgacgccatcgcccgcgaggagctctccaaggccggtctcgaccgtgacatctggcagtgcccggtcgtgctgctcgccgacgttcactcggtgggcgtccaaggcgacgagcgcacctacggctcccccatcgtgctgcgtccggtgagctcggaggacgccatgaccgccgactggtctcgcgtgccctacgatgtgctcgccacgatctccacgcgcatcaccaacgagtgccgccagatcaaccgcgtcgtcctcgattgcacgagcaagcctccggccacaattgaatgggagtaattgctctctgtgacgaatgggattctccatcggggaatcccttgttgttgccgacgatgcccggtataatttttccgcttacgacgtcgtccggaaagggatgccgacctctttgcgccagggattcgacaacgaaaaatacatcgaactgcaagccgccaacatctcaacagcgtgaaccgacgcttgcactcggatgaaacgctgattgcattgtcaatcaccagcgccaccagtcctgtggccgctcgcgtcatcgacgggctcaaacagttgcagggctgcgacgcctttttctccgttatcatctcatccacggacgaggcgttgtatcgcaaactcggcatcaacgtgtgctgcgaaccgaagtacgaacgggtgagtctgtatcaccggtaaacgccaccggtaagcgcggtatgccgcgaatcgtcaagccggtaatcatgcagcatgcggcctgacgattcgctgctgtcgcattgtctctcccctctaccatgctgggcttgttttccgtttgttggagagaacgggggatgccattagcactacggtgagagaaggattatccgtgaatcggttcgtgggtctagacggtattaaaggactggcgctgatagccattgtgctgtaccactgcatgcagcaactgctgccaggcggattctacggagtcgacgtgttcttcaccgtctctggattcctgattgccgtcagtttgattcgttctctggcgaaaaccggatcgctgaatctcgtgcgatatatccccaagcgtgcagtacgtctctatccggcgctgtttctgctgattccggtcaccgtctccgtcggctggctgctcgatcacgacattctggtttccatccgcgatcaggtcatcaccgtgctgctgggctgctacaactggtacgccattgccggaggccaaagctatttcgaccaaatgaacccgcaggtgtttcgccatctgtggttcattggcgtgctcatgcagttctacgtcatcgtgccgttcatcgtctggctgatgtggaagctccgccagacgaaactgccctcactcatcccactgggactcgcggcgttcagcagtatcgccatgtgggtgatgtacgtgcccaagggcgaccccacccgcgtctacttcggtactgatacccacagcatgggcctgatgctgggtgtggctctcgcctggtgggtcaccgctcctcagttgggccacgctcgtcagggagctgtgccgatgccccgcaccattagatcgagcgcttcggccgccacgtaccgggctccgttacctcagattcctgtaaagcatcgcatctggaatgcgacggcaccggtattggcattcctcagcctgattgccttggtcaccatgacggttatcggcaaacaggatgcattcgccttccgcggcggcatcatattgtccagcctgttgtccgtgctgctgattgccggtaccatctccgacgattcctggatgcaaagcctcatggtgttcaagccattggccgccctcggcaagtattcgtacggcatttacctgtggcactggccgttgtggattctttccagcgcccttgccccgaagatcttcaaggcagcagggccttggcctctcatcatgaccgcgttgctcaccgccattgcggtgatgatttcctggctgatggtggagaaaccggcggcaatgcactcggtgatatccgtcgtggtgccccttcgcacgaacaagaagaatcatgcggcccgggttattgccgttgacgttatcctggcgctgtcgttggtcggctgcgcgcagggcattactcatgcacctgcgaaaaccgccatgcagatccagctggagcaacaggccgcacaactggaacgcatacagaaaaccgaacacgtgctgctgcgccatgccgtgccggcaccgcccaagcccaagcatgagatgcccaccggcgatcagattaccgccataggcgattcggtgatgctggcctcatcacagggcctttcggaagtcttccccggcattcagaccgacgcgagcgtttcccgctccatcatggtcgcccccgaactcatcggcaatgatctgtccgccggcagtctgcggcaatgggtgctgatcggccttggcaccaattcggcaatcacccctgatcagctggaccagattcgtaatatgatcggccccgaccgcgtgctggtactggtcaatgcccacggagaccgtacgtggattccacctaccaaccaggtgcttgccgactatgcggccgcacatccggacaatgtggtgctggtggattggaatgccacagccaacgcgaacgcgcaggtgctcggctccgacggcatccacccgagcatggatagcgatatctatgcaaaggcggtcaaacaggccatcgaacaatggatcgcaagcggcaggtgaacggcaggcaacgctgagttgtccaacaggtcgtgaagaacggctatgctgaagactgcatcaacgagaccacacgttgggagacatggtgagcgcaatccttgaagggaagcccgataagaatcttattctcgttacgggaaggattcatccgaaattggctgaggatgtcgccgagcagctcggcatcgacgtccttgaaaccaccgcatacgatttcgccaacggcgagatgtacgtgcgctacaccgaatcggtgcgtggcgccgatgtgttcgtgctgcaaagccactacaaacccatcaacaaggcgatcatggagcagctcatcatgatcgacgcattgaagcgcgcctcggcccgttccattactgcggtctgcccgttgctcggctactcccgtcaggacaagaagcaccgcggccgcgagcccatctcctgccgtctggtgttcgacctgctgaagaccgccggtgccgaccgcatcatgtcggtcgatctgcatgccgcgcagtcccaaggcttcttcgacggcccggtcgatcatctggtggccatgccggtgctggtcgactacatccgtgatcgtttccaaggccatctcgacaacgtcgccgtcgtctcccccgacgccggccgcattcgcgtggccgagcagtgggcgcagcgtctcggcggcggtccgctcgctttcgtgcacaagactcgcgacatcacccgcccgaaccaggcggtcgccaaccgtgtggtcggcgacgtcgccggcaaggactgcgtgcttgtcgatgacctgatcgacaccgccggtaccatcgcgggcgcatgccacgtgctgcaggacgcgggagccaagtcggtgaccgtggtcgccacgcatggcgtgctctccggcccggccatcgagcggctcaagaactgcggtgcgcgcgaggtcgtgctgaccgacaccgtgccgattcccgaggaaaagcgctgggatggcttgaccgtcctgtcgatcgccccgctgctggccagcgccatccgcgccgtattcgaggacggctcggtcgccgaactgttcgacacctaccccgagcaccacggtcaaggcttcctgttcgcctgatcacgtgcgtgtttgttcaaggaaagcacacgatgcgagacgcgacatggcgtagtctttcggtaaataccgacagtatggtataaatgaacacttgtgggccgaaagcccacgactcccccatggtgtaatggcagcacacgggtctttggaaccctttgtcttggttcgagtccaggtgggggaacggctgacggccgctcgacatccgggcggccgtctattgttttgaggtgtttccaccctcaatagacattccgatcgaagggaatacgtcagttatggcattatccgcagccatcgtcctcgccgccggcgagggtacccgcatgcgttccaacaagccgaaggtgctgcatacttttgcaggcaagaccttcctgaacagggtcatggattcggtgaccgccctgaaccccgacacgctggccgtggtcgtgcacttccaggccgagcgcgtcgccgaagccgcccgctcctatgacgagcaggtcaccatcgtgaaccaggacgacattcccggtaccggtcgcgccgtgcagtgcgcaatggcacagctcaccgaggctggcaaggtcgatggcccggtgctgatcgccgcctccgacatgccgctgctcgacagcgagacgctgcaccgcctggtcgaattccacaccgcctccggcaacggcgccaccgtgctcaccaccatcctcgatgacccgaccggctacggccgcatcatccgcgatcgcgaaggcaacgtgctgcgcatcgtcgagcagaaggacgccaaccgcagcgaactcgccgtgcaggaagtgaacacctcggtctacgtgttcgaggcttccgtgcttaccgaggcaatcgccggactgaagtcgaacaacgcgcagggtgagttctatctgaccgacgcgctggaaaccgccaaggccgctggcaaggtcggcgcgttcgccgctccggatccgctcaccgtcgaaggcgtgaacgaccgcgtgcagctggccgcgctgtccaagacctacaaccgccgcgtctgcgagcgctggatgcgcgacggcgtgaccattcttgacccggaaaccacttggatcgaggacgatgtccagatcggccgcgacgccaccatcctgcccggttccttcctgcaaggccacacggtggtcggcgaggacgccatcgtcggcccgtacaccaccctcattgacgcaaccgtggacgaaggtgccgtggtcgagcgttcccgcgtgcaggaatcgcacatcggcgcacgcacgaacatcggcccgtggacctacctgcgcccgggcaacgagttcggcgaggatgccaaggccggcgcgttcgtcgaaatgaagaaggcgcacatcggcaacggcaccaaggtgccgcacctgagctacgtgggcgacgcccagctcggcgaccacaccaacatcggcggcggcaccatcaccgccaactatgacggtgtgcacaagaatcgcaccaccatcggctccggctgccatgtgggcgccggcaacctgttcgtggccccggtcgaggtcggcgacaacgtgaccaccggtgccggctccgtggtgcgccacgccgtgccgagcgacacaatggtctactccgagaacacgcagcacaacgtcgagggctggaagcccgcctgggagcgctgaaccatgcccgcacttcaggattccatcaacgccgtccgcgtggccgccgaggccgcagaccgtatcaaggccaccgacatcgtggccttcgacgtagccgacctgctcggcatcaccgacatcatgatgatcgccggcgcctccaacgagcgtcaggtactggccgtggccgaggaaatcgaaaaggacctgttccttaagtgctccggccgtcagccgcgctctcgcgagggcctgaccgagggccagtgggtgctgcttgactacggtgatttcgtgattcatgtcatgcacgaggaatcgcgcgaattctacgggctcgaacgactctggcgcgactgcccggccatcgatcttgaactcgcacacccggaaacggtggagcatgcggacgctgctgccgtcaccaccgcgtaacgtgcgaatcacataacgctgatattcgctgatactcgctgatattcgtgtgttgggctgcctgttgccgaacgtcattgacggcaccaggcagccctccctttccctgtttcctcactggaatcgaaaggatcgtcactatggccaatcatgttcgttccattttccttatccgtcatggacgcacttcctataacgccgctcacaagctccaaggccaggtcgacattctgctggacgccgtgggtgaatggcaggtcaagcagaccgccgcggccttgaaaagcctgtacgtcgatcgtcggccggaaatcaaccaccggttcattgtctgctccgatttgaagcgtgcgcacgccaccgcgcaggctttcgccgacgtattgggtggaatcgagcccgtcgatgatcatcgcgtccgtgaacgcagcttcggcgactgggatggccatgccgtggctgaactggccgaacgctaccctgaggacttccgttcctggatggagtctcggggcggtgaactgaagtatggtgccgaacccaaggaagccgtaggcaaacgcggtgtggaggctcttgaggactggtccacgcgtgccggagacgacacggacctgttcgtgttctcgcacggcgcatggatcgcgcagacattgcagaccctgttgggcatttccgcgatcgatccgaccttctccacggtggtctcattgcgcaatgcgcactgggtgcgcttggtgccgatggacaatcccgatggcactgtgcgctggcgtctgctggactacaatcacggtccggccatcgccgacaccgacgaatgggaacgcgaacgctgatcatgttcccgactcccctgctaatccaataggtccggtgcattcggaaccgttcaagcaataactgaatgactcaatgcctgaataatggcggaaacaagccaaaaagtgtcgccaaatcacacttttgtcatttggcgacacgccggcttttgccagaatcgacatctcgtcgtaatgtatacgaggtccgaacaacgggccaacaattgaaaacggggctatagcgcagctggtagcgcatctccatggcatggagagggtcgggggttcgaatccccctagctccacgacgaagccatcaaatcggatgatatggtggtttctccgctggttcgtggcgggtcttgtgactcccatgaatcggatagcttcactcggggctatagcgcagctggtagcgcatctccatggcatggagagggtcgggggttcgaatccccctagctccacaatcaaggccggtgcttcacacaccggcctttttcgttttctatcctatcgggcgacttttgtgcaacattcccgggaatgcgtcgcaaaacagggactggaatgcatgcagtgcgatactttccccggaaagtatcgccaaggggacgctcttccgattggcgcgacaccggcgtgagagataacagtaatcgccactacaatgaggtgtggtccctatcgtgttgatcatcaaaggagacaaaaacatcgtgaccgtcacccgtgtatatatcgccagccctgaaggcgccaatggccgcaacgtcgtcgcttacggcgtgctcaacgcattgacttccaagtacaagaccatggtgttccgccctgctgtgtccaaccatgacgaattcaccccgatcctgctcgccgcctccaatgccggactcggcgtggccctgtccaccggcctcgatgtgcataaggtgcgcgccgacaaggac

SEQ ID NO: 2355 - DNA, 9141 bp, Unknown
  R50_10m  MAG No. k141_1349
gcggccgagcgccagcgttcgggtgtcattttgcggcgctggccggtgattgtatctcgcgcaacgcgcagcatggccgcaatccagaagaatcgaagcgcgattaccaccagagtgaccagcagaataatgccgatcagcaaggtattgctgatatacgggtcagaccagctggccctcatggcgcgcggaagctgcatgcccagaagaatgaacaccgcaccgttgagcgagaaactcagcacgccccatactgaagtggaaacgatattcgtacgtgccacattcggccccacgccggtacggtcgaatcggatgaacaggccagcggccaccaccgacagaatgccggacacattgaattcctccgcgcccaaatacagcaggaagggcaggaacagttccatcagaatacgtgtggtggtggtttcccaaccgagggatcgcacggtctcgaatagccagttggccgctgctgctatcaccaggccaaataaggtgccgccaaagaaggagatcacgaattcgccggcggcctgccccacggcgaattctccagtgaaggcggcggccagagcgaactggaagccgacgatgccggaagcgtcattgaagagtgattcgcctttcagcacgctgcgctgacgctgcgtcagcgaggcttctttacctagggagctgacggccaccgcatcggtcgggccgagtgccgcgccgagtgctaaggctgaggctaaggtgatggacggccagacggcatgcaaagtgaatccgaccgccgccatcgtgacgatagccagtccgatagccagcgataggctcagatccagcgttttcagcaacgccgacttatcgatttcgtgggcttccaaatacagcaatggcgcgataaacagcaccatgaacagttccgggtcgagcgttgcatccgggaaaaacggcagatacgtaaccagcacgcccagcacaatctggaccagcggtgtggaaaccttcggtacgaagcgactggcaaacgagctcaccaccaccgccgcaatgatgcataggatgagctcaaataccgccatgttgccgccttctcgtattttttctccaccaaaagtatatgggaaccatgaagaaaacgttaagattgcggccgattatgcacatcatgagacgatatgagaaaaaggcatacactcgttggtatggaatatgacgaggcgatgcgctgtgcactggaactggccggtcaggccgcagccgctggtgacgtaccggttggtgcggtggtgctggatgcggccggccagattgtcgggcgcggatacaacacgcgtgaggctgatggcgacccgcttgcccacgccgaaatcatcgccatgcgtcaggcggcccaagccttgggcgcttggaatctcgccgattgcacgctggccgtcacacttgagccgtgcccgatgtgcgcgggtgcctgcatccagacccatatcggcaccatcgcgttcggtgcctgggatcccaagctcggtgcatgcggttcgatttgggatattccgcgcgatccgcatatcggccatagtcctgaagtgcacggcggcgtgctggaaggcgagtgtcagtccatcctgactgatttcttcgcccagcggcgatagacacggacgcattacttacctcacgcaaccaacacgcggcaccaaggcaacatattccatttcttctaccatcgaaaccagtagtgcaatgcaaatccacacacgtcgaaggagacaatatggccgagaacacctccactttcaccggcgccgccgctgacggcaccgcactcaccgccgtctacctgacccagcccgccgccaatgtggcgatcggtctggtgtttgccggcagcgacctgccgcacatcgtccactggggccgcccgctggccaagcccgacaccctgctggccgcctatgacgccctgaagccgcagcgcgtgtccggcgcgctcgacgacaccgcctggccgtctatcctgcccacccaggccgaaagctggatcggcgagcagcgcgtggtgctgcgccgcgccggcgtcgagctcttccccaagttcactgtgaccaatatcgaggccggcggcgtgctggaagccaccctcgatgccgtgtccggcgaaagctacaccgatgtggccggccatgcccacgccaccggtccggtccgcgtgcccggcgtcatagtcaccgcgcgcgatgaggagcagggcgtggaagtcgaatggcacctcgaactgctccccggcggcctggtccgtcagaaggccaccgtaaccaacctgttcggtgcagacgccggagccccgctcgagatcggcaagatcgagctcggcttcccgctgcccgaatccgccggcgaaatcctcaccaccaccggtcaccatctacgtgaacgcagtccgcagcgccagccgctgaccgtcggccgtttcgaaaagccgcagctcgccggccgccctgacttcgacgcatccctgctcctgaccgccggcgtgcccggtttcggcttcgagcatggcgacgcctattcggtgcacgtgggctggagcggcaactccgtgctgtccgccgaacgtctgccctacacaaccggcgtgatcggcggcggcgaactcctgttcggcggcgaagtgacgctcgccggccctggcgaaggccagaactcctacgacaccccgtggctgttcggctcctatggcgatggtctcaacgagatcgccgcccgcttccactcctacgtgcgctccctgcacccgcgcctgttctcgcacggccgtccggtgatcctcaacacctgggaagccgtgtacttcgaccacaacttcgatacgctgaaggcgctcgccgacaaggccgccgactccggcgtggaacgattcgtggtggacgacggctggttcggttcccgccgcgacgacacctccggccttggcgactggcagattgcgcaggacgtctggcccgatggcccgaagtccctgaaggcgctcgccgactacgtgcacgccaagggtatggaattcggcttgtggttcgagccggaaatggtcaaccccgattccgacgtggcccgcaaccaccccgattggattctttcgcccaccaccggccgactgccgctgcagggccgcactcagcaggtgctcgatctgaccaatccggatgcgttcgactacatctacggctgcatggaccagcttgtcggcgagcttggtatcgactacatcaagtgggaccacaacaagttcgtcaccgagcccggttcccgccgctccggccgcccggccgtgcacgcgcagaccctcgccgtctacaacatcttcaagggcctcaagaccgcacatccgggccttgagatcgaaagctgctcctccggcggtggccgcgtggacctcggcatcctagagcacgctgaccgtatctgggtctccgactgcgtggacccggtcgagcgcgcggacatccagcgctacacctcgctgctggtgccgccggcgatgatgggcgagcacgtgggtgccagtcccgcgcactccacccagcgtgccaccagccaggaactgcgcatggccatggcgttcttcggccacatgggcatcgaatggaacctgttgaaggagccggacgaggcgctcgccaagctggccgtgtgggtggccgaattcaagaagcaccgcgactggttcgccatcgacacctgcgtgcacgccgactccaacgatccggccgtgcgcttggatggcatggtgatgccgaaccgcgacgccgccatctaccgcttcacccagctgaccaccagtcagacctatccggccgcgcccgtgcacctgcccggacttgaccccgagcgcacctaccgcgtcagcccgctcgacccgagcttggatttgaccggtctggccaacggccagagcactctcggctggtggaacgaggaaggcgtagtcctgaccggcgaagccctgcagcgttacggcatccgtcccccgtccctccacccccagcaggcagtattgctcaaggctgtggcgttaagctgacagcctagtaggctgtcagtagccacggcctgagcgaagcgacagctgagcgaaggtgggattgagccttgccgataggcaagtccgtaatggctggtcgtggcggagtaactgtggcgaagcaacgttcttggcttccctctctgaggggagccaagaacggcctacccaatatgcttcacgattacgcgactggcggcggctttggcccagagctgccagtcgtggtccataatcgtgaacttgaccggctgggtctggctgtgacggtagaaacgaatgccatcgcgcagcgaatcggtgccgagcttggccaaaaacgcggactccccggcaatcatcacatgtccgggcatcgcgatgttcgccaccgtagccaccagcgaacccaaccggaaacacgtccggttcaccaactgcgtggcctgcggcacgcgtcccttggcatcgcgcgcaaagtcctcaaaactgaccgcgcgacccacaatcgcagagtactgttcggcgatcgaatcgtcagtcaagcattgtgaacagccgatatgtccgctggtgcagcgcggcccctccggatcgataagcacgtggcccaccagaccatagctcttatccgggtactgcactggcttgccgttcacggccagcgaataaccaacacccacgccgatggtcaccacggcgaacatatccacgccgacacccggcccgaaccaggaggcatccaccagcagagaatcgatatcattgaacaccccgcacggcaggccggtcgcctctgtgaccatcgtccccaagtccgtggccccgtcccaatgcaggaacggcgcgaacgtcacaatcgaatcgtcgaccacatgcccacctaccgcaacgcccaccgcagtgggggagggcagtccggaagaggcgatatcggcggaacattcgcgcaccagccgcgtgatggccgacaccacatactcagccgactgatccgccccgatcggcacctcgtgccggccggacaccacctcgccatgcgcgttcaccgcagcggccacaatcgacatcccatgaaccttgacaccaatgaaggtgcgtgcgttcgaacacaacaccagcgaagtctgcgggcgtccgcgacgatccgaactttcccttggcgtgaatcgctcgggcagcttgcctgacgggccggcctcggccggaagctcctcgatcaccccggcgtagatcagatcgctggtgatgcgggacaaggccccttggctcagtcccagcatctgtgccaacgtagtgcgggctatcggcccgtattgggcaattgccgccgccacgcgatgcgtatgctcggatccggaaaaccactgtggaatcgcgttgacatcagacatgcaagccccttcgctgtatttattgcgttaatcacaaaataccgcgatttttgttgcttgcgcaagtgggctcgctggcgctgggaatgaaatggccgaaccgttaccttggaaagtggaagaaccgccggcaccgaagccggaggaaaagaaagataaaggagtcaacaattatgctgtccgattccccacatgcaacgcctagactgaagcgtctggccgtgcgcaccgccgccgtgatgtgcgcgatcgccgtcgggttcggcctggcaggctgcggctccagcaccgcaggcaccgtcacgctggatttcttccagttcaagtccgaggccgccgaccagttcaagtccatggtcgccgactttgagaagcagaacccgaccatcaaggtcaacatcaacaactccgccaacgcccagaccgatctgcgcacccgtttcgtcaagaatcgtgtgccggacgtgatcaccttcaacggcgacatcagcttcggcaacttcgccgcctccggtgtgttctacgacttcaccgatgaacccattgtggacaccctcaaccccggcatggtgcagatcgccaagaatctggtgcagaccaccgattcctccaagaagcgcctgtatggcctgcccttcgcgggtaacgcctccggctacatctacaacaaggctctgttccgcaaggttggccttgacccggagaatccgccgaccacctggagcgagttcaccgatatgctcaacaccttcaaggacgccggcatcaacccgctgcagggttccgtggccgacgcctggaccacccaggcaccgctcgcctccctggccggcacgctggttcccgaatcgaagtacaccgagctcaagcaaggcaagaccacgttccaggaactgtggaagaccgcagtcgagaaggaatccgagctcttcacctactccactgcggacaccggcgtcacctaccagcagggcacgcagaacttcgcccaaggcaaggccgcgatcatcccgctcggcacctacgccatcccgcagatcctgctgatcaaccccgatatcgaacttggtttcgcccagatgccggccaccgatgacgccagcgagcagatcctcaccgccggcgacgacgtgatgctcaccatcggtgcgaacaccaagcaccccaaggaagcgatgaagctcgtcgagttcctcatgcagaaggatcagcttgacgcctacgccgacgcccagtccgccatcacgccgctgaaggacacctacttcggcaacgatgcgctggaaaccgtgcgcccgttcttcgaggaaaaccgactggccgacttctgcgaccactacattccttcgtccatcaacatcggcggctacctgcagaccatggtgacctccggcaacaccgaccgcttcctgaaccagatgcagaccgaatgggacaaggtccaagccaggaccttcgagtgatcggtaggagaggagaacatcatgtcacacgcaaccgcaaccaagaccgctgccaagaaaccggccaagaagaaggtctccgccttctccacccgcaaggtggaccccgcctactactggatggtggttccggcggctatcattttcgccttcttcctgtacctgccatttcttgacggcgtaaagtattccttcaccaactcgcagggctacggcgattacaagttcatcggcctgaagaactacatcgccctcttccaagacaaccgcgtgggccacgcctacctgttcacgttcctcatcgccattctcatcacggtgctgattaatgtgatcgccctgttcctgtcggtgctgctgaactcgaagatcgccttcaagaatggcttccgagccatcttcttcatcccctacaccctctccgtgctggtcatcggctacgtgttcaagtacatcttcatgaacccgctgcccgagctcggcaaggcgctgggcatcaagtggctgtccacctcgctgttgaccaatgagcaactcagctggatcccaatcgtcttcctcgccgtctggcagggcatcgcctactcggtactcatctacctcgccggcctgcagaccatcgacgacgaaatctacgaggccgccgccatcgacggcgtcaacgcctggcagaagttctggaagatcacattcccgctgatcggaccgttcttcaccatcaacctcgtgctgtccatgaagaacgcgctcggcaccttcgatcaggtcgtcgccttgaccgagggcggtccgaactcctccaccgaaaccgtcacctacctcatctggaagggtggcctgaccggtggcgagtacgcctaccagaccgcaaacgccgtgctcttcttcatcgtgctggcgatcatcgccttcgtacagctgcgcatctcccgcagccaggaacagatctgatttaggggaggataagaaatgactactgcaacagttaccccgtccaagtccggcaagcccgccaagttccgcagggaccacaagatcaactggtggctgaccgccgccgtggccgtgctgagcctgaccattctgatcccgctctacttcaccatcgtcaccgcgctgaagactccggccgaagccggcaccttcgccctgcccacctcgtggcagtggcacaacttcgccgacgcctccgccaaggtcaactactcgaaggccgcgctcaactccgcgatcatcacggtggccgccgtggtgctcaccttgctgaccaacaccttcgtggcctacgctgtggcccgcaacatggataagcgcttcttccgcttcctgtactacttcttcatcgccgccatgttcgtgccgttcccggtcgtcatgctgccgattgcgaagcagatgggctccctgcacctggacaaccaggtcggcctgatcatcctgtacacggtgctcggcctgggcacgaacctgttcatcgccactggcttcatccgttcgattccggtttcgctggaagaggcggcccgaatcgatggcgcatccacgtggcgcattttctggaccatcatcttcccgctgatgagcccgattaacgccaccatcgccatcctgaccgcactgtgggcctggaacgacttcctcctgccgttgatcatcctgaccgaccagtcgaaccagaccatcccgctcgcccagtacgtcttcagctcgcagttcgccaccaactacccgatggccttctccagctacctgatggccatggccccgatcctcatcgtctacatcttcgcccaaaagtgggtcgtcggtggtgtgatgaggggagcggtcaagtaaaacagcgcaggcgctgctttacttcaccgcgtcgagcgagacgagccgattaaggaaacagccccgtgggctgtttcccggcccgggcggccggataggtcgcgtactcgcgaggtcatgttgggtctggccgtaggccagtcctgaattgcaggactctgtgaagtaaaggtccgcttccacccaagcctcctccggctctcaccggaggaggcttttctgtcctgttgccatactggaaaccgccacaataaaggcgacggtcggttgatgtggcggtggcgcacaaaggtcatgtggttttgctcgttgtgcgaatgaaaaagtgacgaaaccgtacggcttacggtgcaattgagcgcatctgctgtgtcgccgtgccactggcttgtcccggtcc

SEQ ID NO: 2356 - DNA, 4290 bp, Unknown
  R50_10m  MAG No. k141_1403
gactgacctgtcggcatggaacagccttgccaaacttctatacttcatatccatgagagagactcgcttcccaaagagcatccttgattgtagaaagtataagatggagaaggaaatgagtcaataaacaactataaaatcatggatgatgcaaaaatatagttgtgcgcatgactgcgtgtgagtgacatatgtagtgcccgaaatgcgtgtcagtagtgaaatacttcatgatctgttgttctttctgaatatgtgatggtatgcaatgcgttttgccgcggtgcattgcgttgcgactatgccaagaacgcatactcgtataggtacgtttatggggcatggtgcgaacgagtcggctcgatatcaccggcaatgattcagctatgcgtcaatgagaggtgtgctgatcagatggcgtgttcgttcacgccgttgctgcttaatgcgatgtgttgaatcatggttcgcgcactataaggcattgcatccaaatccgtcaaatcacgcggtgtgtgaaatgcccgttgtatataaaaaagtccggtgcaacgcacgatgataatgcgctgcaccggacctactgcagaaacaattgttacagactgtagatctgtgcgccgaacggccagagcgcaagcttggccattttgaacgactggaggccgaacgggatgccgatgatggtgatgcagttgagcacgcctgcacccagatagccgagtgccatccaccagccgaccagcaccacccagaggatattgaccagcgtggagccaacgccgccaccgtattgcacggttttgccgaacggcgtcaaggtaaggcccgccattttgaacgcctgaactcctagtggaataccgataatggtgatgcacagaaacagtccgatcagtgtccagctgatggcgattgccagtccgcccagaatgatccacagaatattgccgatgaccctcatcgtaagttcctcacgtttgccggcattgcgccggataccgaatcgaatgctggattccattctattaggcgaacgcgggcgatatgtggggaatcggtgacgggaaccctgagcatcccctgaatcgtccctgagccgcatgctcaggcgcctactcgggtgagcattctcacattcggctgatttctagcgaaaacccttgtgcgggcgggctgtggactatagcatcacgacacatgaccactacatcgcagccttctcaggcatctcagtccaccgccaccaaacccgccgccaaccgcgagctgcccctgccgcagtccgaccgcgaccccaagagctaccgtggcgtggaccgcgaccagcaggtcgtggacatcatctccaaactcaccagtgagaaggccacgattccggcaagctgcgtgcagcgcgacgccgccgacaccggtctggaatccaacagcgccgacgtggtgatcggcgaagccatgcttaccatgcagaccgagcgtggcaagcaggcgattatcggcgaggccttccgactactgcgcgccggcggcacctactcgattcacgaactcggcctgcagccggacaacctggacgaatccgtcaaggatgaggtgcgcaagcccgaagcgtaacagcggtgtgccggcccaacgatggccggataatgggaaacaagtaaaagcgatgacgcgtatgtgaggtacgcgcgacgaataggagaacatcatggccgatgagaacgagcagcagaccgcatgcaaggcaggacgcgacgagcagcattgcaagtgcaagcagcgtagggaagccgccgcggcagccgaggcggctgccgccaacggcgaacaccactgcgcctgcaagcacgagcacgccgagggcgcggccgcggagccgggcgcgaagaaggagtgccactgcaagcatggcgaagtcgcggccgctgaagcgggtgaggccaagcactgcgcctgcaagcacgacgcccacgacgccgaaggccacgccatttcgaccgagccgcatcttggattcatcgaagacttggcctcgttgatcgatgttcaggaggaggccactgtctcccgtacggtgctgcgcgaggacggcctgcgcgccgtgctgttcggcttcgacaaggaccaggcactgagcgagcacaccgcggccatgcccgtgatcatccaggtgctggaaggcaagctgcgcgtcggcggcgaaggccgtgaagtcgagcttacggccggcggcatcgtctacctgagcgcccgtctgccgcacaccgtctatgccgtcgaacccagcaagatgctgctgcagatgttcgacaaccgcggctgattcggtgaatgactggcaatcacgtatgagaagctgattgccgttagaccattcatgatggcttccttcatatggtgttggtcgtatgaccgtaatatgaaggaagccatttcttagacgttggggagagcttgaattcgacgccatcatcatacggcctcaagggtgcataaacgatgtcacaagtagacgcacgcccgccagccatcccaaacgtcacagcaaacctagaacccgcatgagctgacggccgatattcgccatggctgcatcatcaaccacgccgacttggtatcccagcagtttgcggtcgacggtgacgatcttgtccgtcatcacgtaactcactttgttcaggccgttctccggacttggttccaatcggacccgcgtgtcgatgtcggaggaatcgtatgaggtcagcagacaagtgatgacggaatcgaaccgatcgacggcatcgctctgcacgatgacaaccggccgtggcttgctggcgtagccatcggcctgcaacgtccaaatctcacctcgtttcatcggacatcctcaaggcgagacgactggcatactcagtagcgtcccgctcggacgcaaacggctccacgtcatttcgtggcaaacgcacctcataggggaacccacggtaatcattgaacgcgctgatgaacatacgcagggcatcggccggggtggtacccagctgtcgggtcgtctccttaaacaacgcagcctgctcgtcatcaactcgcgtggcaatctgcatgctcatagccactccttattgctatttactatctttttgcaccaaattgtatcaaatacttgacttcagagtgaagcccccgcgttccaaggcccttgtctatactgtagacagttgttcttcatatgtgaatcgcccgatatgactttggagcgggcttgattggaggggccggatatgacgagttacgtgctgcggctctatgatgatccgctgctccggttcgatgcgtcgtatggcgagggcctgctggcgggcaagatcgaggcgcatgtccgctggttcgatgagtcgaagcgcgcgttgctgccgtttccgttggctccggagccggataatgcgaagctgacgacgtggctggagcggcgcacgattccgaagaatcgtgagttcgccacgcaggttctcgcgcaggcggggttgaacattgcggatacgctgggcatcatcgacctgtgtaaggggctgtcggtcaacgattcgttctgggcggaacgcgacggtgagaacctcaagttcgcggacatcaacctgtatgacaatccgttggacgagacgctcgccatcgtggcctacacggggcatacgtcgagcgagaagcatgcgatcggcctgtcgagcgagtggacgacggacggccagttcccgaaggcgtggcggcatacggaacgtgggctggaactgtggaaggcgggttccgaatggtatgcgaacgccggtttggaaccgtattccgagtatctcgcctcgcagctggcgcgcaggctcggtgtgaatgcggtcgactaccgcatcgcccgttggaagggcaagctcgcgtcggtgtgcggttcgatgaactcaaaggacgtgtcgttcgtgccgttctatgcggcgacgcagctggcgtcgttcccggagatcctcgccgccgcacgcgccgtgtccgaggaatcgttcgaggcgatgcgcacgatgctagtgttcgacgcgctcatcgtcaatcaggaccgtcacgccaacaaccacgggttcctgcgcgacaaccgtaccggccagattctgggtccggcgccgttgttcgaccataacatgtcgctgttcaagaacgacatgcgcgccgactgggagggcggcgcgtggattccgcaggtactgtccgaacgtcagccggcaaattctcgtatgacgttccgcgaccagtgcgcggccatcatgggca

SEQ ID NO: 2357 - DNA, 2721 bp, Unknown
  R50_10m  MAG No. k141_1827
aactcctcgcagaccgtcccgatcgccatcgcctcgctgtccggcgaccgtctgatggatgtgacgaccacggcctccgcctcgctgatcagtatcgtgccgaccttgatcttcttcctcctcttccagaggacgctgtcgaacggcatcaccaccggcgcggtgaagtaaggtcattcgcacaacaggcaattcaatcaacaagcagtacatattgattttggtttcggccgccttgttccctgggggtcgaaaccacctctccaccaaggagcagcaacaatgaagttcaccaacggctactggatgattcgtgacggcgtcgacgccctctacgctcgtgaagcctacgaactggcggcggatgccaccaccgaaagcctcaacgtcctcgccccgacctccgtggtgcgcggccgatacgataccctgaacctgcccacattcaatgtggacatcaccacacctgcggaaggcgtgattcgtgtgcgtgccgaacactggcagggtgccaccgaataccccggattcccgctcaacgccgacaagcccggcagccgggattacgtgactgtcagggctgacggcaatggcgacggcgaagtcggcgtcaatggcgcggacgtcacgctgaccaccggcgggctcacggcgaaggtcgtcaagggcgcgccttggaaccttgccttccttgatggggacggcaaggtgctcaccgagtcagcaggcaagtcgctggcccggttcaatcttggtgccggggcgaacgtcaccgcccagccggtcggcgaattcggtgtgagcatggacggctccgcccatgacgagtccgacgtgttcaccgccatccagctgcatctgtcggtcggcgaagacgtatatggcctgggcgaacgcttcggcgcgtacgtcaagaacggccagagcgtcgacatctggaatgaggacggcggcaccgcttccgaacagggctacaaggacatcccgttctacatgacctccaatgggtatggcgtactggtcaacaaccgcggccacgtctcctttgagatcggttccgagaacaccgaggccgtgcagttctccgtgcccggcgaggccatcgacttctgcgtgatctatggccccacccccaagcagattctcgaccgctacaccaagctcgtcggacgcccggcgaatgtgcccgcatggagctacggtctgtggctgaccacctcgttcaccaccaaatacgacgaggccaccatcaactccttcatcgacggtatggccgagcgtgatattccactggccgccttccactacgactgctactggatgcgcgagttccactggtgcgatttcgagtgggacaagcgtttcttcggcgacatcgaatccacgctgaagcgcctgcacgaggacaagggcctgcacatctgcgcttggatcaacccgtacatcggccaacgcggcgaaatgttcaaggaaggccgagacaagggctatctggtgcgcaagcccaatggcgaagtctggcagaccgacttctggcaggccggcatgggcttggtggacttcaccaacccggccgcctgtgaatggttcaaggacaaggtcaaggtcctactgaatcagggcgtggacgccatcaagaccgatttcggcgagcgcatcccgcgcgacgtcgtctggtatgacggctctccgaagctctccatgcacaactggtacacccagctgtacaaccaggccgtgttcgaagccatcgaagaaacctacggcaagggcaacgcctgtctgtatgcgcgctccgccaccgtcggcggccagcagcagcccgtgcattggggcggtgactgcgagtccaccttcaacggcatggcccagtccttgcgtgccggcctgtcgctgacctcctccggcttcggcttctggagccacgacatcggtggcttcgaaggtgcgttcccggatccggccgtctacaagcgttgggtggcgttcggcatgctcggctcccactcgcgactgcacggttccaccgtgtaccgtgtgccgtggctgttcgacgaggaagacgagaagaacggcgtcgcattggtgcccggccagaccgccgtggatgtggtgcgcgagttcaccaagctcaagcttgaactcatgccgtatgtctaccagcttggcctgcagcctcatgcgaacggtactccggtcatgcgttccatgttcgtggaattccccgatgacccggcatgccgcacgctggaccgccagtacatgttcggtccgtccatgctggtcgcccccgtgttcacctactccggtgaggtttcctactatctgccggacggcgtgtggaccaactggctgaccggcgagaaggcgcagggtggttggcgcaaggaaacccacggctacgattcgattccgctgtgggcgcgcgatggcagcgtcatcgtcaccaaccccggcgaaaccaagccagaccgcgtgtacggtgagaacgcgctggtctccgtgttcgtggatgatgtggagaccgccgaagccgttattacggaaatcgacggttccgccgtaaccttcaccgcgcgccgtacgccggctggcatcgaggtcgcgagctccgatggccgtccgttccgtgcacgtttgggcgcgtctggcgatatcgtcgacgttccggatggcagcgtgatgctgtgacgcgtgctgtgcgtgacgtgcgtggtgcat

SEQ ID NO: 2358 - DNA, 10911 bp, Unknown
  R50_10m  MAG No. k141_1900
gacgattccgccgcgtagtgaatctcccaccgtgtggtgaattaatcggcgagccggcgcggatgggtggcggagacctcccatcccaaggccatcagggtcttgcggtcggccttatccagcgccttgcaatccagtgccgcgataaggtctggccggatctcggcggtgcgggccagcgcttcgtcgcggcgaaaacggtccaccttgccgtggtcgccggacaacagcacgtccggcaccgcaataccacgccacacggccggcttggtgtactggcgatgttcaagcagtgcgtcctcgccggtgtaggattcctcgacaatcgaatctgggttgcccatgaatccgggcatcaggcgggtgatggcctcaagcatcaccgacaccgccacttcgccaccgttcagcacatagtcgccgatcgaatattcgcgtacgtcgacgccctgggagcggtagtagtccgggatgcgcgcatcgtagccctcataccggccgcagccgaacagcagatggtcggcatggctgagctcggtggcgtcgcgttgggtaaacaacggggccgatgggttcgggaagatgagcaccggtgtgccggatagggcggaggattcagacggccgcgagaatcccagcagttcgtccaggcattcgctccacacctcgggcttcatcaccatgccggccccgccgccgactggcgtatcatccaccgaatgatgcacatcgtgggtccagtcgcgcaggttgtgcgctttgatctccaacaatcccttggcctgggctttgcccatcaggctgaggttcatcacctcaaagtattcggggaacacgctcacgatatcgatcttcatgttatccagcctaacggtagccccgcccgcattacacggccaccactacactattgcggtgatgaatacgacgatgaacctccccacccgcaaaaagcccgaagtgttgtccccggccggcaacctgaggggcctgaaaaccgcggtcgattatggtgccgacgccgtctactgcggcggcaaagccttcggcatgcgatcggcccccaaaaacctaagccttgaggactttgaggaaggctcgcgctacgcccatgaacgcggcgcccgcgtgtacgtgacctgcaacgtgctgccgcgcaacaacgagatcgaagccatgcgcgagtacgtcggccagctcaaggacaccggcgtggacgcgctgatcgtctctgacatcggcgtgatgatgatggcccgccaagtggctccgaatctggaactgcacgtatccacccaggccggcgtcaccaattaccaagctgcgaacgccttctatgagcttggcgctcgccgtgtggtgttggcccgcgagatggacttgcaggccgtgcgtgatattcgcgccaacattcccggtgacctcgacatcgaatgcttcgtgcatggcgcgatgtgcatggcgttctccggccgttgcctgttctccaactatctgaccgggcgtgatggcaatcatggcgaatgcgcgcagccatgccgctggaagtattcgatcgtggaagagaagcgccccggccagtacttcccgatcgagcagaccgagaacggcgcctatctgttcaattcgcaggacatgaatatgctggggcacttggatgatttgattgactccggtgccaccagcctcaaaatcgaaggccgcgcgaaaagcgcctactatatcgccgccatgaccaacgcctacaaaaccgcggttaatgaatacatgattcaacgcggttttgaagacgctgatggcaatgttctgaagcctttccgtgaccgtgtgattcgcccgggcgaccccgattttggccaaggaaccgaagatcaagtgatgcgcaatgccgatgccgcgttcgccggtgtggccgatgagggatatgaccgtggctctgatactgcggttgccgattcggtcaccggctcggttgccgcagaacgtgaccgcgtgacggttgctgatgccgccgactcaactgcctctggtacgtcggccggcaccgccgtcgaacccgacggcatgagctctcacgcccgttccacgcgccgcaagtccaacaccgcggtcgaacagatcgagaccgattggaagcatgcggccgttcgcccggccccgcacgtcgaactgcccgaatggctgctcgaggaaaccgacaaggtggcccaccgcgactactccaccggcttctattacccggagcacaaggtcacacagaacaccgaccgctccgcctacttccgctcatggctggtagtgggcgaagtgctgagctggagcgcggacgaaggcggacgtgtcacgctgatgagccgtaacaagatcgagcccggtcaacaggttgaattcctgctgcctggcgagagaccattggtctttaccgtgccggaaaccggcctgcgcgatgccgatggcgcgccagtacccgccatcaataatccggcgcacgtgttctcgatgccctgcccgcaccaggtgcccatcaacgccgccatccgctcgcgcaccaaaaagcccaccctcaaagccgaataacctaccgctccgcccccgctgactgggggtggtcatgggaatcatgaacaccgcccgcacccaagaaagaatgccttatgcctgaatacagcgaagaaatcctcgattccaacagcatcagctctaccgataaagccggtcgccctattccggtgaccatccccatcgcactggcccccggcatcaaggtggtgtacaccacgcgactgggcggcctgagcgccggcgattacggcaacctgaacctcggcggcaagtccggcgacgaacctgaggccgtactgtcgaaccgcatcgcactcgccgaagcggtgcaagcccgcctatcgctggtctcccaagtacattccggcgtggctgtggacgtggacgactcgttcgtcatcaacacccccttcggcttcgacgtgtccggcacacatggtgagactgacactccgcacgtcatcgaggcggacggccaggtcaccgcacaatccggcatcgccctaggcatgttcgcggccgactgcctgccggtgctgctgggcgacccggtcaccggcatcatcggtgcggcccactgcggccgtcgtggtctggagcgtggtgtgatcggcgccacggtagacctgatgaagagcaagggtgccgatccggcgaacatcgtggccacactcggcccgcgcatctgcggcgactgctatgaagtgggcgacgagatcgccgaccagttcatcaagcgcttcccgctgaccaagacgaagacccgcttcggtggtgccggcatcgacatcgccgaagccgcgatgatcgacctcgccttcgccggcgtacatcaggtggtcgattctatgccgcgcgtgcacgccgccacccagtaccttgaggaagacccggaactcgccgaactgtgccgcacggacggcgaaggcccggccgagctcgcggagcgcatcgacaacatcagccacagcatgtgcacgctcgaaaacccactgtggtactcgcaccgccgcgccgcgctcgccaacaaaacacacgaaggccgcctccttgccctcatcgtgcgtgactaaacggagaatgcgggcacattccgtggagaagatgtgatgcagttcacggacggccagccctcaccctacggtggtgcctatgactgagagagatttcgatacccccgtcgagacgcctaccgtccagccggcccccgctcagggcgccaaaccggcacaaaccgtgccggtggtggccgtggtgctggccgccggcttcggtacgcgcttcgaccccgacaatcccaagcagcttgtctccgtgggcggcaagcccatcgtgtgctggagcattgatgcctttgaacattgcgatcgcgtcagcgacatcgtggtggtggtcaatcccaaggtgcgcggtgaagtggaaacgttggttggcgagatgggctacaccaaggtccgcgtcatcattgacggcggtgacgaacgtgtggacagtaccgccgccgcgctcgacatgctggctacggctggcattccggacgatgccaagattctgatccatgacgccgtccgtccgttcgtggaacagtccgccatcgacggttcgattgatgcgctcgaccagttcacggccgcgaccgtggcctacgcctcaaccgacaccgtgctgttgaccgaggatctgggcgatttgaaagtggtcaagtcggtgccggaccgcccgaacaccttccgcgcgcagaccccgcaatccttccgcttcgcgacgattcgtcacgcttacgatctggctgccgccgacccggacttccatcccaccgacgacacgcgcgttgtggtcgattatctgcctgatgaacccgtcgccattgtctccggtgcggaaaccaacctgaagatcaccacgctggaggatattcccacagctgagcgtatcgccgaggagattctcggtcgtgatcccaaggaagaggcccgcgcccgcatgcacgccctgctggcccaagcggccggccagatgcatcgctagactggcattatgcgtgaactcaatgttgtgatctccggcttcgaccactatgacggcgtggaggtcaatcccgccgtcgaagtgcccaaggccatcgccgagcaggggttgggcgtctcctctgctccggacgatccgttggagcaggtcgccgtcaccgtccatgccgtcagcatcccggtgagcttcgccaaagcctggcccacgctgaaagagacgattgaggccaccaagcccaatatcgtcatcgccaccgggctcaagcacgcagcccgaggcgtgatgcttgaacgatgcgccaccaacctgatggacgcgatcaagccggacgcggacaacgtgaccccacgccgcgaacccatcgaccccaatggcccggccgcctattggacccgcctgccgttgcgctcgatcctgaatgatttcacggacgattcgattccggccaccctgagctcggacgcaggcacgttcgtatgtaattcgctgttctacaacttgctgaactggaccgccacccaggagcgggtgctgggcggattcgtcagcttcccgccggtcgtgccggcggattccagccagcatggtctgccgctcgaccagcagatcgccgctggccgtgatgtggtgcgcgaagccgtgcgctactatctcaagccctccagctccggcatcctcatcgcctagcacgctgtgcgccacgccggaatagaacatggttcgcacgcattgtaacgattgcgcgtcactcaacgcccagcgctagtgcgatgcgctacagtgcttcaaggatgtgccaagagctttatgcgtgtgcgaaaggaataaacagcgatggtggatcgtttcccggtggtgctgcgaggatatgacaaggagaaggttgatgctgccttcgacgctactcaggagagtatgaagcgtgcgcagcagacgttggccagcatgcgtgagcagattgcggcggatgacgaccgtattctgcaactgcaggcccaacttcaggaagagaagaacaagaagccggaaggcaacagcttcgcttccctgggagcgaacgcccagcagatgctcgcctccgccgaacagacgagtaccgaactgctggaacgcgccaagcaggacgcgtcctccatccgtaccacggctcaggctcaggccgaaacgctgatcaacaacgccaagctggatgcccagcatattgttgacgacgccaatgccaaggccgcctcgattctgacgaacgccaacaatcaggccgaatcagtgaccacctccgccaacgaggacgccgcacaactgcgctccgaaaccgccaagaccatcaccgaacagcgtcagaccgtcgagcttgagctcagcaacgcgcgcgaagagcacaccaagaagatggcttccgaacgctccacccaagagcgcgaaatcgccgatatgaaggcggaagctacccagcaggtcgccgcaatgcgcaaaagcgccaatgaggagatcaccaagcttaagtccgattccaacgatcagattgaggcggcgctcgccgaggccaacaagaagctcgccgacgtgcgcgagcaagtgtccaagatgatgaccgaagcccagcgcaaggccagcgaaatcattgatgcggccaagaccaagggtcaggaaatcactgatgaggccgaggtcaagcgcaccagcacgatgagccaggtcaacgccgaagtcgagcagatccgtcacgacatcgccgctcagcaggatgaggccacgaagaaggtcaacgaactcctgcagcacctcgaagagcgtcgtgtggcggccaagcgggaagccgatgagttggtcggccaggccaagaacactcgcgaccaagccgattcatatgccgcgtccaagcgcgaggaggcggacatccaggccgccgcaatcgtgcataaggcgggcgaggaagccgatgcgcagatcgaggagcgtcgtgccgccgcccaaagcgagcttgacggtctgtccaagcgcatcgccgatctgcaggaacgcgagtccgtcatcacccagcgtgtttcggaactgcgttctatgttctcgcaggcgttctccggattcgctttcggtggtaatgcggcggcctctggtcagagtcaggaagccgctgccgtggcgtcattgccggtggtcgcgcccgtcccggaagtcaagcctgtacacaacgaggccgatgatcagccgggtgagttgagcggaaacgagtcggctgccgacgatcacaatgagacagatgcggcaccggctgattcggctggttcagctgcgcagaatgagcagtccgaatcgtctgagccgtccgagcaccagacacagggcgaaccggaggccccgactcaggagaatccagccgtatctgagcagaacggcgaatgacaggccttcgattagactactagcggtaagaattacggcacctgcgctttcgagccaggtgccgtattcgtttggatctgcgccacaagcgcaccatcacagaaggagtatgacatgagtgaattgacgcctctgaccggcgaagcattgaataccctgcgcggcgatttcgcacagagcggcaccaaccgtctggccatgaacgcggtgaccgccgccggcatcgacaaggtggctcgcaattatgaccgcgctcgtctgatgcagcgccgtttctccaccatcgttgacaatggcgaagccacccatcaggatcgctccggccgctgctggctgttcagctccctgaacgtggcccgtttcgtggccaagaagaacatgaacttgaaggagttcgagttctcccagaactacgcgatgtactacgacaagctggagcgcgtcaactacttccttaaggatgtggccgctctggtggctgccggagagccttccgactcccgcctgatgcagcacctgctcgccgacgtgatgggcgatggcggccagtggaccatggccatgaacgtgtacaagaagtacggcgctgtgcccaaggacctgttcccggagaccgaatcctccaagaacaccggtgaaatgaacacccagctgcgccacatgctgcacaccgccgtggcgcacatgtacgccgctgacggcgatgcctccaaggtcgaggcgattattgccgacgccactgctgccggccaccgtattctgaccatccacctgggcgagccgccggtctccttcgactgggaatggaccgacaaggatggcgaattccaccgcgacggcgagattacgccggttgagttctggaagaagtacgtgggtccggctggtcttgaggactacgtgtgcctggtggatgatccgcgcaccgagcacgccaagggcaagaagatcggcatcgagcacctcggcaatgtggctggcggcgacgccaccgagtacctcaacgtgccaaaccagttcatgaaggactgtgtcaagcagattctcgttgagcagggcatcccggtatggttcggtgccgactgccacccgttcatggaccgtgagaacggcgcttgggccaccgacctgttcgagtacggccgcgtgtacgacgtggacttcgatttggacaaggaagcccgcgtgcgcttcggtgactccgccatgaaccacgccatggctttcgccggcgttgacgtggccgacgacggcaccacccgccgctggcgagtggagaactcttggggcaccaagatcgccgacaagggctacttcaccatgtccgacgactggttcaccgaatacgtctacgaggtagccgtcccgaaggccctgttgccggaggaataccagaaggctctcgaagagccagccaccatgctccccgcatgggacccgatgggcgccttggcctgacttcgccagcctcccggaatcggcctgacggccgatgctgtgttttttcgcagcctgccggctgctagggtctctccctctgtcagcgcgaagccgctgacggggggagaggccgcggtcgcaggccgcacaacaacacagcatcgccgcaggcgagtccacgcaggcgagtccacgcaggcgagttcacccaaagtccataaccgccggcccaacaagcagtccccgtaacagactgctatagttgggcttttgcgtctatagcgccataccgacggtacgtatacaaggaaaggagtcgagcaatggcagcactacgtggtccggatagttccgaggatgaacgtcgtttgggggagcaggccgtctttcccgagaccgtcgatgtcaacattcgtcagcttgaccccattcccgcgccgcgtgccttcctcagggagcagccgctcaccgatgagatgagcgagctcgtgctccactcgcggcaggaaatccgcgatgtgctcaacggccgcgacgaccgactgctcgtcatcgtgggcccctgctcaatccacgacccgaaggccgcgcacgagtacgcagaaaagctggctgccgtcaagcgtgagcttgaagaccgtctcgtgatcgtgatgcgcgtgtacttcgagaagccacgcaccaccatcggctggaaaggcctcatcaacgaccccgatctggacggtcgcttcaatattcgtaagggcatgtggctggcccgcaaggtgctcaccgacgtgctgagcctcggcctgcccgccgccaccgaatggcttgaccccatcaccccgcagtacatctgcgacgcgatcagctggggtgccatcggcgcgcgtaacaccgaatcccaagtccaccgcgaactggccagtggcctgtccatgccggtgggcttcaagaactccaccgacggctccatcaaggccgccgccgattcctgcttcgcggccggcttcgagcatcacttcctgtccattaacttggacggtcgcgtgatttccgccgaaaccaaaggcaacccggattgccatctggttctgcgcggttccagccacggcccgaactacgatgccgaatccgtgcgtcaagctctggaagacctcaaggtttccaaagcgtccggcccgagccagcatggcctcgtcatcgatgccgcccacggcaactgcggcaaagacgaaaaccgcgaagccgaagtcatcgaagagatcgctgagcgtctggcgcacggcgaacaaggcatcaccggcgtaatgatggaaagcttcttggtcggcggtcaccaaaagccggccccgctcgaccagttggtctacggtcagtccgtcaccgactcttgcgtgccgtgggaacgcaccaacgagctgctgcacaccctagccgacgccgtcaccgctcgcagctcggctaaatagctttgtctttgtaaaaatgctcactgagacccactcagtgagcattttttgccaataacggtggtcatgtcagtttgttcccgtgacaccttatccttgggaaagatactgatccaaggagagatgttatgcagcagcaggaggaagcagcacattcgctgcatccgttgcaagtcggtccgcagccgttgaacaccccggaagagcttcgcgccattcgtcaggcgatgggggaggggaagaacccgctcgttgccactgatgtgccgcgctgggaagatcaggtgggtgtcagtcgcatcatcaaccgccgcgtattggagctggagccgctgcccacgcccgcgcaagtgctcgctgaactcccgctgaccgatcaggctcaggaaatcgtcgcctactcgcgtgatgagattcgcgcgtgcctgtacggccaagacgacaggttgttggtcatcgtcggcccctgttcggttcatgacccgaaggccgcgctggactacgcgcaccgattggccaagctgaaggacgagctcggtgagcagctgctcatcgtcatgcgcgtgtacttcgagaagccgcgcaccaccatcggctggaagggcctgatcaacgacccggatattgatggcagccacaatattcgcaaaggcctgttgcttgctcgcaaaaccttgcttggtgtgctgaaggaaggattggcggccgccacggaatttctggagcccaccagcccgcagttcatctcggacgcggtgagttggggcgccattggtgcgcgcaacacggaaagccagatccaccgccaattggccagcgggctttccatgccggtcggcttcaagaacgccactgacggctcggtgaaggcagcggtcaacggttgcttcgccgccgcccagcagcacacgttcttcggcattgaccatctggggcgtgcctgcgcagtcgagacccttggcaacccggactgccatgtggtgttgcgcggctcgattcacggcccgaactacgatgccga

SEQ ID NO: 2359 - DNA, 5311 bp, Unknown
  R50_10m  MAG No. k141_1925
ccgatggaggcttcggacaggatgttgaccatgccgatcttgccgacgtggtccacgtgggtaccaccacacagctcgcggctccagccgtcttcgccgatggagaccacgcgtacgatgtcgccgtacttctcgccgaacaggtgcatggcaccgagggcgatggcgtcgtcgaacttcatttccttggtggtcacggcgaggttgtcgcgcagcttgtcgttgacgcgctcctcgactgcggagatcacggacttggccggggccttggaccactggaagtcgaagcgcagacggttcggggcgtcctcggagccgcgctgggtggcctgcgggccgagctcctcacgcagcgccttgtgcaccatgtgcgtggcggtgtgcgagcgggcgatggcgccacggcgggccaggtcgatgttggcgttgacttcggcgccgacgaccagcgtgccttcggtcagacggcactggtggacgatgaggtccttgatgggcttctgcacgtcgtcgacttcgagcactgcaccgtcgtcggacaggatctcgccctgatcggcaagctggccgccggcctccgcatagaacggggtacggtcgagaatgacttcgacgttggccgggccggtgacggcgggcacggagcccttgccttcctgcatgatgccgatgaccttggcacgggcggacatgtccgtgtagccgaggaagtcgatcggcttggcgagcgtcttcttgaagtcgtcatagaccgacaggtccacgttgtgacgcttcttgagggcgtcggcgcgggcgcgggacttctgctcggccataagctcgcggaacttggcctcgtccaccttcacgccctgatcggcggccatttcgagggtcagctcaatcgggaagccgtaagtgtcgtgcagagtgaacgcatcagagccggagaccaccgggtcggcggtcttcttggccttcttgacagccacgtcgagaatctcgatgccgttctccagcgtacgacggaacgcatcttcctcgccgtaggccgcttcggagacatcgtggaaggtgtcgttaagctccgggtagctggcgaccatggcctccttggagacaggcagcagctcgggaatcaccggatcggtcacaccgagtacacgcatggcctgcacggtgcgacgcagcaggcgacgcagcacgtagccgcggccgacgttggacgggcgcacgccatcggacataatcatcagcgcggaacgcacgtgatcggccacgacacggaacttgacatccgcggcctcgtcctcgccgtacttgcggccggacaagcgctcggcagcctcgatgaccgggaagacctcatcggtctcgtagatgttctgcttgccctgcatcaggtaggccaagcgttccagaccggcaccggtatcgatgttcttctgggcaagctcgccgacgatgtgcaggtcggtcttggacttgacgttgtcgacctcgtagttctcgaacacgaggtcccagatctcgatgaagcgcgtctcatcggccgcgggaccgccatcacgaccgtattcggggccgcggtccacgtagatctcggagcaggggccaccagggccagggccaccggtggtccagaagttgtcttccatgccgaaaatctgcatgtgctcgggatcgaagccctcgttcttccagatggaacgggcctcttcatcgtcggtaaaggtggtgacccacagcttttccgggtcaaagccgtaaccgccctcgctctgcggggtggtcagcagctcccaggcgtagtggatggcctcttccttgaagtagtcgccgatggagaagttgccaagcatctggaagaaggtgccatggcgggtggtcttgccgacctcatcgatatccagcgtacgcacgcacttctggttcgatgtcatgcggcgcttcggcggggtctgctcaccaagaaggtagggaatgaacggcaccatgccggcgatggtgaacagcgtggtggggttcggggaaatcagggatgccgaaggcatgacgagatgatcatgtttggcaaagtaatcgaggtatcgctttgcgatgtccgcagtgcgcatgagcggatgaactccttgtttgggtaatgggcgcagttgcgcctggtattggtggaaaaagactggattatgaggactagtttgttctagctggttcagtgactagatggcaaggcggcatgcgcgtgtcagttggcgcgctcgatgtactgacggttgagctcagcctcgcgggctcgacgggcggcattgaactcgttgaccaacccttcgagtgttttcatcggcacattgtcctgatcggggccaagcaggaactggcgtgccgcatcaggtgtattggccttgacataggcctgtgccttggtgacggcaacgattccgatggccacgccgacgccgacccagaagatgcgtttgaacatcactcccccttctcggcggtgtcgttgacggtggttttcgcggcgttcttcgcaaggaaggactgacccgtggttttcagcgcgtagaaggtggaagcgatcttgatgatgggcttaccgaggaaagagccatacagatcagtcaacgcaccaacgttgttggcggtggtggaagccgcggcggaaatcttgttcacgtcttcaagcgacttgttgacctgcttgacggtggtcacgccttcgtccagcgcggggatggcgtgttcaccggactcccggaccgtctgcgatatctgatcaaacatcttgcccagcctgatcagcggatagatcatgaaaccggccaatactgcgaatgcgatggccgcgatcaggccagcgatctctccgacttccattgttgcctccttgaggtcacacttactcggataagggtagcactcctcccctatttacccgtgcaactgacgatgaaatacgctatttgccgtatgagacgatggtcacggcctgcgaaaacggtttggtcgtgtcgaagtcgagtacggttaccgagccgttggccggtcgttcgctaaggtcaagatcggggcctccgaaacggtggccgaggctgagcagcgtgttaccgtgcgaaatctgaagcacatcatcgccatccttgagattggggttgctggcgatgagctggaatgctccttcgacgcgcgtccagtattcttcatcggattccgcgtcatggaaggggtcggcctctttcaggaaatcacgggaggcggccagaccaaatttggctacgatgtcgttgtagtccttcgcgccgtgaggtccacccgcagcggtccaagccagcgacatgtcctgaccctcgaagtatccgtagcattgttcgcggaaatgcatatcggccgtgagttctggccgtgcatgtccggcagcctcattgatatcgagaattcgcttcgctgtgatttcggcgcgagaagtatcggaacaatatgccgccgcaaaatcatagccctcaagtttgtgcccggccctgtcggcatcggcaagtccggatgcggtgagcggcgcattgcaccatccctgaagacggttgtatttattgaacgtggtttgcccatgacgaaccagatgcaaatgcagaatcatggttcccatgctaccgcagtccgctaaaacgcacgcccatcgccccctccatggcacgcgaaccgcaggagaccgtcgacgaaaccgacaacaggcccatgcgagtgctcggctagctcacccccgccgaggcattcgccgacgaaccgccagaatcagccgagaacaaggatgttgcacttacaaatagacaatggggccccagctgacatgactgatttgaggtatgatatacgtatgtcacaccactgttataaggagtaatgatggctatcaaggagaagaccacgatcagtctggatgcgcagaccaagcgtgacggcatcgccatacttgacgccatggggttgaacctgagcacgtttgccgaaatgtctctcagacaattggtacgcgacgggcgtctgccattcacgccaagcgtccgcccttcattcgaaaaagacaacgagggatatcccctgttcaaagcgaacatggatgatccccgcatcgtgacgccccagatacgtgatggtgccgtgatcctgccggagggttgggacgatgatgaagactgatccgcgccagttcgagatatggtgggtgccgttcgcttttcccgacaagccaggcaaagcgaagaaccgtcccagcgtgatcctccaatgggacgacggcacccgcatcgccttggtgaccaaggtcaccggcaacacctggcgcgacgaaccgggctatgtggtgctgcgtgactggcaggacgcgggactgagcaagcccagcgccgtgcgatgctcgcaactgctgcggctgccaagcaatcttttcctcgacgacggcccgacaggaagactttcggcatatgatgccggccgcgtcgcctgggcgatcaacgaactctatccgggcctactagcctgagagcaaccgataccgtcaccatccctgtcgaggtgcttgccgcagcacgggtcaccgacgtcactcttgtcaagtttggcgtgatgggctgttgtcgcgggcgaatcgttccccgctaaccgctaatgcagcccgaaccagccgctgcctcctgcctcccgataaaaatgaattcgtcaaattctttcgggcagcgaatgcagatacatgtatagagcatctgtactattttcaagaatgctcattgtctgcggcaacggttcggcatacacagttttataatccacctcatcgtactctttccgaatggggaaagccaaacgttcatcgtcaacagaaaagtctgcttgtacaccctctttattccctcttgcatctacacgaatccatcggtcaatggatctcagataagtggcattcaaggcatggatgcagtacccgctttcaggcgtactgcctaacgtaagcctttgatagcatattccggcaggaatgccatttgctcttaatagggcggccaataaattagattttgcccaacaaataccgacgccctcccttaatgcgtctgaggctgttgccgtgactcttttgtcttggacatcccatgaatgcttgatttcatctctaacaaaatagtaggcggcttttgccagttcgatttcgccttcagtggagtcttttagttccttggcttttctttgcacactcggttcattccaatcgatatagtgcgaaaaggcaaggtagctactgatatcatcttgaatctccaacatataacacctc

SEQ ID NO: 2360 - DNA, 26920 bp, Unknown
  R50_10m  MAG No. k141_1946
cgtcggttgttgatgccatggtgatgcccccgtttcacgagttgacgatacgcttcttacgctgccgtaacctacgttagcgtaacatctatgctggtcaacgatgcggacgccgatgtggacgccgcgcttcttcctcgccgtcgggcgatgcgacgtcgcatctgcgtatgatagggatatggctgatttttcacacatccttgcaacgcgccccgacttcgacgacgaggaccgcgagtggctgcatcatctcgttgccgattggcaggtgatcgccgatctgagctttgccgacctgctgttgctggtacagaacggtgacggcaaatacgtggtggccgaacaatgccgcccatccaccgtgatgacgctacgggcggaagacgtggtgggaaacgtcatgccggatgacatggtcggcgaattggacgccgccatgctctccagcgtggtgttccgctccacggtattgagaaccgtgggcaaggcgaccgtctgcaacgtgtacgcgccggttcggcacaatggcaagaccttgggcttggtcgtgcgtgagaccaatatggccacacgagaatccaacggtcgatatgagtcggaaagcattaacgcgggcaaacagctgtacgagatgattccacgaggccagttcccctacaaggattcggtgatgagccagcgccatatcgctcgcgtggcggacggcttcatcatcctgaccatggacggcgtggttcgatacgcagccccgaacgccatcagctgctttaggcgtctcggcctgctgaccaccatgcctggccattacctcagcgaactcggcacacagctgttgaaggagaacgaccccgttccggaaaccctgccgttggtgctggcgggcaaagccgcggtcgactccgaactcaacgccaaccgttccgccgtctcgatacgctcgctgcccttatatgacaacaacggtcgtatcggagcgattctgctatgccgtgacgtcaccgagctgcgccgtcgtgagcaggagctgcagaccaaggacgctacgatttccgagattcaccatcgtgtcaagaacaacctgcaggccgtctccgcattgctgaggcttcaggctcgtaagaccaagtcggatgaggtcaagaaggaattgcaggaggcgcaacgccgcgtgcagaccattgccatggtgcatgagggattgagccagaccgccgacgaggtcgtcgacttcgacaaggtgattgccaatctgctgcgcatggccgtggacctagccacgatgaaagaccagcacatcgatatcaactacatgggcaagttcggcatgatgcccgctcaggatgccacgccgctgtccctcgtgctgaccgagctcatcaccaattcggtggagcatgggttcgaaggccgcaaggatggccatatcacgatttccgtgggccgctccggcccgaacctcaatgtggtggtcgaggatgacggttccggtctcggctccgaagaacagggaggattggctcgttcttccggttctggtttgggcacgcagatcatcaacacctttgtgaccaatgatttcggtggttccgtgcattgggagccgcgccgcgaaggcggcacccgcgtggtgcttgatatgaagctcagggccgctcaggatgagtgatgcgaagcccaaaaataaggaaaccctcccaagtgggagggtttcctagtatgacgaagcgataatcaaaacatcagatttgcatctgcatggcctgagaacggcgggcgcgcatggcgcggcgcttcagcgcacgacgctcatcttcgctcaagccgccccacacgccgtaatcctgattggtgtccagagcgcacttcaggcatgcatcaatcaccttgcaggtgcggcacacggccttggcctcctcaatctgctgataggctgcaccggtgttgcccaccgggaagaagagttccggatccttgtcacgacatgcggccttggctcgccaatcaaaagcgctgctcattgcttgcctcccttaaaagccccgtggctggtgttgttccttaagtccagtaccaaggtaaccacgaaccgtggtgattttcaagaggtttcgccgagaaaaaaccgaagttttcacgaagcgcactgcaccagacatgccgatgtgccctcgatgagcacggcccggcccgcgttgtcggcatcgatatgactcatcgtatccaataggcgagcggggactccggccataaggtcagacgttcgttccccgcacgggaacacgattctggtattgcaatgctctggtatacgtatcgggcgaatcgtgctgacggcgaataccacgctgacggactcatcggccaacgcatgtgtgaaagacagcgcctgctcgtcggtgcggaatgggtcgaacaactcatcggcgtcgtcgacgaaccacacgatatgcggaggcggtggtgcatccgagctggcatacggcgtgcagcggccgttgcgaagccattgcgatccccatacccggcgatgcggggaactgacacgtaccgccaagccatcagccatgctggcgtgtcgagccaatgttttcagcaacgtggttttgccgcgcccctgcgggccgatgacaccgatattgccaccggtgagggataccgtcgcttctcgcaggttgatgccatcgtcggcaagtccaaatcgaatgcgttgcggtgcgtgattggccacagtccggtcttttacgtgccggggaagtggcgcggtaaacagggacggctgcggcgggctcccgacgaaccgcgatgcgaacgcgatctggcggcataccgcatcgatatcgcgcgccgttgcacagcggaatgccgtcacctgttcggaatcgttgcagaacgccgcaccgggcattgccggactgaggtcggcggcacgaccatcaccaagcagctcgcatgattgcagacggtcccgaacccgtaaacaaatgctgacggacatattcgccttcatatcggcactgacctgacccatcggattctgcgtacaggcgatcagatacatgcccagtgacctgccgagcgaggcaatacgcaccagacgattcacataatccgggagctggtccttcagggcatggaattcgtcaatgaccacgatcaggcgcggtggcggattgaccatatcacggatatcggaagcatggacagcggcggacagctgttcacggcgtgtcagttcggcttccagcgcacgcaacgcgcgtacggcatgcgccagatccagatcgcatacgctgcccacggtatgcggcaaccgttcgagtttgcggaacgcggaaccgcctttgaaatccaaaaacacgaaattcagatgctcaggcccgttcatcgaggcgagcgccagacaccagctttgcagcaacacggatttgccggaaccagtggtgccggccaccagagcatgcggcccctgacggttcagatcgagcctcagcggctcgcttccggtcatgccgatcggcaccgcaaggtcaaggggttcaagccaatggcccacaatggtgcgccatggcaggcgtgcgaagtgcagcagcgattctatcggctgcgacggcgcatgacggaggtctgcggcgcgggcatcggcatcgtccgtgataccgatatcgatcgttgcctgttgcggggcgggggtcttctccgggcccggaggtggggggagcgtcagcagcagggacacgagacaggcgaatatgcctggcgtgatcatggcggcgaacagccattgcccgtgcaacagcagtatgaccatcatcagtgcctgcgcgatcatcgggcacgccgcggcaagcatggtcaggcgggcgcgcaatggcggcgcgcccaaacggtgcttcgcccgggatacggcggatgccgtatgggcggaatgtcgcttcgaatcgttctgctgtgatgtcatgcttccagcgtgggggagcgcatgccgaaagcgcaagccgaatcaaggtatgtggttctagcttgccgagttatccacatgacattttgcccgtgcatgattggctgcgtgggcaacggcggcgatcatgcgccgacgatgaagccgatgggctccgggaaagcgtcggtcagccttccgccagattgcccacggcgccggccttatgcgtgccgtcggcaagctgattgaacagttcggtgttcctggcgtcatcgagcagcaccgaggagccaacgccatcaacgtaataatctgggtcggaccagtacacgctgccggagatgccattcgagccggtggcgcttttgaacgccaacgccatggtgagcaacgtgtaagggttggttttttcatccacggtgagtgcgctcatcgcggcattggacactgccacgactttggacggattggtcagggtcccactgctggaagcctttttgacgatggccgagatgacctgccgctggcgttcgttgcgtccgaagtctcctcgcgcgtcggcgtatcgcatacgagagaaggacaatgcagtggaaccatccgtcgtatggcatcccgccttccagttcagtccggaataggaatcctgaacatcctcgtcatagcacagttcgataccgcccaaggcgttcaccacgttctgcagaccgccgaacttgatctgcgccacatggtcgattttctggccggtaatctgctcgacgttgcttaccaaggctttcttgccggcaatctgcgccaccgcattgattttcatgtactggtcatcgacgttcataagcgaatcgcggggaatggaaatcagcgaactcggcccgcttttaggcttgatcagcaccagaatcgtatcggttctgaagcctgagatattgtccacgccgccgtaatcggtggaaccgtctcgctcgtcggagccaagaatcagccaggtcgaggccggcgtgttgggggtgtcggtcagccagtcgctccggttcagtttgctgtccacccattgccaggcaccgaaaacagaaagaatcaacgccgccaccagtaccgcaatcgcgcataagatgatgcgcaaggcgcgcggccggtgtgccgttaccgttttcgccgttgccgccgccggccggccaagatggctgaacttcgtggacacgtttgctgctggcgatgagggccgggaaaccgacatatccgacggattgcgcacggcgttgcgggatgagccggaagacatccgcgctcgcgacggcggaatgctgcgcggtgcggcggcatccggagccgtgctgcgggtggcacgtccggttttcggagaaaaactgggcggagtccgcctgccgttgtccgtgacgttggcgcttgccgtgacgttggcgcttgccgtggcgttggcgttcggttgaggctcttcgatgtcatttcccgtgacggacggacgggccgatggagcctgacctgactgacgtgaggcgcgggcaggggcgaaggagcgtggcacctgcccggaaggtcgggtgcgtcgatttcccgcaggaatgaagcttggcgggttgatatgcggatccgccccacctgattcctgcgtcataacccctcctgaaactgtcgattgtctgaatgacactttgacacagcatccgccgggtgttcctgcgctatggtgttcctgcgcaggaacggcacaatatcatgtgcaacggcatcagggcatcgtgtccgcgccatagcacacagttccataaaaatgatgtaatgacacgagaaagaatttgacaaaaacgaaattgcatgtgtgtaatttagtccgtatgaaaagctcaataggcaaggagaatcgtatgtggggtgtggtcgacgattcagccgaagagccatggcatgaattgtggggactattccgacctgatggcgatgtatcttggcagcacaaggcgttgtgcgcgcaaaccgatccggaggcgttcttcccggaaaagggaggctcgacccgtgatgccaagcgtgtgtgcgccaaatgcgaagtgcgtgaacaatgcctgaaatgggccatcgaccatgatgagcgattcggtatttggggcggtatgagcgagcgcgaacgccgtcgatataagcgagagcaccgggagcaggcgtagttccacacacacccccttcaagtctggtgcgtacactgggagtttatgagtccgacaggtaatagcgatattcatgaggcgttggccgacgccatgtcttctcgaccgtatacgcataggcaggatgtggataccggcattacggctgtgatcaccgttgaggaggatatgcgtttcctccggtctacattgcgttcggtattgacgcagaatgttcttccgggagtcgtcatcatcgccgacgcgaccgggcgcgccggttcgaggataaccacttcgttcgaggtcattccctcgccatcggggccggtagtggaggtgccgcagtccaagcatgtgaccattcacatcgtttcggccaagggcgcgcgttccttcggcgatgcggtcagccgggcgttggatcgggccgatttggatgacgctccccgcgcattgtggttgctccatgatgattcccgcccctcggatgcctcatgccttgaacgattgcttgaggcgtggcgcaatacgccgggtgccagcgtgctcgggtgcaaacagtgtgattgggaaggatcccacctgcatgatgtcggtatgtatgcaggccgacacgccgtgcattccctggtggtcgatggagaacccgatcaggagcagtatgacgggcgacaggatgtgttcgcggtgtcgctggcgggcgcgctggtgtccatgtcgcaattcacgcgactgcggggcatcaatgcctggctgaccacctacagcgaatcggtcgatttctgccgccgtgtctgcctgagcggcggacgcgtggtggtagtcccgcaagcggagatatcacatcgtcgcgcacggtatgagggcattcgtacgcgaggcggggagccgcttaaggaagatcacacggtcaatcatgcgatgacggtgcatcgctcccaacagcgctatctgtacactgacctggccatgtcgtcctggattatcgtctggctgtggaggctgattcgcagttttggcatggccatagccatgatgttcggcaagaagccgtatgaagcatgggtgcaattgtgcctgccatggttggctttggccgatatcgcgggaaacatgaaatcgcgcaggctggtggccagacagtcgaaggtcgccgcatcgtccctgcaggttttgttcgccgacagtcggcagatcaagcagttccatgatcgtcgggatgcattccaatcccagcagggcagagtgctgctcagtccgctggaacgtgcccatctgcggacacgcaccatatatcgctggagcgcagccgtggtgatggcgctggtgtgctttgcggccatcgtggtgatgtattggccggtgttccgttcgatattctccggtggatcgttgtattccgatgtgttgctttccaccggtgccagcttcactcaactggtgcagtccgccaccacgccatgggtgtttggcagcggcaccggcattcctgcgccgcccacgccgtggctgctggtgctgatgctggcctcgctggtcacgctcggccatgtgaccgccgctctggcgatgatactgtttgtggccgcgccgctgagcgcattgtcgttctgggcgctggcgggcgtattcacccgctcggacgtggttcgtgtgctgggaggactgttgtgggcatccaccggcattatgttcggctggtatgcgcaggccaatatgccgatgctcaccgtaatggtgttcctgccggccgcgttcgcattcgtgttccgtgccgtgggcatgtaccataccgaagacccgctcaagccgcgcacatccgttcaggccgcggccatcgccgcactgtgcttcatccctgtggtggccgccgaaccgcagctgctgttcgcgctgatcgtcgtgttcctgatgttcctgctgttcgtgcgccgcaagcgcgccatgctgttgcttattccggttcctgccgcctttgcggtggcccctacgctcgtcaatgcggtgcgttacgccgatttgggcatgtggcgtcaactgttcggcgacatcacagtgccaacgtcatccgccaacgggtcgccggcgtcgctgagcctgcttgaggccgcacagcgtgcgctgggatggcaaatgggatcgactgagcatgccgatttggcggtcactgtgctgttcggcgtcatcacgctgctcgctcttgcttcgctggtgctgccgttcgcgttgcggacctcgcggctgatgtgggtggtaatcgtttgcggaggcgcgctcgccctgatttccagccgtgtgaccatagccgtggatgccgatggcgtcgtggccggttccgcacagcctggcatcgcgatgatgatattgggcttccttgcctgcgtgtgcctcgtcgccggtggggcggtgaagcgattccaaccgttgcatgcgtccggcagcgatcccgcaccgaaaagggaccgtctgcatgcgctcatcgtgtctggccgtgtggtgcttgctctgatactggtgtgctgcatcggcatccaatgcatgtatggcatcgaacgtcataaggatgcgggactgggcgtgtccgaaaacggcctgcccatggtcaccaccgattatctggaggccagtgccgatcatcgtgtgcttgccgtgagcgcggagacccgcaacatcgtcaactatgcggtgatgcgcacctcgcgcggcgatctgatcgacagttccccggtccagcgggcgcgcctgttgtccggcaagcatgatgcggttgacgaacaactggcccaggcctgtgcctcgctgctgtccaatcccgacgaagaggccatcgcggccatcagcgcgcttggattcggcggcatctacgtggttcccgagaccggcgattcctcgaacgacatgccgtatgaacagttgagcgcgaatatcgccgcatcgaacggcacccagtccctggtctccacggatagcggcagctactatcgtctgacgctgcgtagcagcacctcacagcaggtggatacctcatggcagcaacgtgcacagcatagtgtctggagacacgtctggctgatatgcctaggtgtgatcacggcgttgtactgcttggtcgccatgcctcgcagacgaccgtcctacggattggaggagcaggcatgagcaacaaaacttctggtttcaaacgtgcgatcggcatcgtgctcggtgtgatcaccatgctggtgttgattgcgctgttcgtcgttctcgtcatggcccccatccccaatatctgggtggacaaggtggccgcttccgataatgccatcgaccagacagttagtccgacccagtccgaaacctactgcccggcacctataggattggccgataccggcacgtacggcgacagcgccttccaggccactgtcggcaatctgagcacacaggcgcgctatgcggcgttcggctccgtctacagcgccactgtctcggcgatcgggcaaaagtccagttcagatgacgtgactttgaaagacgccgatccgaccgacgattcctcggtgaaaaccggtgctcagaagatcgatcagggagctcgcctgatcaatacccgtatgttgcaggccgcagctggcaccggcaccgtcggcaccatcgcatcatgggccgatgacggcgatgtgagaggcgtatcggcggcatcctgcgtatcgacctcgctcagccagtcgttcctgctctccggcggcacgaccggtaccacacagcagctcatcgtctcgaatccctccaccaagccgaccaccgtcgacattgccgtctggggttccgagacagccgggaaaatggcattgtccacacaatccacgctgtctgtgccggccgagggggagtcctcgatggaactgtccgccgcggtcgatgggcagcatggtctgttcgtgaccgtttccagcaaggagactcctatcgcgtccgtggtacgtacggtgaccatggatggtctgacaccgaagggttctgatttcgcgctgccgctgccgaccgcctccaatgcgtcggtggcgccgtccatcactgccggcgatgcggtcaccgcttatctgttcgccaaggcagacaccagcaccgggctgtcatggattaccgacaaaggattggttcccgccaaagatgccaccgtcactgccgataaggtgacggcgatcgacttgggagaggctcctgatggggcgttgggcgtgatgtccaccgcagaggatgccgtgtcgttctccgtcaaggccacacgctccggtgactccggccaagccgatttcgcattggtcaatgccggcgagccatccgaattctcggggttggcccttcccgacggagtaaaggcctccatcacgctggccaatacgtccaatgcgcgcaggacggtcaccttgcacgcctacgatgatgccggtgcttcggtgacctccgaggaaatcacgctggatgcgaacgcggcgcaaacgattgagaccggcaaactttccggcgatcatggcaccgcggtcgtgctgatgttggaggactcatccaagaaagtgagctggggagcgcgtttcagtcacgattcgttgcaagacaaggacatcgccggattgtccgccatcgacgcttcaacgctgatgcccgccacggtccatgtctgggctcggaacgattcctccatcgtcaagtagagcgcgctcgccgaagcatcggtctgatgatgtttcggcgccgatatagctgcgggggccgtgccactgtcttacttgaagtggcacggcccccgcaatactgtcacaggccccaatcggggtcgatttcctcgggcctgcgcccatacaattccgctatgcgggccaccagctcatccctgacggccaactgcaattcgagcttggtaggtgcctcggtctgcaacggcatacggtagagcacgactcgtgcgggaatgccgtggctggcggggaagcactgggacgtcatattcggctcggtctgccaaggcgtcggatccgaaggcggcacatcctccaccgcgaactggagcggacgtatcagttccggccacgcttggccgagcctgcgaacctgggccgccaccatatcgtcgaacatgccggtgcgagtgcggtaacggggcagacgggtgccgaacatcggggttcgtgtgccgcgaccgtggcggttgcggtagattcgtgcgttccaaggtggctgaagcatggttcccaccataggacatggcggaggcaacatgcgttaggattggttcattggctgtgaacattcgtcaacgagggaggcgcgacaaatggtggtacgttcgtggtccgaacttgatttcgataatgtctgctccaacgccaaggtgttcggtttcgatttggacaacacgctggccagctcaaaacagccgatgaggcccgcgatgatcgaacggttctgtgcgctgctcgaccatacggtggtggccctgatctcagggggcggcatggcggtggtcacctcacaggtgctggatgtactcaccccgaatgccaggcgcggcaatctgcatgtcatgcctgcctccggctcccggtattaccggtgggatggcacgcaatgggccttggtgtatgcgcatgatctgtccgaagccaccgtggccgctgtctcggaaagtcttgagcgacatgcccgggaactgggattgtgggaacagcaggtatgggggcctcgaatcgagaacaggggcagccagatcaccttctccgctctgggacagttcgcacccgtagcggccaaacaggcatgggatcgcgataacacgaagaaacaggcgctggtcgaagcggtcaaggccgatctgccgcacatgcgggtcagggccggcggctacaccagtgtggatgtcagcgaatgcggcatcgataaggcctatgccgtgcgcaagctgacgcagacacttggcatacaggccgatgaaatggtgttcgtgggcgatcgcatgacgcctacgggtaatgactatcctgcggttgaggccggtgcgatcggtgttcgtgtggagaatccgcaagacacggtacaactgctggatgcactgcttgcgcgattcgatactccagcttgatggtgacgcgttatggacgggccgagcgtatacaagtggtggcatgcgatgtgggcacaggtctgcaatctgctgtttccacgcggctgcgctgggtgtgacgcgccggatgaggtattgtgtgcgacatgctgggccctgttcgcgcaatgccgggaacgggatgcagacagtggtggcggagcccgtatatggtccgcgtcaatctatcagggagcggcgcgtcgtgccattctcgactggaaggaccacgacgataccgagcttgacggcccgttcggccgcatcatggtgtcgctgctgaacaagacgccaataccatcatcatgcttgggtcatcgcgtattggtggttccagtgccgtcatcgcgggcgtcaatgcgccgaagagggcgtgcccatacggcaccgttggccaaatcggtggcaggggcattgcgtgggtacggcgtcgatgcgcgaccatgcaatgccctgagctcctccaccaaggcacgctccgtgcagcagacctcttcggcacagcgtgcccgccgtatcaccggtcatgtcacggtgaagcgtgatctcataggccatggcgacgcggtgcttctcattgatgacatcgtcaccacaggtgccaccgtgcggcaatgcgttcagacatttcagcaggccggtactaaagtggtgggtgtgctggtattggcggatgccgtggcgcgacggtccgatgacgatatcaacgggtgaatgacatcggtgacgatgccccagatagcaggcgaagcgccgttgctcggcatgtaatcgggatatcgaggattctcggcgtgcaatatggtgatgccggcccgtgaaaccagccgtttgatggcgatttcatcgtccatgacagccgcaaccacatctccggggactggtgccaacgaacgatcgacaatcagcagatcgccgttatgaataccggcattgatcatggaatcgccggccatctgcatgacaaacagcgtggtgtcgtgcggcatggttcgtgacttggattgctgtgtcatgctgtgcctcccaccctgtattcgaacatctgttcgaatacagtatacggtaggacggcggacaatatcagcgttcggcgacgtgatatttaggcaggatgatttcgaaatcggcgcctcgcgtgtcatcgaccactttgacggtgccgccgtgcaattgggccgcccaacgtgcgatggacaggccaaggccggtgccgcccgactcggtgccgggacccgtcttgcctttgacaaagcgccggaagatatccgaacggtcggacggtgcaatctgggagccgaaattcaccacattggtcacgatggtgccttggctgtcatcctcatgggcatcgaccagcacggtggtgccgtcggccgaatgcttcagcgcgttggcgatgatgttggtgaacagctggcgcaggcggtcctgatcgccttccatcgagatgtcggccggcacggtgacatggatgtcgtgggcgtggccgccatcggcgatttccaacggctcgatggtctcgtcaagaaagtcggcgaaattgaacttctcgatattcagactcgccgcaccggcctccatacggctcaaatccaacaggaaggcgatgaggtcggagagacgctgtgtttgggtgaggatgctctccagattggcgggagtgggctcggtgacgccgtcggccatgttctcgaccatcgcctgcaaagcggaaacgggcgtacgcagctcatggctcacattggcgatcatatcgcggcgcattttatcggcatgttcgagttcgccggccatctcgttgaacgagcgagccagctggccgacctcgtcatgacgatcctgatcgatatccacgcggaccgtgtaatcgccatccgccatggcttcggccacatcgcgcatctggcgtaagggagcggtgatgccacgggagaagaaataggtgatgcccaaggccaccaccaaagtcagcggcatggcgatccaaccggaccagccgaatttcaggaggaaccagcacatggcaaacgcgatggcagtggcgataacgatcagtacgctgagttccagcttcagagaggagaacaaatcaaccggcttgacgcgaggtttcatcgcatcaagccgggattgctgttgttttttggatgccatcacgcggtcggcggctcgaaagcgtagcctacgccgtgcacggtgcggatggtatcggcgccgagcttatggcgcagcgccttgacgtggctgtcgacggtgcgggtgccggatgcgtcgacccagtcccagacctcttcgagcagcttttcgcgggtgagcaccgacttcgggcggcgggccagcgtggccagcagatcgaactcggtgggggtcagatgcacctgctcgccgttcacggtgacgatgcgctgggccgggtctatgaccatcgaaccgaagtcgagcagcttctcgttctccgaattcttggcgatgaccttcgcacgctccacgcggcgcagcagcgccttgcagcgggcgatgagctcgcgcatggagaacggtttggtcatgtaatcatcggcgcccgctcccagaccgatgaccttgtcggcctcgtcatcacgtgcggtgaggatcagcaccggcaccggacgttcggcgacgatgcgtttggtggcctcaagaccatccatgaccggcagcatgatgtccatgattaccagatcggggcgtagctgggacgcggcctggacggcggaagcgccgtccccggccacgcgagcggtccatccttcagcggtgatgcgctgggcaatggccgtggcgagcgtgggctcgtcctcgaccaccagcaccgtgcgcggtgtcgtattctgacgcgctgtggtattgagcataaataaaccggttacctttcagcctgttgaccagttcagtcttccggcttcaagaatacaactcccagagctggaacggtgatcttcgccgagaacggacgcgaatgatattcgccctcgaccgcttcgaaggtgccgttgtggatgtcggagccgccgtacttggcgtcatcggtggtgaacacttcggtccacttgccgccggtgggcagcgccacctggtaatcgggccaggcttcaccggagaagttgaccaccacggccaaggtctcgcccttggtgccgatgcgcaggaagctcagcgtgttgtggtcggcatcgtcgctggtcagccactggaagccggccggatcgaagtcctggctccatagtgccggatgcgccttgtagaaggcgttgaggtcggcgaccatggtctggacctgacggtgctcctgccagttcaggcaatcccaatcgatggaggcgtcgtgatcccactcgccccactgggccagctcgttgcccatgaaggagagcttcttgcccgggtgagcccactgataggcgaacatcgaacgcacgccggctagcttctgccagccatcgcccggcatcttgccgtacagggagcccttgccgtacacgacttcgtcgtggctgatgggcaatacgtagtgttcggagtaggcgtacaccatggagaaggtgatttcgttgtggtgccacttgcgattgatgggctcctcgtgcagatactcgagggtgtcgtgcatccatcccatgttccacttcataccgaagccgatgccgccggcggaggtgggggcggtgatgcccggccatgcggtggactcctcggcgatcatcatgacgccggggttgttcttgtacgcggtggcggtggcttccttgaggaagtcgatggcctccaggttttcgcgtccgccgtagatgttcggacgccaatggccgggttcgcggctgtagtcgaggtagagcatggagctgacggcatccacgcgcagcgcatcgacatgcaggtcctcgagccagaacagggcgttggccaccaggaagttgcgtacttcgcggcgtccgaagttgaacacataggtgccccattcggggtgttcgccgcgcagcgggtccgggtcctcgtacagcggggtgccgtcgaagcggccgagtgcgaaggcatccttcgggaagtgggcgggcacccagtccatgatcacgccgatgccggcctgatggaaccgatcgaccaggtaacggaagtcgtcgggggagccgaggcgggaatccaccgcatagtagccggtgacctgatagccccaggagccggagaacgggtgctgtgccagtggcatgaactccacgtgggtgaagccttcctgcttgacatagtccacgagctgcttggccaggtcgcggtaggtcagtccctgcttccagctgccggcgtgcacctcatagatggagaccgggccatcatgcgggttggtggtgcggcggtgctgcatccaggcgtcatcgttccactcgtaggtggattcggtgacgatggaggcggtgtgcggcggaacctcgtgctgacgctccatcgggtcagccttcatctcccacgtgtaattggcgttcaggatctggaacttgtaggtctcgcccgcgccgatgccgggaatgaagatctcccacacgccggaggagccgagctcgcgcatggcatgacgacggccatcccaggcgttgaagttaccgaccacgcgcacggcatgggcgttcggggcccacacggagaacgcggtgcctaccacctgttcgccaggcgtgccgtccacgccgcccatcggatcgtcatagcgcagcacgtgcgcgccaagcgcctcccagagcttctcgtgacggccctcgccgaacagataggtgtccatgtcaccgactgtgggcatataacggtatgggtcgtcctcaatgagcactgcgccgctttcccactcggtcctgacgcggtagtcgggaatcgtgggctgcttcttggtgccggaggccggcacggtagccacgaacacgccgttgtattcgtgggtcatcgggtattcgccatcctgggtgaggatggtcacggacttggcaagcggacgcagcacacggattgtggcggtgtcggcatgcttgccgatgccgagatgcccgccgagaactccgtgggggttgtagaattcagcattgctcaccgcatcgaggtcgccttgggcgacaggcacggtgacggtatcttccttgatcttcgtttctttagccatgacccaaagtctacgtgcgttggagtcgaaaacgctacattggcgcgtcgaaaatggcgaattcttgcccttttcggtgtgtctccgtggttgtgagcgctctcataggggcggtccaggccgcatggcataattattcgagtttttgtgtgtaagccgtcagttctcggagggtacatgtcttacaaagtcggcgatatggtcgtctatccgcgtcatggtgcagcgaaggtggaggccattaccgagcggacggtcaagggagtgacgcgcgaatatctgcagctgtccgtactctcttccgatggtttggtcatcaacgttcccgtggacaatgccaggaaggtcggcgtgcgtgacatcgtctccgcatccgaagtggccaaggtgttcggcatcctgcggaccccgatcatcgagaaagagatgaactggtctcgccgttacaagctgaacgtcgaaaagatcgccaccggtgacgtcaacaagatcgccgaagtggttcgcgatctcgcccagcgcgatgtcgacgagcacggcctgtccgcaggcgagaagcgtatgctcaccaaggcccgcgccattctgacttctgagatcgccttgtccgagaagatcgacgaggcggaagcccagcgtctgctcgacgtgaacctgggctacgagcccgctcaacccggtgacgacaagcatcacaccgccgagcccgaagaggccgcggccgatactttggctcgtgtcgaagccgagaagaagtctaagaagaagtgatttgattgttgaggccccggtcgtgtccttatgcgatacgccggggcttcgtgattcataatcgtttgctgccgttcgtctgggtagcgccatcgaaggggactgcatggggtctgcaggagtgttgatagggcagggttttgacgctcaccgttttgcgcctgccggttcaggccgtgaactgtggattgccgggctctactggccggtgcctgattcatgtagcgaggccgatgccgccaaatacgagggtatcgaaggcgattccgatggcgatgtggccgcgcacgccctgattgacgcgttgcttgccgccgcccgattgggagacattggttcactgttcggtgtcggtgcggacgcgcatggtgccggaaggcatggcatcgatatgctgcaagaagttgtggcgcatctggcatccaacgggtatacgccggcatcggcctcagtggcgatcatcggcaaccgcccgaaaatcggcacacgccgtgctgaagccgaagccgccctgtctgcggcggttggttgcccggtatcggttaccgccaccaccaccgaccatatgggattcactggccgcggcgaaggcatcgccgccatcgccaatgccttggtggagaagatataacaaagcccccgctgtgaatttgccagcgggggcaagaaaaatgaatgagattacttccgcactgtctccacggccttggcgatagcccagaacagggtggaaagcgtcacgataatgaagctcgggggggcggggaacatcgccgacagcacgagtccggcccaaatcgacaccaggcacagcacgctggcgatcaccatcgccttgaatggggagccggccagaatattggcggtggccgcaggcgtgatcaccagcgcgaaaatcagcaaggtacccactgccggcacggcaatggtgattacaccggccataatcgccataaacgccacgttcatcagcccgatcggcacacccttggcctgtgccacctgctcatccaacgagctgaacagcagcgggcggtagatgatggccaacaatgccagcagcaatacgtcgaacacggcgaagccgatgatctggccggtggtgatggtcaggatcgagccgaagaggatcgactgcatctgctgggaggcggaactcgacaatcgcgcgaagaacagacccaagccggtggcgaaggccagtacggtgccggttgcgatttcacgctcggaaacgcgcttgcccaaagcaccgatcaccagtgcgccgcccagtgcgaacacgcccatgcccagtgatacgggcaggccgagcaacaccgcgccggtcgcgcccggcagaccgatatgggccagcgcatgggccgcgaaggtggaacgacgggcgatggtgaagtatcccatgacaccggcggccagggcaatgcacaggccggcgatgaaggcgttggtcatgaatggagcggacagtgtgtccagccattcgggatcatacgaaaagttgatggtgctcatgtccctgtattttctccatgcctgagctgcagcccgttgacgggctgtggatcggctagcttgatgttatcgattctcggcgctgttggcggcactgccattggtggcgttgccgtgctcgtgatggtgcaattgcgccacttcggctgccgtgtgcatatcctgcggctggtcctggggctcatccggcgtcggggtcacgaacatgtcaccctgcggagtggtgaccacctgcacctgtgtgccgtagaggtgggtgagtaggtcggagtcgagcactttgtgcatatcggcgtagtgcgggtgaccgtcgagcaagtagacggcaccggtcagaatcggcaagagcatattgagatcgtgcgcaaccacctggatggtcatgttcagttcacggttcagcttggccagcacgtgtacggtggcgcgttgactggccagatcgaggttggccaacggctcgtcaagcatcagcagttgtggatcgcacaccaacgcctgggcgatggccacacgctggcgcaaaccgccggacagttcggacagacggtactgcgccttgtcggcgatgccggtgaactccatcgccttgagcgctttggctttctgggccttggtgatggggtggatgccgaatcgggtgccggtcaggcccagcaacacggattgttcggcggtgagattggaatcgacattcgccacatagctctgcggcacatatccgatgcgtttgttcatctcgcctgcgggcttgcccagtacggtcaggctgccatggcaaagcggcaaaagtcccagctcggccctcatcatcgtggttttgccggtgccgttggtgccgacgatggccgtgaccgaaccggtgggaatggcaaaggtgccatgctgccagatgatatggtcaccacgcttgatggcggcatcgctgaacacgatgcaatcggaagtttcactcataacgcccgattgtggcaaacgatgctgacaatcgttctcaatatcgtgtacggatggtggcaaccaaagaaaagggttgtgcggccatctcgacaatggtcgcacaacccttctcgtgcaaggcgtctatcggcattgcatgaatccgatgccgttgtcctttgcttctaactatttgccggagtcggtctggtcgttgccggaggcatcgccggaatcgccattggaggcatcggcctttgccgaatcctgagacgagtcactggatgtggccgccttgcactgacggatgtacttgggctccgggctggaaccggtgctggccttggaatcttgcgcattggcatcatccgtggcggcgccgtcggcgctggaatcatcggaattcgcgttgccgtccgtggcgtcttcgcagccatagctcggatccaccgcgtcgatgatggtgttgatgagctggttgatccaggcgttcagcgtgtcggtatccttgggcatttgttcggagacgtcgactaccggcacatcggcacgaccggcagcgccagtgatcatattggtcgcgtcactggcttcctgcgtgttgttgaccagcacatccacgcccttgtcttcgatgagtttctggaaagactgcaggtccgcgggtgccggttcgccgccggaagcggtcgattgcgtataccccttgggcgtctgattcttgaacccgagatcggccatcagataatagaccacgggttcggtggctgcataggtgaggtcggagtgggatctggtgaactcggacgcccatgtttccagcgatttctcatccgcctgccatgccttgagccgcttctggaaggccttcttcttgctggggagtgcctttacatatgcatcggtgatggccgtggccatgctggatcgagcgtctttggagaaccacagatgcgggttatcgccttccatggcacccatgacggaagcggcggatacgatattcgtggtcttggtcatcgatttggtggcccaggaatcgtaacccgcgccgttggccacgatgatctgggccttggacagcttggcgacgtccgaggtctttggctcgaaatcgtgggcatccacattggtggagttcacgatggacgtgacttccacgtcatcgccgcccagctcggcggccagcgagccccattgattgagggaggcgaccacattgatcggcccggtcggtgcgggaacactggtcttgttgtccggctcggtttcagtgggggaggtggctgcgcatgcggcggtcgcgaacaacaggacggcgctcaggccggctgcggcgagtcgcgtaagtcgtgtgatttgagtccccatggcacgccttcttcgtaagagcgaacgatatataatcctgacttgttccaacgatagcctatcgtttcgatagaaagcatcgaaaccacaggggagggcgttgatgtccacaataatcgacggcaaacgaatcgcggccgggatcaagaccgaccttgccgaacgggtgagcaggctcaaggcccggggcatccagccggggcttggcacgttgctggtggggtcggatcccgggtcgatgaagtacgtggccggcaagcacgccgattgccaggaagtgggcattacctcagtcaagaaggaactgccggcggacgccagcttcgacgacatcgccgctgccgtacgcgacctcgacgaagatccggccggcccccggttcaacgtccaggggccgtcgcccaagggcatcaacgagaacgcgatcatcgacatgatcgacccggccaaggatgccgacggcatgcacccgtacaacctcggcgaactggtgctgcatgtgcgcggcgacatttcgacaccgttgccttgcactccgcgcggtgtgctcgagctgctcgacgcctatgacattgatctgaacggcaaggaagtgtgcgtgcttggccgcggcatcaccattggccgcacgattggcctgatgctcacgcgcaacgccgtcaacgccaccgtcaccttgtgccacacaggtacccgggatgtgaccgaccacatgcgccgcgccgacgtgatcgtcgccgcaatgggttcggccggattcgtgacgcccgacaagatcaaggacggcgccgtgctggtcgacgtgggcgtcagccgcgtctacgacgaagaagccggtcgctaccgcatcaagggcgacgtggacaaggcctgctacgacaaggcctccgcctacacccccaaccccggaggcgtgggccccatgacccgagccatgctcctggccaacgtcgtggaaatggccgaacgacacgcctagagtttcctaggaaatttgggcagagttgcttgtattgtgaatatctgtatgcctgtaagggtgtgcgtataactgaatatcgagaaattatccatccactattagaaaccatatatttacatggcagagaacaacactgaagtcgccaaggttgccatcaacgacatcggcaccgaagaggacttcatcaaggcagtcgattccaccatcaagaacttcgatgatggtgatctggttgagggcaccgtcgtcaagatcgatcacgacgaagtcctcctggacatcggctacaagaccgagggcgtcatcccctcccgcgagctttccatcaagaaggacgttgatcctgacgaagtcgtcgaggtcggcgacgccatcgaggcccttgtcgtcaccaaggaagacaaggaaggccgtctgattctgtccaagaagcgtgcccagtacgagcgcgcctggggcgacatcgagaagatcaaggaagctgacggcgtcgttgagggcaccgtcatcgaagccgtcaagggcggcctcatcgtcgacatcggtctgcgtggcttcctgcctgcctccctcgtcgagatgcgtcgcgtccgcgacctctccccgtacatcggccagaagatcaaggccaagatccttgagctcgacaagaaccgcaacaacgtggtcctgtcccgccgccagtacctcgaggagacccagtccgaggtccgcgagaccttcctgtcccagctcaagaagggccagattcgtgagggtgtggtgtcctccatcgtcaacttcggcgctttcgtcgatctgggcggtgttgacggcctgatccacgtttccgagctgtcctggaagcacatcgaccacccgtccgaggtcgtcaaggtcggcgacaaggtcaccgtcgaggtgctcgacgtcgatctcgaccgtgagcgtatctccctgtccctgaaggcgactcaggaggatccgtggcagcgcttcgctcgcacccacgttcccggccagatcgtcaagggcaaggtcaccaagatcgtccagttcggtgtcttcatctccgtcgaggacggcatcgagggcctggtgcacatctccgagctcgccaaccgtcacgtcgagaacccggagaccgtggtcaagccgggcgaggccgtgttcgtcaaggtgatcgacgtcgacctcgatcgtcgccgtatctccctgtccctcaagcaggccaacgactccgtcgacccggcttccgaggacttcgatccggccatctacggcatgccggccgagtacgacgagcagggcaactacaagtaccccgaaggcttcgacccgaacaccaacgagtggatcgccggttacgagaagcagcgcgaggagtgggagtcccagtacgccgccgcccacgagctgtgggaggagcacaaggagttcgtggccaaggagctggagaacgctgccgaatccgcagccgccgacggccagggcccgaaggaagagaagccggtcgaggagacctccaactactcttccgctgctccggctaccggtaccctcgccgactccgatcagctcgccgccctgcgcgaccagctgctcggcaagtgagttcgccatcgggcgactgacgcctgacgtatagtcaaaacccggtctcgcttcggcgggccgggttttgccgttgtgtgcatgaacctcgaaacatggcatgatggggggagcatgattcgaataggattgaccggtggtattgcggcgggcaaaagcacggtgtccacaagactgcgggagctcggcgcggcgcttatcgactatgacgagctcgcgcgccgagtggtggaaccgggcggcgtcggtcttcgtcgtatagcggaatgtttcggccccgacgcgctgaccgatcaggggcggctcaaccggcgatggatcgccgagcacgtgttcgccgggcccgactcggaacggatgcggaggaaactggacgatatcgagcatccgttgatctatgatcttgcgctgtcgcgggagcggcaggcggtcgcggacaatccggatgccgtggtcgtgcatgatgttccgctgttggcggaagtcctggacgccatgcccatgcgattcgaccatatcgtcaccgtcgaagcgcccgaacaagtacgggtcgacagaatggtgtcgacccgcggcatgacgcgagatgatgcgcttgcgcgcattcgccaccagtccagcctggaacaacgccgtgtcatagccgacgcggtgatcgattccacgcagccgatgggtcgaatgctcgaagccgtcgatgcgctgtacgaacagtggctggcggaatcataatgcgatgatgcggtcggcgagggccgcggtctcctcgttgtgcgtcgtgtagatcacgatcgctccgttgtcggcgaaatcacgcaggtgacgcatgaccatggcgcggttgtcggcatcgagggccgctgttggctcgtccgccagtatgacgcgcagcgattgacggatgagaagcctcgcgattgcgactcgttgttgttcgcctccactgagtgtgtagataggtctattgccgtagcccgtcagattcacggcccgcaatgcgcgtctgatgagccgacttctatctgccgatggtattccgacgctgcgcagagccagaatcagatttctgttcaccgtccattgctccaccagggcgtaattctggaacatgaatcccatgacgttgcggtgcatgagccgtcggccctttctggaggcaattgtttgcccatcataggtaattgttcctgaacttggctcttccaaaagacctaggacattcaacaaagtggttttgccgcatccgctttctccggttagggcaaccatgtcaccgggactgaacgtcaggttcagtccttcccataaggtgcggtcgtcgattcgatatgtcagattatgcgtgttcaataaggcgctcatgattgatgttccttacgtggtaagtgattgctgatacaggtttgtggatggcgatcagggatgtttgatactgtcggcgcgcagccgcgaatcgtaaagcactgtggttgccagcgaaacgacgatgaatagtaaggaaaccgaggtcgtggaaacggcgttgtaacctcctatgagcaactggatcggaagagatgcactgcataacgccgctgctaggaacagtatcgattgaaaacggagatatgacggcgctccatgcatatattccacgaacataatttgacgtcggagtgtgcatagtgtcaaagccaccatgattgcgccgcccagcagacatgttatggatatgcaagctgtgatggaaaaatagttcatttcctgagttgttcgtgccaaacgagtttgtatctcgtcgtgccgattgacgaccgaagccaccaaagagtccacgcccttttcccgtaggatttcgagcagctgatggcgggagctgtaatcgaaggtcatgccgccggtggacaccatcgatgtagtggtatcgccagagagcagtgacgggtcaatgacaacaacaggaacagaggaaaggccatcggtgttggaaggggtgtcaaatgccgataagacagcatctcttggtctggattcaatggagatgctcgtgcgattgatggcgggcagactctttccctcttctgccgccaaactttgctcgaatgagtatgcgcgaagcacattgttcgtaatggattcgctgttccattgttcattctcgggcataatcacactgattcgtgcaagtgtcgtgttgtttcgtataagatgatgaagccttgccgtacgggaatccatgaggatgcagggctgtgggtcttgcgagctatccacccacgtgcatcctagccggaatgaggcgaatcgcgtatgttctgattgggaagtttgttcgacgaagtcattc

SEQ ID NO: 2361 - DNA, 7980 bp, Unknown
  R50_10m  MAG No. k141_2025
acggcatccccgtgatcgccgaaatcaagcgcgcgtctccgtccaagggccacctgtccgacatcccggacccggccgcgctggcccgcgagtacgagaggggcggcgcaagcgccatctccgtgctcaccgaaggccgcagattcctcggcggccttgacgatttcgacaaggtccgcgccgccgtgcacattccagtgctgcgcaaggacttcatcgtcaccgactaccagatcttcgaggcccgcgcccacggcgccgacctggtgctgctcatcgtcgccgcattggacgacgcccagctcaagcacctgctcgacctggcgcacgagttgaacatgaccgtgctgatggagacgcatacccgcgaggagatcgaacgcgcacgccaggccggagccaaggtgatcggcatcaatgcgcgcaacctgaagaacctcaaggtggacgtgaacaaatacaacgaactcgcggccgatctgcccgatgacgtcatcaaggtggcggaatccggcgtattcggcgcggtcgaggtcgaagactacgcccgcgcgggagcggacgcggtactggtcggcgagggcgtggccaccgccgatgatcatgaacttgcagtggaacgactagtaaaggcaggagcacaagtgaaagcatccgaaacgaccccgctcagcgaacatcagggaccgtattggggccagttcggtggccgctatgtgcccgaggccctcatcaccgccctcgacgagctggagcgcgtgtacacgcaagccaaggccgaccccgaattccacaaggagttcatgacgctccagcagcgttacgtgggccgcccgagcccgctgaccgaagccccgcgcttctccgcactggtcaaggagaagaccggtctcgacgcccgtatcttcctcaagcgcgaggacttgaaccacaccggcgcgcacaagatcaacaacgcgctcggccaggccctgctcgtcaagcggatgggcaagacccgcgtgatcgcggagaccggcgccggccagcacggcgtggccaccgccaccgtgtgcgccatgctcggcctcaagtgccgcatctacatgggccagatcgacgcccgccgtcaggccctgaacgtggcccgcatgcgtatgctcggcgccgaagtggtcgaggtgaccctcggcgacaagatcctgaaggacgccatcaacgaagccctgcgcgactgggtcaccaacgtcaaggacacgcactacctgctcggcaccgtcgcgggcccgcacccgttcccggccatggtgcgcgacttccagaagatcatcggcgaggaagccaagcagcagctccaggactggtacggcatcgaccatccggacgcgatctgcgcctgcgtgggcggcggctccaacgccatcggcgtgatgaacgccttcctggacgacgagcgcgtgaacctctacggctacgaagccggcggcaacggccccgaatccggcaagcacgccatccgcttcgcccccggcaccggccagctcggcatgttccagggcgccaagagctacctgctggaaaccgacgaaggccagacgctcgacacctactcgatctccgcaggcctcgactacgcttccgtgggccccgagcacgcatggctcaaggatatcggccgcgtgaactacagctgggccaccgacgaggaggccatgaacgccttccgcgacctgagccagaccgagggcatcatccccgccatcgaaagctcgcacgccgtggccggcgcgtacaaggccgccgccgatctgaaagccaagggctatgacaaggccgtgatgatcgtgaacatctccggccgaggcgacaaggacatggccaccgccggcaagtggttcggctacctgaccgacgatcaggccgccgcgctcgatgtgaccggcgcccacggcaatactgtcgcctgaacaagaagaggagattgttgattatgaccaacgaagcaaccacgccgtccggccagccgctgggcatcagccacaagcccagcaagtcggtcgctatgttcaccaagttcaaggccgagaacaagcctgccttcatcggctacctgccctacggcttccccaacccggacgtctcgcttgacgccttcaagacgatggtcgagcacggcgtcgacgccgtggaaatcggcctgccgtactccgacccggtcatggacggcccggtcatccaggctgccgcctccatcgccctgaacaacggcgagaccatcaagcgcgtgttcgaggccgtcgagaccgtggccaacgccggcggcgtgccgctcatcatgagctactggaacctcgtgtaccactacggcgtcgagcgtttcgcccgcgacttcgagaacgccggcggcgccggcctcatcaccccggacctcatcccggacgaggcgggggagtggatcgaagcctccgaccgtcacggactcgaccgcatcttcctggtctccccggactcgtccaccgagcgcctcgaaaccgtggcccgcaacgcgcgcggcttcgtgtatgcggccgcccgcatgggcgtcaccggcgaacgcgccaccatcgacgcctcgcccgaactgctcgtggagcgcacccgtcaggccggtgccgagaacgtgtgcgtgggcatcggcgtgtccaccgccgaacagggcgccaaggtcggctcctacgcggacggcgtcatcgtcggctccgcgctcgtgcacaccctgctcgcggacgacaacaagaccgcacgcgacccgaaggaaggcttgaagctgctcgccgccaaaagcgaggaactggccgaaggcatccacaacgcccggtaaacacccggtgcgcctcacgcggattgtgccgtgacacggtagggtagtcacagagcatcaagcacaacccgcgcgcggacacaccatgagcaccagcaagtagaggcacgatgaatctggcttatattccctcgccgaccttctccaagttcgagatcggcccattcactatccacatgtatgcgatctgcatcctgatcggcatctgcgtggccgtatggatcctcaccacacgttggaagcggtacggcggcaccttcgaccagattctcgacaccacgctcgtcaccgtgccctgcgcgctggtgggcgcgcgcctctaccactgcatcaccacgccggccgactacttcccgcccaccggcaacttggtcaacatcctcaaggtgtgggaaggcggcatggccatcttcggcggcatctccgtcggcaccttggtggcgttcctgtggtgccgccacaagcactatccgttcgcgatcttcgccgatgccatcgcccccgcgctgcccgtggcccaggccatcggccgactcggcaactggttcaaccaggaactctacggctggcccaccacgttgccgtggggcctgaagctcaacgacgcggacgccatcggcaaatccgaaatctgctattccggcgcgcaatgcccggactacaggaccacgctgttccacccgacgttcctctacgagatgatctggaacctcatcggcgccgcgctcatcatctacctcggccacaagctcgccgaccggctcaaggccggccagcagttcgccatgtacctgatgtggtacggcctgggccgcacctggatcgagaacgtgcgcatcaactactccacggtgatcctgggcctgaggaccaacgtgtggaccgcgatcatcgtcttcgttctcggctgcatcctgttcgtcgtgctctaccagtacggtccggaccccaaggcgcaggcgcgcgggcttgcggcggtcaccgccgacgagctcgaacgccagagcatcgaagaggaacagcttcgccagaagaagcaggccaagcgcactaagtgacaccacaataaacagcgccgaaacagcgcgaaacacgggaccccaagtcccattgcacagataaggtaggaaaccatgagcaatatcgcaatcgcacccagcatcctgtccgctgacttctgcaacctcgaacgtgatctcaaggccatcgccaacgccgacctggtccacgtcgatgtcatggatcatcatttcgtgccgaacctgaccctgggcgagccgatcgtcggccgcatctgtcaggtcaccgatctgccggtcgacgtgcacctcatgatcgaggacccggaccgttgggctcccgaatacgccaagctcggcgccgcctccatctccttccacatgggtgccacccacgcccccgtgcgtctggcccgacagctgcgcgagatgggctgcaaggcctgcttcgccgtgcgtccggccgaaccggtcgagccgatcttcgatatcctcgacgagttcgacatggtcctcatcatgaccgttgagcccggcttcggcggccagaagttcctcgacaaccagatggccaaggtccgccgcctgcgcgatgagatcacccgccgtggcttgaagacccgcatccaggtcgatggcggcgtgagccccaagaccgcgcacatcgtggccgaagccggcgccgacgtgctcgttgccggttccgccgtgtacggcgccgagaatcccgcccaggccatcgacgacatccgcaccaaggccgaggccgcgttcaaggcctgagctccaagcctgaaccgcaatccacctttcatccataaccgcaagaaaagaatctgaatcacatgaagacgtttgaatccctgttcgccgaactgtccgaaaaggcccagacccgccccgaaggctccctgaccgtcgacgagctcgacaagggcacccacttcatcggcaagaagatcatcgaagaggccggcgagacctggatggccgccgaatacgagggtgcggaccgcaccgccgaggaaatgagccagctgctctaccacgtccaggtcatgatgatcaagcacggcctgacgcttgaggacgtctacaagcacctgtgagaggaacgcaaatgctgagaatcgcagtgcccaacaagggcatgctatccgaacccgcgtggaacatgctggccgaggccggctaccgtctgcgcaccaaccctcgccagctggtcgtgcaagatcccgacaatggcatcgagctgttctacctgcgtccgctcgatatcgccgtatacgtgggccgcggcgccatcgacgtcggcatcaccggccaggatctgctcaagaactccggtaccgccgcactcgagcacatgccgctcggctttggtgcctcgaccttccgtttcgccgcaccgaacgaatccccgatcaccaccctggaggatgttcagggcaagcgcgtggccaccacattcgataagctcgtacacgactatctggtcgagcacggcatccaggccgagaccatccatctggacggtgcggtcgaatcctccgtgcagctgggcgtggccgacctcatcgccgacgtggtctccaccggtaccaccctgcgcaacgccggcctgcgcgtgtttgccgaaccgctcatgcactccgaagcttgcctgattcgttcgccacgtctgaacgagcaggacccacgtctggccgtgctgacccgccgtttgcaaggcgtgctcactgcgcatcagtatgtgctgatggactatgacattccgatcagcaaggtcgccgccgccgtggccgtgacccccggctttgaaagcccgacgatctccccgctgcacgacaaacagtggaacgccgtgcgagtcatggttcccaaggccaaggtcaatcagctgatggatgatttgtacgaagtcggcgcacgcggcatcatcgttaccgctctgcaagcctcccgcatgtagactgttagtcgatatgaccaaccagaaagtcaacgccagatacagtccggaagcacgtgacatctatttcaccgtgcccaatttgatcagcgcgctgcgaatcatctcgattcctttcatcagcgtgctgatctccaagcacgagatgattgcggcgctagccctgatcgccatttcctcggcttcagacggacttgacggcatcatcgcgcgcagattcaaccaagtgagcaagatcggtcagattcttgatccgatcgccgaccgactgctcattttctgctcgattctggccctcagcgtcgccggcatcatcccatggtggatgctgattatcgtgggactgagggatctgtggatggcgattcaggtgctatggcttgcccagtacggttatggtccgctgcccgtgcatttcgtgggcaaggctggtaccgcgctgctgatgatttccatcgtcagtcttattttcgccgatttgggcaccagtacgttcttccacttgctctacatcgccgcgctggccgccggcatctggggcatcgccatgtattggctcgccggatatatctataccaagcagggcgtcggattgctacgcaaggaactgggggagaagtatggcgcttgaggccatggccccggtctcgttccccatacccaaggagaatgagccggtacgacgccgcgccgtgttctcccactcagtccgaggcgcggaatcgcatcatgcgctttccccggatgacgccgccgccatccgcaccagacgtcgccgtaaaaccaacgacgattcgcttcagctcatcgatgatcttgtcaatcgtccgatggatccgatgttctccgactcacgactggtccatgagcatcgttcgaccttctccatctggtttaatcgcatcgtcgtattcatcatctgcgtcggcgttggctttgcctgcagcctattcgtgcaacagttgcaatccgatccgcgtaagcaggtacggcagactttggccacgcaattggagaatcgcaactcgcagatagacgaactcaccacggacgtcaataatttgcgatcccaagttgacgaacagtccaagaaaatctccggcagcgtgaaaagcgacacgcttatccaagacgaaatggtcaatggtgccacggtggtcgaaggcgaaggaatcaccatgacgctggccgatccaatcgcggcaagccagtcggatcaatcctcctcgacgagagtcggcacctccacgaacatccgagtcatcaccgatctggatctgcaacaactggtctccctgatgtttcaaaacggagccgaagccattgccatcaacggtaataggctcggcgcgcaaacctcgatacgcaaggccggcgggcatattctcatcggcatgaccgcgatacaaagcccctataccattgaagccataggcgataagagcgccttggccgaagcgatgggggagaagagacttgcaagtctttacgattccttcaaggaagccggtatctacccgcaggtgagcaaatccaattcgattacacttgaggcagcagtcactggcgaagtgaagtacgcggaaaggaatgaataatggcagccgttctgggactgatcatcggcgtcgtcatcggcgtgttcgtcaagccggacattccgatcatcgtgcagccatatctgccgattatggtggtcgctgctcttgacgccctgctgggtgccgcgcgagcctatttcgagcgcagcttctccgaccgcgtgttcgtgatctccttcctcgccaacgtggtgacggcaacactgctcgtgttcctcggcaaccagctcggcgtcggttcgcagctgcagacggccgtcatcgtcgtactcggcatccgcatcttctccaacgtgtccgcgatcagacgcttcatcttccgaggctgacaagggtactgacgtatggcacgtaaagcacaatcagacaacatgctggagaaaatgcgcgaccagcatgtacaagacaaggtcaacgaccggatggaaaccgggtcgttccccacggtgcgcaagaagccccggaaggatctcaaccgggccagcaacaaatcacggctactatcctcgattctcattgctctgatgtgcgcgctgctgggtttcgcct

SEQ ID NO: 2362 - DNA, 12248 bp, Unknown
  R50_10m  MAG No. k141_2034
gccgtcatcacactgctggttgctttcggatatacgatggccgccacggtcatacttgccgtgacggccatcatcaccgggcttgttcgcctgattcttcaggacagaagcccatggaaagtgcgctcagtggcgttcgactccttcatcggcatcgccttgggaatcggcctgctgattacctacttcagcttctttggactcttcggcaacatctttttccgctgaatcgccatcagacgaggcggcctgatcgaagaattcgccatcgtcgagcgtgtccgcgttcgcatcggcatccgtctgtggaagatcggcggcagccggcactttgggagtggtcatcatctgcgcgatgatcatgaccaacgccaccacagcggcggccaagaccgggctaatccagaacacccacagctgttgcagcggattttgcgtaagaccctcattcatcgcggccagtgcgataccggtggaacgggcgggattgagaccggcaccggtaaccgggtagctgatggcggcggccagaccataggcaagacccatggcaatgacatgacggtccgaggactcgccgtgatcacccagagaagacatggcggtggcaacgacaatcagagaggcaacgacctcgacgacaatcgccagcgtaatcgagaacgtaatgccatactgggtcagcagcgagtaagacacggagccgttctcgaaaccgttaacggccggagtcagccacactttggcagctacctgctcggatgtgggcagcagcttgaccacggcgaagccggcggcgatggcaccgatgacctgagcgatcacatagaggatgccatccaggattttcgtcttggaaaccagcacggaggctacggtgatggccggattcagctggccaccggacacgcgggagaagatggcggtgactgcggcatatgccaagccggtagccaacgcgaagaacacgatattgatgccatacacggccgaaccccatgtggagaaggcgtaaatggcaaagcacagcaggaagctgccggccaattcggcgcacacgcgcagggccagcggctgttgcttggtttcttccatgattgttcattccttttcatctgttggaagacgggcgaacccgcacaaacggttgccagtctagcagcagtcctacgttgcggtatgatatataggttggaattggctgggattccagtccgccaactctgaagtatgtatacaaatcgacagtctctgcgatgacagagtctgtccggccacgttgggagaacgatgccaaacgcatattcccgcgctgcgaaagcgcaagacgattccaattccattcgactccagaagctgcttgcccaagcgggattcggttcccgccgcaagtgcgaggacatgattaccgaaggccgtgtcgaggtcgacggtgaactggtcaccgagctcggaactcgcgtcgacccccataagcagcaggtgcgcgtagacggttcgcgcgtacgcgtcaatccgaaccacgtcactctggcactgaacaagccccgcaaggtgctctccgccatggacgacccgaagggccgctacacgttgcgcgacatcgtgggcgacaagtacgagcgcatcttccacatgggccgtctcgactacgattccgagggtcttatcctcatgacgaacgacggcgaactctcgcagcacgtcatgcaccccaagtacgaggtcgaaaagacctacgtcgccacactggaaggcaagatctccggcaccgtatgccgtcgactcgtgaccaccggcgtacagctcgacgacggctggatcaagctcgaccactgcgcgatcatcgactcctcacgcgaccacacgatggtcaaggtcgtgctgcactccggcaagaaccgcatcgtgcgccgtatcttcggctcaatcggcttcccggtcaagcgcttggtgcgcacccagatcggcccgatcaaactcggtgatctgaagcccggttcctaccgcgtgctgtcccagacggaagtccgttcgctgtccaaggaggttggcctgtgattcgcgttgccatcgacggccccgccggcgtgggcaagtcgtccacgtccaaggcgctggccaagtatttcggatacgcctaccttgacacgggcgcgatgtatcgtgcctgcgcttggtggtgcctgaagcagggcatcgatctggacgccgaaaccgtggatgagcgtgtcatcaccgaagcggtgggcgagttcttcaccggcgaccatttcgatatctccgtggacccggacaacccctgcgtattcgccgacgacgaggacatctccgaggccattcgttcctccgaagtctccagccatgtctccaaggtgtcgaacgtcatcccggtgcgcaacgtgctcatcgccgcccagcgcgcctacatcgcccgcgaggcgtcggccgactccttctccggggggttgggcatcgtggccgagggccgcgatatcaccaccgtggtgtccccggacgccgaggtgcgcgtgctgctgaccgcccgtgaggaggtccgtcaggcccgtcgcaccggccaagccgtcaagggcgtgggtgctgaggatgtggccgcgcgcgacaaggccgattccaaagtcaccagcttcctgaccgccgccgatggcgttaccaccatcgacaattccgatctggacttcgcccacacgctcgatctgctcatcggtgtggtcgaggacgccatcgagaaccaagaatacgagcagtatgccgccaatctcgaaggctatgagctggacgaaggcgatgaggatctgatttccggccgtggtttcacggaaggcgcgcgcaaggccggtcccaagccggtgggcgtgctggctgttgtaggccgtccgaacgtgggcaaatcatccctggtcaaccgtatcctcggccgccgtgccgccgttgtggaagacacgccgggcgttacacgagaccgtgtgagctatgacgcggaatgggccggcaccgacttcaagctggtggacacaggaggctgggaagccgacgtggaaggcattgaatccgccatcgcctcacaggcacagattgccgtgaccttggccgatgccgtggtattcgtggtcgatgggcaagtgggcatgaccaccaccgatgagcgcatcgtcaagatgctgcgtgccgccggcaagccggtcgtgctggccgtcaacaagatcgacgaccaggccagcgaataccttgccgccgaattctggaaactcggcctcggcgaaccatactcgatttccgccatgcacggcaggggagtgggcgacctgctggacgtcgcgctcgacaagctcaagcaggccgagaagacttccggctacctcacgccttccggcctgcgccgcgtggctctggtgggccgcccgaacgtgggcaagtcgtctctgctcaatcagctggcgcgcgaagaacgtgccgtcgtcaacgatttggccggcaccacgcgcgaccccgtcgacgaaatcgtcaacatcgatggcgaggactggctgttcatcgacaccgccggcatcaagcgacgccagcacaagctcacaggcgcggaatattattcctctctgcgcacgcaggccgccatcgagcgctgtgaattggcgctgattctgtttgatgcctcgcagccggtatccgatcaggatttgaaggtcatgtccaccgccgtggatgcgggccgtgcaatcgtgctcgtattcaacaagtgggatgcgatggacgagttcgacaagcagcgtctcgaacgcctgtggaacaccgaattcgaccgtgtgatgtgggccgagcgtgtgaacctgtccgccaagaccggctggcataccaaccgtctgacgcgagccatggataaggccttggaatcctgggatcagcgtattcctacaggcaagctcaacgccttcctcggcaagatccaggccgcccacccgcacccgttgcgtggtggcaagcagccgcgaatcctcttcgccacgcaggcatccacgcgcccgccgcgtttcgtgatcttcgccaccggcttcctcgagcacggctaccgccgctacatcgagcgttccctgcgcgaggaattcggcttcgaaggcacgccgattcagatctccgtgaacatccgcgagaagaagaagcggaagtgacacgcgcgtaatttgccagatttcatatatctggtagattatctactcggtgcttttgcaccatcgggccgtagcgcagtttggtagcgcacttgactgggggtcaaggggtcgcgggttcaaatcccgccggcccgaccgattagccccggaattccgccacttctgagtggttgccttccggggcttttccgttttcagacatcatgagacaaaatgacgacggacttacctttgtaagccattcgtaatggattaaacacggacttcatcttggcgtgttattggaattatcaccgacaattcaccgcctccgccccccgtcgtatgtgtttgccccaaacaggggctagactggttcctattgatttgatgaaagggacccgaattgaccgaaataaacgataaggcccaactggatatcaccgccgccggcgacaccgacgccgtcacctcggatacccccgaagaaaccgtaaacacccccgaagtggatgagactttcgagctttcggccgccaagatgcgcgagcacggcatgagcgaaaccgccatcaaccagttccgccatttgtatgacgtatggcgccatgaagaagcctccagctggattcgcgaggacgacatcgagccgcttggccacgtgcccagcttccacgacgtctatgagaccatcaaccacgacaaggccgtggacgccttcgccaaaaccgcattcctcaagctcaatggcggtctgggcacctccatgggattggacaaggccaagtcgctgttgccggtgcgtaggcacaaggccaagcagatgcgcttcatcgacatcatcatcggtcaggtgcttaccgctcgtacacgcctgaacgtcgagctgccgctgacgttcatgaactccttccacacttcggcggacacgatgaaggtgctcaagcatcatcgcaagttcagccagcatgacgtgccgatggaaatcatccagcatcaggaacccaagctcgtggccgccaccggcgaacctgtgagctaccctgcgaacccggagctggaatggtgcccgcccggccacggcgacctgttctccaccatctgggagtccggcctgcttgacgtattggaggagcgcggcttcaagtacctgttcatctccaattccgacaatctcggtgcacgcccctcgcgtacgttggcccagcacttcgaaaacacaggtgccccgtttatggctgaagtggccatccgcaccaaggccgatcgcaagggcggccatattgtgcgagacaaggccactggtcgcctaatactgcgtgaaatgagccaggtccatccggatgataaggaagcggcccaagacatcgccaagcatccttacttcaacaccaactcgatctggattcgcatcgacgctttgaaagacaagctcgccgaatgcgatggtgtgttgccgttgccggtgattcgtaacaaaaagaccgtgaatcccacggacccggattccgaacaggtgattcagctggaaaccgccatgggtgccgcaatcggtctgttcaacggttccatctgcgtccaagtggatcgtatgcgcttccttccggtgaaaaccaccaatgatttgttcattatgcgttccgatcgcttccacctgacggacacgtatgagatggaagatggcaattacatcttcccgaacgtcgaacttgatccgcgatactacaagaacatccgcgatttcgacgaacggttcccctacgccgtgccatctttggccgcagccaactcggtttccattcagggcgactggacattcggacgtgacgtcatgatgttcgccgacgccaaacttgaagataagggtgagccgagctacgtgccgaacggcgaatacgttggcccgcaaggcatcgaaccggacgattgggtgtgatttacaacacggtcgaacgataaaaaagatattatttttgtgaaatggcgctcaactgtggaaaaagcctctaagatagagtgagtgtggggaaactcatacgcacttataacgaaacaataactatacgtgaggactaatggcagagggcacaagcggacgtcggcgtttttccgacaaatggggcaagcacgagctggacgtactggctgtgttgtcatccgcgttcccgcaatggctcacatcccgccaaattgcgcagcgcgtcaaggcttacgccgactcgtatggagagctggcagatcaggccgccaaggccgcgttcgccaagcagttccagcgtgatcgcgccaagctcgccgctatgggcatcgccatcgaatcacggcagcctgagtattcgtccaagtcggaaggccaggacttcgcgtcctaccgtctgcagttgggcgacgaaccgcgcatccgcctgatgttcgagccggaagatatgccggtgcttgccgccgccaactatctggctcgttcgatgtcgatttcttccgagccggatcagtcccagctcacccagcatgtgtcgcgcactacgccgcgtgtgccgcagaccccgattcccgggcttggcttggattcgattgcgcctggcttggggacgcagcccattccggattcactggtcaaggttattgattcgcgtcgtttcgccgccaccgttgacgtggatggcgaacacctgaacgtggcatacaccgattccgacgatttggccatgtttgtgcttgagcatccgggggccacgattgtcagcccgcaagaggctgtggacgcttatcatcgccgtttgcacgccgccagccggttcactctggccgacgaatccgccagtcctgtgagcgcttcggtggtttccccgtcgattagtcgcgatgtgcgagagccgggtgatcccgagtctatcaaggctcagaacaagaagaacggctccgctttccaaacgggcagtgaggttgatcgtcgcctgcgtctgatgctgttcctctccgctcatctgggtgaggaattctcgatgagcgagctgggcgaacgctttatcggcaagccaaagaacgatgatgaactcaagaaattcgtcaacatcatccataaggacatcaacaccctgaccaccgtttccgacgatggtgagatggccggcagccagttcttcgatattgactggccgctgctggatgccgagggtattgtttccgccaccaattcgctgggccttgaacgtcttgccggcatttcgccgcaatacctcagcatgctcaccgcctcggtcagctacttggcgcattcgccgttactgccggacaagcagcgtgggcaggccgaatccctgtatgagcgtttgcgccgccatgtcagcccgggccagaccccgtggctgagcctgaccggctatgagctggagccccgaagcttctccatcgtcaagcgtgcgatcaacaccgattcgctgttggacatggagtacaccgacggtacaggtcgtacccgccgcaagctggtggcccccgccaagatcttcattgacgaaggcgtgtattatgccgccgtctacacggacgttggttccgccgcacccaaggacaaaaaggcctacgtctccaaagacaagaccctcgacaaggccaacggcaagccgcgcatctggcaggtactgcgattggcccgtatcgaaaaggcggaactggtcaagcccaccaagcagatcaacatcccgaacatgccggtgagcgaactgcgcaagtggagtttcgacaacggtaccgacgcggtgttcatcaccgatcagcgcgatctggcattcatcaagacattgccgggcgctaccgtcgaacaatgcggtgccggtgaaaaggtgcatctgaccgtttcctccgattcctggttcgtggccttctgcatcgcccacgcgcgtcatatcacggcggtcgccccggaaacgttgcgcaccatgatcgtggcacgcgccgaacgcgaactgagcatcagcgagaacaagtaaggagcctttcatgccttggtggatatggctgattctggccctgttcatgctggccatgattgttgccggactcatctatgcagcccttcatggactccgtgccttgaaagacatgtccgacatcggcggccaactcggtgaacgcgtggccgcgatgggggagcccggcacctctgccgacaccagcgagccgcctctgttcactcagccgctcagcgtggcacagaatcgttatgccgaggcccatgcgaacgtgattcgcggcaaggccgccaagcgcgaacgccacacccaggcatgggcccgctggaagcgattcaacaactaacggaaagcagcaatggcacgtcaccaacaccataagggcaatgccgattcccagacgctgagcccttcgcagcggtacgcatcattccaaaaggtccaacgccatcgggcgtccgcagcagcgcgattcgccgaatccctgcctttcgaactggacgacttccagaccgaagccaatgacgcgctcgaagccggcagcaacgtactggtcgcggccccaaccggtgccggcaaaaccgtagtggcggattttgccatttacctcgcccaggaacgcaacgtcaaagccttctacaccacaccgatcaaggcgttgagcaatcagaaataccatgatctggtcgacgtgtacggcccggacaaggtaggcctgctcaccggcgacacctcgatcaattccgaggcggacatcgtggtcatgaccaccgaagtgctgcgcaacatgctctacgagcgttccaccacgctgaacgcactgcgctacgtgattctcgacgaagtgcactatctggccgaccgattccgcgggcccgtgtgggaggaagtcatcatccacctgcccaagacggtcaagatcgtcggcctgtccgccaccgtgtccaacgtggaggatttctccaactggattgcctcggtgcgaggcgacacaaaactggtgatcagcgaacaccgccccgtgcctttggaacagcacgtcatcgtgcaggcggacgaacacaccgagcccgaggtgctggacctctatcgccgcgacggcaacggcgagcagaccaccaaactcaacgccgaactcatcaaccggctcgaccagttggaccgcaaggccgcacgccggcgcggcgaggaacgccccgataagcgcaagggcttcggcagaggccgcggcggcaaaggcgccaaagaccgtgccccgaaagcggaacgccacaccccgcgccgctgggccgtggtggacgagcttaacttcctgggaatgttgcccggcatctacttcatcttctcgcgcaacggctgtgaccaggccgtggaacagtgtatcaacgctggactggagctcaccaccgatgaggaagtgaccaggattcgccgcatcgtggatgagatggtggaggggcaactcactcaggaagacctgaaagccctgcagttctccaagttccgctttgcattggaagaaggcttcgcttcgcatcatgccggcatgattgccctgttccgccagatagtcgaacgattgttcgaagaaggtctggtcaaaatggtgttcgccacggaaacactggcattgggcatcaatatgccggcccgctgcgtggtggtagagaaactcgaaaagttcgacggtaccggtcatgtgggcctgacgcccggcgaattcacgcagctcaccggtcgtgccggtcggcgcggcatcgacaccatcggccacgccatcgtggtcgaccatcacggttttgtgcccgccacggccgcctcgctgtcatccaagcgtgtctacccgctgcactcgagcttccgacccacgttcaacatggccgtgaacctgctcaactccagcgactacgagaccgcgcgcgtcaccctggaccagtcgtttgcccagtgggaggccaacgaatcggcctggcagctggaatcgcagattaacacactgaagaacgcgctggccggatacgaacaggcgctcgcatgcgaacacggcgacttcaaacagttcatgaccctgcgtatggagctgagcgacatcgaaaaggaaggccgccgcaaactgaagcacgaagtgttcctgaccgatcaggagcgttcacgcgctttccagaacctcgaccagcgcattcgcgatttgcgcaaggcggaacacgagcatccatgccgcaactgcccggacctccagcaacacctcaaatggggccaccgctgggcccgcgagactcgagaactgcagcgcgtcaccgatcgctacgactcccgcaccgggtccgtggcacgccagttcgattgcatctgcgatattctcaccgggcttggttacctcgaacgtcatgtcaatgcggccggccacattgacatgacgttgactgaaaaaggtctgctgctgcgccgcatctacagtgaacatgacctggaactgtgcgaggcgctgctcgccggcacgttcgacaagctcaacgccaacggactggccgctgtgctctcttcactggtatacgaggccagacgcgggggagacggcgaaccgaggcactacccgggcggcatctccgggcccatcgccatcgcttcgtccaagctcaagggcatttgtgaagacatcgatatcctgtgcgaggatcacggtctggacgagatgcagcggccggatttcggcattctcgacatcatgtatgaatgggcggatggcggttcgctgggatcgtgcctgtacggcaccgacatgaccggcggcgacttcgtgcgcactgccaaacgactggctgacgtgctgcagcagattgctgtcgcccagccgctgccgttcgacgggggagagcggctggcaggcctcgcccacgaagcggccgaccgggtcaatcgtggcgtggtggcctactccggcgtggactgacggggctgtttgacgggagtttgtcagccgacgtcggaagcttggaatagcggccaagtccgaactgttgcgtaaattagtagggttaaagatctttcaaggaggatgccgatatggcagaacgtagcctcaggggcatgagcatcggagcgaaatcgctggagtccgacgacaacgtcgatttcgccgcgcgaaacgatgtggcgtatgtatgcccgaagggccaccgcaccatcctgccgtttgccgagggtgccgaaatcccggacgagtgggagtgccgttgtggttccgtggcccaccgtgagggcgacgccgaccgtgagggcgacgaaatcagcaaacccacccgcacccactgggacatgctgctggaacgccgtagcgaagaggaactggccaccctgctcgaaaagcgcctgcaaatgcaccgtgacggttggattcccgactacgagtgatctcctactgaacaacacgtgaacttgatgcccagtcatcccgactgggcataatcattgttggaacaagtcgcattgtttgacgaccattcaaagcagtcgacatgaacaagggggagtggaatctcaatggcacagcatccgatgaaagtggtcctgttggatctcgacggcacgcttaccaagtccgacggcggcattatcggctccgtcatcaagaccttcgaagagatcggtcgaccggttccggacgccgccgaactgcgacgcttcatcggaccggcgattattgaatctctgcgtcgcaatcatgtgcctgcggaagatctggatcgggccgtggacatctaccgcagctactacggagaccgtgccgtgttcgacgatccgaacgagcccggcaacaaggtgcccggacgactggtgaacgtcgtattcccaggcatccgtgaacagctgctcaaactgcatgccgacggttactacctggcactggccagctgcaagcccgaataccagtgcatgcctatctgcgaccatttccacctgaccgaactgttggacggcatctatggtgcttccaaagacaattcccgtctggacaaagatcaggtgattcggtactgcttcgacaaaatcggttttgatgctgcagcgggggacagggccgtgatgatcggcgaccgctacaccgaca

SEQ ID NO: 2363 - DNA, 7660 bp, Unknown
  R50_10m  MAG No. k141_2061
catccggcgtcagcgtctcgccttcgtagcggtcgtgctgcaccgtctcacacgggtccaaggtagtggcggcaagcgtcaccttggcaccggcggccttgagatcgctcagcgggcgcgtcagctcggattctcatattccagaaacgggtgcggcgcatgtaacgggcggtaggtagtctgaaggactgtaatgcaaagccgaacaggggagtgaagcatgtcgttggcggtacgagtcatcccgtgcctggacgttgacgccggtcgcgtggtgaagggtgtgcatttcgaaaacctcaaggatgcgggcgacccggtggagctggcggccgaatactatcgtcagggcgccgacgagatcaccttcctggatgtgaccgcatccagctcccaccgcaacacgatgattgacgtggtctcccgcaccgccgaacaggtgttcattccgatgaccgtgggcggcggcgtacgcacgcccgaggacgtcgactcgctgctgcgctgcggtgcagacaaggtcggtgtcaacacggcggccatcaatgacccgtcgcttatcagccgcgtggccgaccgtttcggcaaccaggtgctggtgctctccgtggacgcccgccgcgaaaagggcgagcaacacacgcaatccggcttcgaggtcaccacgatgggcggccgcaaatccaccggcattgatgccatctggtgggtcaagcgcgccgagcagcttggcgccggcgagattctgcttaactcgatggacgccgacggtaccaaggaaggctttgatctcgagatgattcgcgccgtgcgcaaggaagtcaagattccgatcatcgcctccggcggtgccggcaaggtcgaggacttcccgcccgccatcgaagcaggtgccgacgcggtgctggccgcatccgtattccattacggcatcctgaccatcgccgatgtcaaggcggaactcaagaagcacggctacaccgttcgctaaacgaatacaccttgctcccgctgggcgaacaatccagtgaattgttcgtggcaatgcgctatgcgcacgtcgcacataatccgggagctgtcagcgaagctgactgagggtggtccacagaaggaagataggtatgacagacactacatacgacaattccactgaactcgatccccgtattgccgcacgcctgaagcgtgacgccaagggcctggtcgctgccgtcatccagcagtacgacacacacgaggtgctgatggtcggctacatgaacgacgaggcattacgccgcacgctgaccaccggccgcgtgaccttctggtcccggtcccgtcaggaatactggcgcaagggtgatacatccggccatgtgcaatacgtcaagggcgtgtccctggattgcgacggagacgcactgctcgtcgaagtagaccaagtcggtgccgcctgccacaccggcaagcgcagctgcttcctcgaaggcggccccctgtccgtggtcgaaggccatcgcccggccgagcagtagaacgggcttccctgactgggggaagccgaacgaccgcgtactacgaaacaagacatcgagttgtaagtaaaggagcgaatatgagcgaatgcagcgtcaaacacctgaagtggggcgccacctggcccagtcgcggccagttacacgaactggccgacgccggctaccgtgtgattccgatcgtgcgccgtctgctcgccgactcgctcaccccggtcggcttctacgagcgtctcgccggcggccgatccggcaccttcatcctcgaatcggcggaatacggcggcacgtggagccgttacagcttcatcggcgtcaactcgatggcccagctgcgctccaacaacggtcaggccgactggctgggcaaggtcccggttggtgtgccagtcaccggtgacgtggtcgaagtcgctcacgccacgttgaagactctgaaggccccgcatgtggaaggcctgccgaacctgaccagcggtctggtcggcacggtcggctgggatgccatccgccactgggaaccgaccctgcgcgccgaagctccggacgagaccggccagcctgagaccgtgctcgccctggccaccgatatcgccgtggtcgaccacgtatccggttcggtgtggctcatcgccaacgcggtgaacgtggatgataaatccacccgcgccgacgtcgcctacaacgaggccgtcgctcgactcgaccagatgcagcacgatgccgccaccccggctccgggcgagtcccgcgtcaacatcttggacgaaacggtcgcccagcctgagctgcgcttccgcaccgagaaaagccactacgagcaggccgtcgaacgcgccaagcagcacatcgtcgacggcgacgtgttccaggtggtcatctcccagcgtctcgacatcgattcgcctgccgacccgttcgacgtgtaccgtgtgttgcgcacgctgaacccgagcccgtacatgtatttcatggcgttgaccgatgctcggggccgcgacttcaacgtgatcggctccagcccggaaaccctcatcaaggtggacaacggccacgcgatgaccttcccgattgccggatcccgccctcgcggcgccacccctgaggaagacgaaaaattcgccaaggaattgcttgccgatccgaaggaacgcagcgagcacatcatgctcgtcgacctgtcccgcaacgacctgagcaaggtgtgcgtgccgcagtccgtggaagtcgtgcagctcatggacatcaagcgtttcagccacatcatgcacatctgctcgacggtcaccggcaaggtcgacccctcgctgaccgcattcgatgtgttcaagtccgcgttcccggccggcacgctttccggcgcgccaaagccgcgcgcagtcgaaatcatcgacgagttggaaccggccgaccgcggcatctacggcggcaccgtcggctacttcgatctctctggcaacatggacatggccatcgccatccgcaccgcgttcctgcgcgaccatgaggcgagcgtgcaggccggtgccggcattgtgctcgactccgtgcccgctaccgaatggcaggagacgcgcaacaaggccgaggccagcgtcgaatccatccagatcgccgcccagctgcgcgaactgtaacgttcaacgcataacgatgcccctgctgacaactgctgtcagcaggggcataacaatatgcgtatcagtgggtttcgcccatgatgtcggtggcgtcggttccggtgcccacagcggcctcgatggcggcttcgatgccgcgcgccatggtcgcgatttccatggtcggcgtgccgttcggcttgcccacgccctgcgcggtcgcatacggcacatgaatgaagccgcccttgacgccggggaatttgcggtcaatcagatacaacacgtgatacatgatgctgttgcacacatacgtgcctgccgtatacgacatgaatgcgggaatcccgtggtcattgatgttcctgaccatggccttgaccggcaacgtggcgaaatacgcggtgtcgccgtcctcacgcaacggcgtatcgaacggctgctcgccatcattatcgggaatacgcgcctcggccaaattaatggccactttctccacggtcagagccgaacggccaccagcctgaccaatgcacagcacatagtcaggctgctcgcgcaccatggcttcctcaaccacggtcgcactgcgcgtgaacaccgtcggaatctccagtttcaccactgtcgcaccggcgatttcatccggcaacagcttgactgcctcgaatgcggggttaaccggctcgccgccgaacggatcgaatccggtcaccagaatcttgctcatcattagctccttatttcacggattgttgtggtatttggacaacgaggttattgcgcgatcagcatatagacgatctgcaccacaatcatcaccaatgcgggcagcacctgcttcttaatcacgcccatgcggtccttcatatcgagcatcgcgacgggcacgatgttgaagttggcggccatcggcgtgcacagcgtgccgcagtagccacaggtcagcgccagaatgccaatcaccgccgggtccgcaccgtaggcgagcacgaatggcgcgccaatgcccacggtcattacggtaatcgcggcgaaggcattgcccatgatcatcgtgaacagcatcatgcccacactgaatacgatgatgcccagcgtgacgttgcccttcggaataatgccgccgaccagcgtggcgatcacgtcgccgacacctgcggctgtgaaaatcgcgccgagactggccagcagcatcggcagcatgcagagcgcacccatggcagacaacaggcgttccgaatcgttgaggaatacgaccggcttgttgtcatgcgagaacgcgaacagaatcacggcggcaatcatcacaccgatgcagcagccggtcagggcgctgacgctgggaatcagggcgccgataatggcgaacacgcccagacacagggcgggaataaagatgcgcatgccgatgcgctggaagttcgcggccacttcggcggtgctgggagcgctcgaatcggatgccgagcccttacgcacttggcggaagatggcgggaatgaccatgatgataatgagcacgccgtccgcaatggccggaatccaacggccgaacgcgatgacgataccgagcgccgtccagaacacgaaagtgccgtagcgggccttgttggttttatcgagtaggttgcgtacgcccgcatacacggacatgaaacccatgaaaatatagaagagctcgaggatcttggtgccaacggtcacgctggggtccatgaagaacgacatatcaggcctccttgccggtggtggtagcggtagcggcctgagcggcggcttcggcaccgtagtacttcttacgcagtcgtgtgtccttgatgatgtaatagacggcggtgaccgccacggcaatcaccgcgaccgggatctcgataatggccatgcgcaacagttcgacgtcataacccagcggcttcaacgtggactgcacgagcagcgcaccggccgtacccacgaacagcacctggccaaagaaccatgcgacgttctccatgccggaagccatgcccttgagctcttccacatactcgtcgttcggctcgtgaccggacgcttcaatcgcacctaccgccatcggcatgatgaccggacgcacgaacccggccacgccaccaaaactcacgttgaacgcggcgaacacgagacgcatcacaccatacagggcgatcaccataccgggcgtcgcattcttcactttgccgatcagctgcgcggctgcggttttcagaccgttgcgctccaatgtaccggtgaccagcaacacgatgatgaaaatcgccatgctgcggttcgagacgaacgacgtacccaacgtggtcaggaagccgtcgacgccaatgccgccgaccagcgcagtcaccacagccgccacgataatgatcagaatcgcatcaagtttgagggcgaaacccacaatcacgatcacgattcccaataacacgagataatttggttccatgtgggaaatccttcctatactgcacacgcattgcgccgcaagcgtgcccggatatggatagtgtacgacggaaatcacgattcaactgtcttatcgcgcacattgcaggtattgcatgagcctacgggcatataagcgtatggacgcatgagcgtcggctgagcccggtcggcatggtgttcgctatgatggacagtcggactttggtaagagacagtattcgtaacaggcaagtaggttattcatggctattgaggtgcagggacttgaaattcagatcggcgcgcgcacgctgcttcaccccaccaacttccatgtggccaagggagacaagatcggtctggtgggccgcaacggtgccggcaagaccacgctgacccgcgtgatcaccggcgacatgctgcccaccgccggcaaggtgcgcgtctccggcaagctcggctacctgccgcaggacacgcacgcctctgatcccacgcagaccgctctcgaccgcatgatgagcgcgcgcgacatcgccaccatcatcaaccgcatccgcaaggccgaaaaggatatgaccgacccggatccggacgtgatgagcaaggccatgacccggtacgacaaggccatgcaggacttcgacaaggctggcggctacgcggcccagtccgaggcgatttccatggccgcctcgctcggcctgccgcaggaggtcatggagcagcagctcggcacgctctccggtggccagcgccgccgcatcgagctggcgcgcatcctgttctccaacgccgacacccttattctcgacgagccgaccaaccacttggatgccgattccatcgaatggctgcgcggctacttgaagaagtacgagggtggcttcctggtcatctcccactccaccgaactgctggacgaagtggtgaacaaggtctggcatctggatgcgcagctcggccagatcgacatgtattcgctcggctggaaggcctacctgcaccagcgcgtggtggacgaggagcgccgccgccgcgaacgcgaagtggccgagaagaaggccgaccgtctcatgaagcaaggcattcggctgcacgccaaggccaccaaggccgtggcagcgcagaacatgatgcgccgtgccgagaagctgctggaaaacacctccgaggcgcagaaggccgagaaggtggcggacatccgtttccccgagcccgcgccctgcggccgcacgccgatcatggccaaggacatctccaaggcctacggttccaacatcgtgttcgccggcgtgaacctggccatcgacaagggctcgcgtgtggtgatcctcggctacaacggtgccggcaagaccaccacgctgcgcctgctggcccacatcgaggagccggacaccggttccgtggaatacggtcacggctgcaagatcggctacttcgcgcaggagcacgacaccttggatctgaacgccaccgtgttggagaacctgcagcatgtggcgcccgagctcgacaacacgcaggcccgttcgattctcggctcgttcctgttctccggcgatgacgcgatgaaaccggcccatgtgctttccggcggtgagaagacccgtctggccttggccacgctggtcacctcgcgagccaatgtgctgctgctcgacgagcccaccaacaacctcgaccccgcttcccgtgaggagattctgaaggccattgccaagtatgagggcgccatcgtgctcgtcacccacgatgagggcgccgtcgaggcgctcaaccccgagcgcgtgctcctcatgcccgacggcgacgaagacctctggaatgattcgtacctcgaactcgtagccgaagaatagtagtaggagaggtctgccatgccaaccacaacaggtaagaaaatcgccatcgtcaccggcagcgcgctgggcttgggctacgagctcgccagccagctcatcgccaacggctggctggtggccggtgtcgacttcaatgccgaacgtcaggccgaactgaccgcgcagtggcccgatgactcctaccgcgcctacgtcggcgacatcaccgacg

SEQ ID NO: 2364 - DNA, 8545 bp, Unknown
  R50_10m  MAG No. k141_2066
gccatctacgtccaggccaaaggcgaactgaaaaaggacgtcatcaaggccctgaggagcgggcgcgcccaacgccggccgcacgggcaggcgggttcgcgcaggcccgtttccgcgagctcatgatcatgatcagcgagcggcccgccgaagtcgaggaccgggcgatacccggtcattgggaaggcgacctgatctgcagcgcggccaacaaaagcgcgatcggcacgctcgtggaacgctcgacacggttcacgatcctcctgcacctgcccgacgggcacgacgccaaacacgtccggcaggccgtcatccggaaaatgcaatacctgcccaagctcctgaggaactcgctgacctgggaccagggaagcgagctcaccctgcacaaacgcatctcgaccacgctggacatgcaggtgtatttccgcgacccgcattcaccctggcagcgcggcaccaacgagaacaccaacgggctcctgcgccaatacttccccaagggcaccgacctgagcgcataccccgaggactacctcgacgcggtcgccgaggaactcaacgaccggccccgcaaaacactcggctacaggaaaccatccgagaaaatactcgaactcatcaacacagcatgatacgatcgcaccaatccaagaccgccatcaagagcggcaaaacacacaggtgttgcaaccaccactaaaatccgccaagcccaccttgccgaatggggtgtcgaacatggaatccgtcttgggggggggcgtgcggtagtcgcattcgtaacaacaatccgcttgaatgagctgctgagcaaatagcaggtctacatgcctgctttgaaccagccgatggcgatttgagtgcgattgcgcaggcccaaagttgcgaggatacgggtcacggcacgtttgacggaggcaggttcgacggtgagttgattggcgatttcctcgttgatgagcccttcggagatgagtgcgcagatttcacgctggcgaggggtgagtgcgtcgaaagctttgcgcatttcttgctggcgctggctgctggtgggatgcggaacgcctcgttcaagcacttgtctggtgattcgtggggtgagtattgcgtcaccgttggcgatggcgtgaaccgcgtcgatgaggttgtgcttggtgacgtccttgagcaggaagccgctggctccggcgtcgagaccgccaaaggcgtaatcgtcctcgtcgtacgtggtaaggatgagaatgctgatggtgggccagcgtctggtgatgcggcgagtggcttcgatgccgtccataccgggcatccgcacatccatgaggattacattcggcaatggacgatgctgaacggcgagctgttcgagcgtctcgatggcggatcggccgtcagcggactgggcagtgacgacgatgtcggaagcatcgtcaagcatgagttggaagccaagtcgcgcgaaacgctggtcgtctacgagcattatacgaatcatgcggtgtggtccttttcgttcactccgttggacgggatggtcgcctcgacgacccattcgccgtcttcgtttggaccgtattcgaagatgccgcttgccgattcgacgcggtggaatagacggacgagcccagtaccgtcatccttgcgcgcgtccttgcgcgcgggactgccgtcattgcggataatcacggcgacggtgccgttctcgctgtggttccaggcgatgctgatatgcaccacgttctgtccgtgacgtatggcgttggtgatggcttcgcgagtcacatcgaaacacaaatcagcctgagcttcgtcatcggcgcgcgtaccagtctcggtgaacaccgtgacgatgcccagccggcgtgcgtgcgcgagaatcggccgaatgtcatcccatgaatgctggtctgattcttgggtgtgcgtatcgtcaccgttcgccgctccattgaactcggtcagtgcgcggacggctttgcgcgtgtcgcccagactctctcgtgcgatttcgttgatgccgtgcagcgcatcctccacgcgtgggtcatcggttttgccggccagaccctcagacagtgcgatgattacggtcagatcctggcccacactgtcgtgcagttgaccggctatgcgcgaacggcgtattgcggcatcgcgttggaaggccagctcggctgcccgccggcattcctcggcagctttgtgttcggcttccttggcctgttgcctgccacgtactgcaagcgcgccgcctcccacggctgccaacgttaccactcgactcacccattcggtcgcgagaacgtccggatgcaccatgatggccgacgcggtcatcgacagcatcatgccgatgcctccaacgcacagcccgcgccccctcgctgtccgggcgaacgcatagcaggcgacgagcgtctgaatcatcacgattgagtccaaccgccagtacgaggcaactattaacaataccgcttcaagcgccaaggcaacggctggcagccagtaacggacaagcagtatcgcactgctggctatggtcatcgccagcagcagagccaatcccagcggatctttggcaaacgtatacatggtgtcggccggcgctccgatcgcatgctcccacagcatcgctgcacattcgaccacggcgatgaccagtggcacggccaggaccgtgaccttattggcctgcgcggattgcggtttcatggctcccattgtggctctttttgtatgatgttgcgtgcatgtcagcatgtgcgtatcgtgtcggccacgctgcggtgtagcgcggggcgaatctgcgtgaactggatgaggaacaatgccagccagcaggccgtgcccatgccgattacgcccggccatgggatttcggccacggggatgccgacgagcgccgcggatcttgcggcgaaaacgcttgcgctgacggcgaccgggatgagcgagagaatgaccgcgccggcggccagctgcaggctctgccagagatacatgcggatcacacgacgtggggacaggccgatgctgcgcagcaatgcctggtcggcgaccatgctgcggttcgacagggcgatgaccgccatgctggtggccagggacacgatgcacagcatcgttatgagcagcagcgagtccgcgtagttcaggctcttcggatggccgcccaaggcgagtatccggccataggatcgcgcgcaggtcagcagggtgaccgacagtcccatggcaagggcgagcggggcaatcgtgttcgtgttgctggcggccttcgcctcggcggaacgggcggcgagcacgccggtcgcggacccgcacaggcgacacacgacacgtccgatgcccaacagaatcggaatcagcatgctgacaaggatgtacatgccgaacgaggcgatgatgccggcccacagcgcgctgttgaatgtctgccccgcctcctggccgaacgcgagcgcccgtggcgtgcccatgccggagaacgccaatgccagcgccgccgccatgacaatcaaaccaagtgcccagtgcgcccaagaccgccaaccgtgccgtatcccgatggctcccgtgccgcgaatcacctcgatgggacggatcttcgctgcgcgcagcgaggggatggacgcgcccaacatgcacgtggccacacccaacagcagggatccgagccacgcggccatcgacggcgtgaacgcaggaggtgcgaacgagccgaatccatcggcgaagctttccgcagccatggcgttgaactcgggaaccgccagcaggctggccggcactgcagccagagagccgatcagggaaccgaacaggctcgccacacccacgagcatccacatgctggcaagcacctgactcgggctggcgcccataagccgccattgcgcgaacgtgctgtgaatacggttgaccgtggccgagccgaccaccgtcaacgagaagaacgcgagtaatgacaccaccacatagatcgtgaccgacaccatgccgaactcggccggatcaagacccgcctgccgcgcggccaatgtgaacgacggagacgaggtccacacgaattggttcatgcatatgcccaccagcgtggtcaccactgcgaccaccagaatcgtgggtacccatcccgtgacattgtcgcggaacacacgcagcacatacctagccacgatgagcctccttccgctgctgcggatacgccacgcgctggaccggtcggcccggttggacggattggataggctgggcgttcaccatcatcgggccgacagaccgcgccgccgcaaccaacggcggcgacccggccggtacgaaagtgcggcgtatgccatcggcaatctgctcggcggtgagtctgccagcgatgtgggtgacctgaccgtcgcgcaggaagatcacgtggtcggccaaagcggcggcatccgtgtcatgcgtgaccatgaccacgctggagcccgcatccgccagctcgcgcagcacctgcagcacaagctcgctgttcgcggtgtcgagcgcgccggtcggctcgtcggcgaacaccaccgccggacgcatgagcagcgcacggcacagggcgacgcgctgctgttcgccaccggacagggcgcttaccgtcgtcttcgccctctggcgaagaccgaaccgggacagcagctgcgtgacctgcacgtagtcggccttgcgatgggcgagcgagagcggcaacatcacgttctcctcgaccgtcagatacggcacgagattgtattgctggaacacgaaaccgatatgcccgcgaatgaaccgcgaacgccgttcctcattcagtgcgtagacgtcggtaccgccgatggtcacccgcccggaatcgggcctgtccaatccggacagcacatacagcagcgaggtcttgcctgcgccggacggaccgacgatcgccgtcaagcccgctccatcgatatccaacgaaacattattgagaacagtctgcgtgtttgcgggtcgggaggcggttcgagcatcgaaccctgtccgtttcaccagtccgagcgcctgaatcggtgtgccggcattttgccaagtcatgaggtagccccctgtcgtgaaagttgacgccgtttttctcaaccttcgcgccaggggcatggcaggtcgaggtaaacacggaaagtgacaccctagggtgacagattccagtagcgttccatgaccggcacccaatatgccctcaaccagaccagcgacaacgaggacctgcccggcatcgtccaactgcccgcctatgccaagtatgatggacggctgctcgtcatacttggttcctccgggaagcgaatatccttctgtcgtttgcggaaacaagccctgccgatgcccaagaccgccagataaagcaggaacatcacgggcacgacccatgtcacgtaccgccacgggtcaatctggaacgtatcgaagacgatgaacatgacgcccctcacgttgatggcgacgatcgccagaatctgggcggccgccgaatcgaacctggattcggccgggctggtatcgttcgcgtcggccggaacgtcaggcgtccgcccggcgcgacgcatgaagccgagcgccgcccacacgatggccgccaccaacgccacggccgccggcaccaccagcttccagaactccccgtcattccagccgtaccggatgacggcgcacgtgatggccgtgacggcggccacgcccaatgtggcggaagcgccgaaaaaccacagcagaccttgattccgacgcccaccatgggaggcccgcacctcatcgtccgcaaccatatcgtccccgcattccataaagtccgacgcgtacgcatgccatctcaattatggcactcaaagagtcaatcagacaacatgctgtcaagcgatcgcatgacaggaatcggctatccgtcaatgccttagggtgctgtcgatgcatatccgattgaccgatgcttctacatgcgtgccgacatgtgccggtccttcgcgtccgcgtacgcattcttacatcacgacctcaaactaatctacgaaaaactttaaacagatatctatttgattttaatattatttatggtatacttaattttattaaacccgccgtgaattgaaggaggcaggtatggatacgacgatgatcccgccgtggatgtcgaacctcgatgacgaggatatgacgttcatcaaacggtttctgctcgcatcaggctccatgaaggaggtcgccgcgcagtacgacgtctcctaccccaccgttcggcttcggctcgaccggctcatccagaaaatcaagttgggcgagcagatcgagaacgagccgtatatcgcgctcatcaaacggctcgcggtcgacgacaagctcgacttcgacaccgccaaaatcctcatcagcgaatatcgcaagcagctcaagcaaggagagtaatcatgattggcgccacaatatttgccgtagtgtttttcgtgtttctcatcgccatctgcatcggcttcatcatattgcagatcaggctttcgaagatggacagcaagtggcccggtctggtattgcccgccatcacattgctgctgtcgcttgtggcggcgattaccgtcttcgccagggcggacatcggtgcgtatggcaacatgtggaacgtcgtgctttccgcattcatcgcgttcctgtccaacaacgtatccaccatcgtgctggccggcatctacttgtatcagcgtgacaagatcaatcgtcgcgccgagctggcccgtatgaacgttcaggacctgtaactcactgtgcaaaacacgcagactgaaccctacgccgcttatgccgactcatcatcttttgcgccgcttcgcgcagcttggatgattaagccggtgacgtggtcgcagggttcgtcgcgcaatcggagccggacgccctgtcatttcggctgattccgtacatcctgttccgccgcgaaccgttcggcgatttgccgtgcgtggatgttcttggcttcgttgacgaagtcggcgcatgccttgctgccgtagagcgcctcaccacacgggtcggcgaaacgcggatcgccgaccagcgcggagcgaatggccccgaacgagccggacagcggcatggcgttcatcacggtcgcggtttgattctgtgccgcccgggtgcgggcggtcttgaccagaccggtctcgtcgcagtagcgcaacgtgcgcgtcgtcacgccgctgatcaatgccgcctgatcaatgggccacaaccggcccgtatccagcggattgccctccacatcgaacgcgccggaaccgttgacggcgttcgccgtgttgtcgttctcgttcatgatcgatcatcccccttgaagccgattatcctctacccgccgtgcgtgtttcgcggcgttgccgtcaggatagacgtttacgcaacgtcaaccgcaagcgataatgggatgtatcgttcaagctaggcaatatgccgtcaagcaatcgcatgacagcaccatgttcggcacataccagatggaagaattggcaaaccttaaaaaataccgcggttattgctgtgccgagaacgccaatatgaccatagacgtgctttcccgctacacgttattcacctgtcatgcgccgatatcaatcaaaagacacttgcataaccaccgctacgcatcgccaataacataccgatgagccagaatgaggcccaggccacgatgctaatccgtaaataatactggtcagagtggcaggtacattggtcctatggctaagcgcaaacatatcggcactgttgttattgcaatactggtcgctattctgctgacggtgggcgtttccggctggctattctggcagtcggtacaacgggtgatcggcgaggcgcagcaggcgggcgaatatgcggctgaagcacagcaatccgtcgggcagggcgacttcaagcaggcgcttgagcagatggacagcgctggcagtcacatcgtcacggcgcacgacgaaacccagggcgcgctatggcaggccgccgaatacgtgccatattacggttcggacgtgaaagcggtgcgcggcatgctgggcgcggccgccgacgccgcgaccaacgccctgcccaaaatcgacagtgccgcgcagggcacgttggtggacttcaatatcgaagagctgctgtccggcatgaacttctccgacggcacgctttccattcccaaaatcgcttccatcaagcaggacctgtccgacgccggtgcggtcttgaagcgcgtcaagacgtcgatttatgcgctgccgcaaccccgcacggaacagatcaccgaaatggtcaaccagggcaagcaggtagtggaccaaatcgatgaggctttcgacaccttgaacaccatcatcgagaagattccgggctgacgttggttcgttcttgtcgtatattggcgtaacctccgcataaggctagtccatacaaatttacataaataattctttagctatgtaactataagctaaagaattatttatgttaaaatttgggataggaggtgccaatatgccga

SEQ ID NO: 2365 - DNA, 6950 bp, Unknown
  R50_10m  MAG No. k141_2086
gcaaacatgccacagtgctgattaccggcggaacaggcgtgggcaagaccaccttgctcaaggcgctgctggcgcaatgcgacgtgaacgagcgcatcgtcaccgtagaggaagttcgtgaactgggggaactgggacgcggcgatcatgtctcgttggtaacacgcgaggcgaatgtggagggcgtcggagccataagcctggcggacttggtcaaagcgacattgcgaatgcgccccgaccgcgtggtgctgggcgaatgccgtggtgcggaaatcgtcgacctactgcgcgcgttcaattccggtcaccacggcggcatgaccaccgtgcatgcggacggtgtggaccgagtgccgtccaggttgatttcgcttggattgcttgccggagtcagtccacaggcgttggccatgctggcggcaggtgctttcgacgcggtggtgcatttggagcgagtgaacggacagcggcgtatcacgcagatcggcgaactgcgcgtagcacatggtgaactggcaggaacaccgctggcggtatggaatggctgccatcctcctcggtatgccgccgaatgggggcacttcattgaacgatggggcatcgttcccaggccgagtggtggtgggtgatgatgtggtgtgctgttctggtggcgctcgccgtgctgatatggccggggaacaagtccgggaggctgtaccggctggcttaccgcgggcgcgcggtcgattccgcagccataaacgaacctcgatatgccgactcacctcgcgtgggcgttgcgcaggtgattacgtccgccatcgcgcgattgcgaggtggcggcacattggttgaagcattcgaggaacaatccagcagacgcttcgccactcatcgcattactgtggaacggctcataacggtgttcgaacagcggcgtctgcccgacgaatcaccagcgcaggtacttgaagctgcacgcggggtcaccgccgcagcgattttgagcgatgagctcggttgccaagcggtgccatgtctggaagcggtattgactgcttaccggcagatgaggctgatgcagaacttgcgatcgcaagcatgtgccgttcctaaagccactgtggggctgctgagcgcgcttccggccgtcactgtggcattgggcgagcttctgggagctagaccattggcgttcttgcttggatcgccacgcggtgtggtctgcttgacattgggaggatgttgttatgctgccggcttggcatggatgcgggcattgttgaaaggcagcggattatgagtacggtgtgggtacacgccgcggcaggctgtgcggcgattgctggttggctgtataaggctctgtctcgtcatgacagccgcttgccgggcgaggagccggccgtagcgcatgattgcgggtcgtcatggaccatactcatattgcgtatgttgcaggtgtccttgcgtcagggttcctcgattccccgggcgcttgacatggtgggcaaagccgtcggcggcgactgcggcgctcgcatgagcgaggtcgggaactccctgaccagaggggttccctgggctgatgcgtggcatgccgctatggctgttcagcatgagggtgcgccagctgatagtccatccggggaagatacgaataccacgcaacgagatcttggactgctgcaatcggctttggaatcgtcatggacgcatggcgatatgcctggtgtgcgcctcgaatccgccattgaacagctggaccgtgacgagcgtgctgctatcgaacggaatgccgcgaagctgtcggtaaagctactgatgcctacagggctatgttttctgccggcattcgtgctggtaggagtcattccggcgattgcgtccttcacgatgtgaatataggcgtgaactgagtgcgcttaggctgaatcttgttgtattgctcggtattgtacttggctgcgtttggttatccacatttgtggtggacgacacgtcgaggtgtggataactcggcaagctagaaccacataccccatttttcctggtgcatgaagcgttgatagtccacagtggtatgcaccccgcgtcaacccggcgcgggggccaaccactcacacacgcatggggaaggtgcgaagccactgcgcagcttcccctccttaccgaaaggaacgccaatgaatacccctatccccgtcatcgtcgacgggcaggccggcatctttgcgcacagcaaggctcgtgtggccacgctgaacgccaaggcgaaagaacggctatgcctcatggacgcacgcatccgcgccctcatggctgagcccgaagaaggcgcagccactgcggaatacgcagtcgtactcgttgcggctacaggctttgcggcggtgctggtcgccatcctgaagtcggatgccatcaagacgttgctgaccaacatcatcaaacaggctctgaaagtcgggtgacagccatgaagaccatgagatgccggtggaggctcgccagactgccgccagacctatgcacgggatcggccaccgccgaattcgcgatcgtattgcccagcgttatcgccatcgccgggctgatactggcaatgggacgtgtggtcatcgtttccatggactgccaaggtgccgcgacggcggctgcacgcgagtttgtggttaccggtgacgaatcatccgcgcgcagcatagctgcggacgttgccgggggagatccccgcgtcagcattgcccacaacggccaatcgacgagcgtgatggtcgaatgttcggtactgcccggtccactggatgtcactccaacgcgggttaccggcaacgctacggcgataagccaataactggtcggctgctggctgggcggccgcaatagaaaggaattgcggtgcagggaatgcgttatgaggagggatcgggcacgatggccggagccatgctggttatggcggtgggcattgcgctcgcggtggcggcaagtgtgggcaacctcatgatctgccagaatcgagcgcgttccctcgccgatctcatcgcctttgacgccgcgtatgcgctgtggcatgtggatatcggtgatccatgcgcgcttgctgcaaacatggctgaagcgaatggcgtcacgctgggctcctgctccgtgcgggatgaagacgtgttggtaaccatcaaggtggaaaccatggttccggtggcatcatccgtggagcggatggctcgggccggaccggtgaattgtacggaaggagacaattatcacaataatggaccgtaagcactgatgctctggcgggcttctggacctttggttaaggtgagagcatgagcgagagtgaacgcacagaacgccgtcgcgtggtggccatggtgggcaatcccacttccgataagggccgtggtgccaaggtggatgcgcgagtattgggactgctggaggacgccggccgtgcccataacttcgacgtcatcgacatcaccggcgtaagtttcgacgattccctgaaccaggcgcgtgaacgcgcgcacgagtacgactatctggtggtggtcggcggcgacggcatgatcgcactcggtgccaatgccgtgggttgcggcggtaagccgttgggcatcgtggccatgggctcgggcaacgatttcgctcggggacttaagctgccggtcaatcgcatcgaaaccgcagtggaaggtatcgtcggcgctatcgtgcgcggatcacacattgatgtggacatgggacgcgtgacctctttggatggtggctatgccgtgaacccatccaccggcggggaatacgagtaccgggagaacaagtctgccgagcacccgattgaccggtactatgcgggcatgctgtcctgtggtcttgacgcaagtatcaacgaccgtgcgaatcattcgcatctgccgaccggcaccatgcgctactttgcggcggtgctggtggagctgacgcatatgaagcgttatgggtaccacgtcaaggccacgctggcggacggtaccacggatgaacgagacatcatcacgccgttgctgacgattgcgaattcgcgtcatatcggtggcggcatcgaggtctcaccgtactcctgcttctccgacgggctgttggacctggtgtggatgaatcatgtgccgaacttcggcgaatgtgcggtggccatctcgaacgcctataacggcaagctgctcgcctcaaaggtgttcgggtggaagcgcatacgcgagatcgaagtcacgcgagccgcagaaggcgacgagccaccggtgctgatggcggacggcgaatacatcgggcatctgccattcagggtagtggccgaggactgcgcgctacgcgtgctggtaccgccggccgtagccgcccgtgaggtggactcccgacaggaagtgctcgacgccatcgcccgagacggtcgcgaccccgtaaccggccagttcgcctgacctgattatattggctcccctcattaggctgagccgtaaagcaaacagcccagtgggatgtttgtaggcgagggttcgacgatagtcgaaccagaagaaagtcagccgtaggctgtccgcaattgcggacgagctggccgcgaagcggactgaggggagtgcgggagagcggtaccagagccaatggccgtcagacctcagacgacatagctttcgatatgcagcgtctgcgccatgacctctttgatggttcggtcgctgatgttcggatgcgagcgaaccagcgagataagccccacgattagcgtgaagaatgtctcatggacgttggtgattggcagaccatgcatctgctcgaaatcacgtacggtggtctgggcaatgtagtcggcaatacggtccgccgcgcggtcaatgaacttgatatacagttcggcgttgccatcttggatcatacggtttgagaaggggctctcgtcggcgattagggaacggagcacatgcacgatgtcgtctaatgccttgttcacgttgcctgtttcgcgcgcttggttccactgcttcaacgtggtgaggatttcgtcgatgacgtcatcgagtactgcgtcggctacggcttccttgtcttcgaagtagtggtagaacagcgaacgcgtcataccgacttcgcttgcgatgtcggaaacggtgattttggagaagcctttttccagacacaccttgcgcgcggcttgcacgatggcgtcgcgccgggcatcgccacgggtggggcgtttctcgtcgaggatatcgctcatgggcacctcctgactacaaccgttattgacactatgttaatacaaagaaagcggttaataacaataaaaatgcggtaaccgttgtcagatgaatgtcgttggaatataaagagttttcccgattcggcagctatgagcccggtttatcttgactttttatcggttaattctgagggcaaaggtaggttagtagctatggcacttgcactgtatcgtcgctatcgtccggacaccttcgaaggggtcatcggccaggaccaagtcacggtcccgctgatgcgcgccttggacgaaggcaagcttacgcatgcctatctgttctcagggccgcgaggatgcggtaaaaccagctccgcgcgtatcctggcccgttgcgtcaactgtgccaaagggccgacttcccacccctgcggcgaatgcgaaagctgcaaggacctggccaccggcggtccgggttccatcgacgtggtcgaaatcgatgcggcctcgcacaacggtgtggatgatgctcgagaattgcgagaacgcgctggtttcgcccctgcgcgcgaccgctataagattttcattctcgatgaggcccatatggtcacgcagcagggcttcaatgcgctgcttaaaatcgttgaagagccgcctgaacatgtgatgttcatcttcgccaccaccgaaccagacaaggtgatcggcaccatccgttcgcgcacccaccactatccgttccgtctggtgccgcaggaagtcatgggtccctacctggagacgatctgcgacaaggaaggcatcaagcccgagcccggtgtgctgaaactggcgatgcgcgccggtggcggctccatgcgagataccctgtctgtgcttgaccagctgatggttggttcggtcgaaggcgttatcacccatgatgccgctgtagccctgctcggcttcacgccggaggcgctgatcggtgaggcagtggatgcggtaatcaatcacaacggcgaagccctgtacggcgttatccagaaagtcgtggtcggcggattcgatccgagacgattcgtcgaagacctgttggctcgtgtgcgtgatctgctggtgcttacgttggctggggaccgtgcggaatccgtgctgtctgacacggccgaggccgaggatatggacgacttgcaccgtcaggccaaggcgttgggcctgggagccctgaccgccatggcagacatcatcaacactacgttgggtgccatgaccggagccatttctccgcgtatgcgcttggaactgctggccgcgcgattgttggccggcagtgaatcaggctttgcaacagccgctcccgcgccagcttcttctggcatgccgcctgcggctgcttcttcgacttcgactacgtcagccgcttccggtgcgggtgccagtggttttgccggctcatcgcgaggcgggtttgccggagcctcacatggcggattctccggtgctgcacgcaaccagcaagcagccgcgcctcagagcaccgcttcccatgaatccgctgtgggagacaatggccctgtcagcagcccagtcagcgaccggcccgcgggctctccgtctgcgcaacctgccgcagcaactgctgctgccaatgcctggggtgctcccgccacgtcgccggccgtcccggcccaaccggtgacctcgcctgcggcatcggataatcggtccatcgacgaga

SEQ ID NO: 2366 - DNA, 11593 bp, Unknown
  R50_10m  MAG No. k141_2191
gcggcacaggtgaccaggccgactatgccgagcatcgcgccgcgctgttcaagtggtgccttctccagaatgatgttggtgataagcggcagggagatgccggtaccgagcgacatgaccagtcgggcggcgagcagcatcgggaagttgaccgcgagcgcgcccagtaatgtgccggcggtgaaaatcacgatggccatgatgaacagtgttttggtggcgaatttgcgcaccatgaacggcgagctcggaatcgacaccgacagcaagagcagataaccggtgacaagccactgcaccaccgaggcgccgatggagaactcctccatcggcgtggagtaggcgatgttcagtgacgtttccgataggatgccgaggaaggtcaggatcgcgagcgagacgaccgcgatgacgagtttgttggagaccggttgcttgccgccgttaggcagctgtgttgcggaatgagtcacgatcttgttctctcctccattcattcagatattctgactacgacgttggaagtcttcctgcatgagtcgcagagcctcggtcaaggtgcgtaccgtggtttcgcactggtccgaggtcaatccgcccagcagttggctcaaatgcgcgtgatattcctccacatagatgcggcggatatccaagccgcgttcggtgagcgtgagcgtcactgcacgccgatcggcggcatcggcgtgtttgacgacgagtccgaggtcggccatttcgccgacgagcttggtgatgctcggcgtagtgacgccgaggaatgcgctgacgtcgcccacgcgcgcggtgccggtatcttgcccattcggttcgttgatatgccagacggcgtcgatcacgtggacatagcgcggtttcatacctttcggcaatgccggcatcagttcggtgatggtcttggccttccagcagacatccaggaggctccgcacctcatccaccggaagcaagccggtcttggtatcggttcgggaatcgcacatcgctggcccaacctccaattagttaccaatagtcattaccataagtaactatatgcaggctctagacaaacccaacgacctgcgcgcccgtgtcgagttccgtttcggcataaaaaagccaggggatccctggcttgcaatgcacatatcgctgcaggtttgccgggacctatatgttcccggcaacaacagccgtatatacgttaccgatcagtgctgccctcatcatccttggcacccgccgtggcagcctcagcctccttggcgttccacccggtgacggcattccaaccactccatccgatgaccactagcaagcacagcgagaagacaatagtggcccaattgaacagcgagccatcgttattggcctcgaccagtgactgccagagccagataacgcaggccaagcaggtcaatgcatacatacgggaggtggagcgcgcggtgagtttcatggcggaaaaagtcctttgattacaagaatgacggcagataacagtgtgggatccgcaccagcggcaccggcacgaatcccacatcgaggaggagaaaggggaaggtcagctcttcttgcgcttggatatgatgtccacggcgacggccagcaggagcacgaggcccttgatggtcttcaccacggcggtgtcaacacccataatcgacagaccctggttgataacacccatcacgaatgcaccaatcacagcgcccgggatggtaccaataccaccggtgacggccgtgccaccgatgaagcaggcagcgatggcgtccatctcgaactccataccggcctgagcagttgcggaagccagacgggaaagcatgcagacagcggccactgcggacaggaagcccatgtggacgaacagcaggaagtccacgcggcgggtgttgataccggagaggatggcggccttgcggttgccaccaacggcgtacacgtggcgaccgaacacggtcttggtcaggatgaagttgtagatgaagaccagcacaccgacgatcaccagcatgatcggggtaccaccctgatcagcgttaccggaggaagccagcaggtaggtgacgaaggcgatgacgaccgcgacaagcacaatcttgaggacggtcaggctcatcggctcgggcaccaggccgaccttggccacacgggcgcgcttgcgcagctggctccaggcaaagccgacaatgcacaggatgccgagcacaatggtcagaccgtcgaacggaccccaccagccaaggatgttgggcaggtagttacgggcaatgccacggaattcgagggaggtaatcggcacggattcgccgacgatcacggtggcgagaccacggaagatcaacatgccggccagagtggtaatgaagcccgggatgccgatgacggcgacccagaagccctgccagacgccgacgatcaggccgacgaccagagcgatgacgatggcgagcatccagttgactccggcgcgttccatcagcagtgcacacacaccaccgatgaaggctaccaaggaaccaaccgaaaggtcgatgtgggtggcgatgatgaccatcaccataccaatggccaggatgatcacgtaggcgttctgctggatcagggacacgaaggagttcggcttcagcagcacacctccggtcaggatctcgaaggccacgacgatgatcagcagtgcgccgacaataccgtattgacgggcattgttggcgaccgtggccagcaggccggacttttcttctttctttgcaggtgttgcagttgcggcgctcatcaggctgccacctccctttccttggtcatacccttcatcaggtattcctgggtaaatccattcttctcgacattgtcggtgacgacaccgtaggacaccgtgtaaatgcggtcgcagataccgatgagctcaggcagctcggaggaaatcacgatgacggccttgcctgcatcggcaagcttatcgatgatttcgtagatctcatacttggcgccgacgtcgatgcctcgggtcggctcatcgaggatgaggatgtccggctgcgagataacccacttggcgagcagcactttctgctggttaccaccggagagggtggagacattcacatcgatgtcatgacacttgatgttgaagtccttgcggtactgttcgacttccttgcgctcaaggttgtcgtccacaaccccgcccttgctgatcttggtcagggaggccagggatgcgttctctcggatgttctgcagcaggttcagaccgttgcccttacgatcctcggtggcgtaggcgagacctgcgtcaatcgcggactgcacgttgggcatcttgacttccttgcccttgacgaacaccttgccggagatgttggaaccgtaagagtggccgaagatggacatggccatttcggtacgacccgcacccatcagacccgccagaccgacgatctcgccggcgtgcacgttgatgttcgcatggtctacgatcacgcgctccgcgtcgagcggatgatgcacggtccaatcctcgacgcgcaggtattcctcgcccggggtattggaggggtggttcgggtacaggttgtgcagcggacgacccaccatcttgcggatgagttcttcctggtcgagcggcgtctccggcgtcacgtacatcacaccgacggtcgaaccgtctcgaatgatggtgacattgtcggcaatggcggcgacctcgttgagtttatgagtgatgatgatgctggtcacgccctgctcgtcacgtagctgacgaaccaggtcaagcaggtgggcggaatcctcatcgttcagtgcagcggtcggctcatcgaggatgagcagcttcacgtccttggacaatgccttggcgatttcgacgagctgctgcttgccgacgccgatgtccataactctggtatccgggtcttcgggaagtcccacacgatcgagcagcttcttcgcctcggcgcgggtcttgtcccagtcgatcacgccacccttggcctgctcgttgccgatgaagatgttctccgcaatggacaggaacgggctcaacgccagttcctgatgaatgattacgatgccgtcggcctcggaatcattaatagtatggtatttgcattccttgccatcaaaggtgattttgccggaatagctaccgtatgggtacacacccgaaagcacgttcatcagggtcgatttgcctgcaccgttctcgccgcagatggcgtggatctcgccgcgatcgacggaaagattcacatcggtgagggctttgaccggaccgaacgtcttcgtgatgttttccatcgtcaagatggtgtcatttgatgacatgtcatcactcctcgtcacagttctgtgttcatggacatgcggcgcatatcggctatgcgccgcatgtcattgtgtttgtttacggattgcctgatgaggactacttagtcagctcgtcgaagcgatcctgggtgatgtagttggccgtgaccagatcctggaggttgtccttggtgatgttctgggggtcaagcagcttggacgggacgtcgatgttgttgttgttgaacttgccgttcaggccggagacttccttgccctcggcgatctcgacgaccatgtcgtacacggcgtcagccagcttgttcacgtccttgaacacggtctcgccctgcttatccttggcgatgttggcaactgcgatctccatggcgtcctgaccggtgatgtacggccaggagtcggtgcccggcttcatgtcgggacgcttggattcgatggcgttgatcacaccctgggcgatgccgtcgtacggagtgaggaccgcgtcgagcttctcgccgtgggcgtaggtggagtcaaggatggattccatgtccttctgcgcctgctcggtcttccagctcatcacggagatcttctgccaatcctcaacggtgaagtccttggtcacgccaccctgaccgtgctgggacggggagacgagcacgcccttctcgaagtacggctgcagcagatcccaagcgcccttgaagaagtacttggcgttgttgtcatccggggaaccggtgaacagctcgatattgaacgggccggtggcgccatccttaagcttgagctggtcaatgagccacgtggcctcgagcacgccgacctgctccagctggaaggtggcgtagtagtcgacggcgtcggtgttcatgatcagtcgatcgtaggcgatgaccttggcacctgcatcgcgggccttctcaacggcggggcccactgcggtgccgtccttggaagcgaccacgacgatcttggcgtcgttgttgaccatgttctcgatgtcagcgttctgctgggccggcttatcgtcggcgaaggacaggatgaccttgtatccggccttctccagcttggccttcaggttgttgccgtccttgttccaacgctcttcggacttggtcggcatcgaaatgccgatagtggcgcccttttcgatcttggcatcaccgccagttgcctggccgctacggctgccaccgcaggccgcgaggcccgcgcacatggcaacgcctgccaccacggcgacgatcttcttagtgaacttcatttgttctccttcatcttcgaggggatggcgaaccctccttggtcgcccgaacctgagaataacctcaggttcatctcatagaataccgtattgagttaagttgtcaaactcaagaaagcgaatttcctgtcgtttatgttcgaccaatgaacgcaatggcgatttttcgcgcatcacaaggcgacacgccgaaaaatccacgctctgcgcctcgctgtgcctcatgccggtaacgactacactgaactcttatggcaacaaggcttttcggttcgcagacctcgcttcgcgaggcaaaccgcgccaacttgctggccagcatccacaagttcggcgccatgacacaggtcgaactggcagaggtgacaggactgtccactgcgaccgtgtccacgctcgtccatcagcttgtcgacgaagaccagctggagaccaaaaacaccgttcgcaacggtcgcagagccactctggtgacccttgcacggcatcagggcctcggcgtcgggctttggatcgcgcgacgtcatcttacgctttctatcgttgacttctcgaagtcaatcatcgctgagcacacgctccccctgccgttgggccacaaggcggacacaacgctggaacgcgccatgctgctcatcaatgagaccctgagcagcatcgacgccgaagccagcgagctggtcggcatcggcgtggccgtggccgcaccggtggccaccagcgaccacaccatagcgattcccggcattctgcccggatgggacggcgtcgatatcacggccccgttgcgcacggcgttcaacgttcccgtatacgtcgataatgacgcgaatttcgcggcatacggcgaatcccgtatgggcgtggcggcaggcaaacgcaatttcgtatatatctcagccaacgacggggttggcgcaggcatcgtcatcaacggcgaaatcatgcatggcgtgaccggcctggccggtgaaatcggccatatccaggtcgacccgctgggtgccatctgttcgtgcggtaaccgcggctgccttgacaccgtcgtggcggaaaacaggctggtgcagttgctcagcgtcacacacggcaatatgacgctggatgatctggtgtcctttgccaacgaaggcgaccccggttgccgtcgcatcatcgccgacacggccgtgcgtatcggtcaggtggcggctgatctgtgcatcagcgtggatccggaggtcattgtgctcggcggcaagctggccatgaccggcgacgtattcatccaaccgttcaatgaagcgttgcagcgcatgctgttccctgatgccgtggcacccatcgatgtactcgtgtcatcccacccgaacgacaactgcgcgctaggcggcgcattatgcgccatcgagttctcggttcgcaatgacgtcagccagtgaccggtaccaggagaagagtgagaagaaggaacacaccatgaggaattcgagcacacctcctctgctgcggctggaggacatctgtgtgaagttcggcttcgtcgaggcgttgaaatcggtgaatctgtccatccaacgccaggaggtcgtcgccatcgtgggcgataacggcgcaggaaagtccactctgatcaaggtcatcgcgggatttctgcagccgggattcggccatatctatctcaacggcgaacaggtgaccattccctcgatcagggaggcggaccgcatgggcatcgcatcggtgttccaggggcaggagttctgcgacaacctggacgtggcctcgaacctgttcctcggcaaggagatcaatcagattggcatacgcgatgacgattcgatgaactcgcgtgcccgttccgtgctgaagaccctgagctcggcgattcgggtcggctcccctatcgcatccttatccgtcggccagcgccagaccgtggccatagcacgcacgctgctcaatgacccgcagcttattctgctggacgaaccgaccgccgcactgtcggtgatgcagtcggcggaagtgctcgcatatatcaagagactgcgctccgaaggccggtccgtggtgatggtctgccacgatctgccggatgtgttcgcggtatccgaccgcattgtcgtgatacgtcaggggcacgtcaccggcgtgcatcgaaccgtcgaaacgtcctatgaggagattatcgccgaaatcgccggcgtgaccaccgaacacgagtacgaggaaatcgctgagaacccggaattcgattccatggtcaggcagcggaaactcatcgaccgcactatcagcgcggcagtgagccatggcaccggccatgactcaccattagactaacgtcccgttgccggagcgacatcgtcagcgcagagccaggttggccgcgccgatcagaccggcatcctggcccgcagtggccgcgacgatcttggcatggccgcggtaggcgctgccttccaggaaacgctggtagttgtagcgggccggctccagcaggatgtcgcccacggccaccacgccgccgccgatcacgaacaggtccgggtcaagcacggcggaaacggcggccatggtgcggcccagccattcgccgatcttgccgaacgcatacaggccaagtacgtcaccttcctgagccgcttgggacaccatcggcccctccagtttggtgatgtcgccgccgcacagttccagaagacgcttggcgtcctgaggacgacggcgcacggcggacttggcgaagttctccagcgaggttcccgaagtgtaacgttcggcgcagccgcgcaggccgcagccgcagtggtcgccgtccgggaccatcggcaggtggccgagctcggcggccatgccgaaggagccgcggtagagctggccgttgatcacgatggcaccgccgaggccggtgcccacggtcagcgcgaccatgttggagctaccctggccggcaccgtgcacgaattcgccccatccggcgcagttggcgtcgttttcgacgatgaccggcacggcatggtcgatcagcgcgccgacgtgctcggacagatcgtagttgatccatgccggaatgttggcggagaaggtgagcgtcttgcgatccgcgctcacattgccggcggcggagatgccgacggcctcgatatcggtgtgcccggcggccacagcctcgcggtacacctcggcgatgtgctggttgatggcgtcggcgtccatcggcgtggggacgcgccagcgctggatgatgctgtcattttcatcgcagacggcggcggcgatcttggttcctccgatatcaatggcgagcgtggtcatggcttactccttggagactttcgtaacgtacgagatagcgaaaatagtagtgagccgccatgacctcccaccgcggtttttccgtggttcgtcatgcgtcgcgaacattccgccgatgcgcttcctcatgcatttcacccgttgcaaacgggcgcccccttaacgccggcatcggtgcggacggcgtgtcgaatcggatgcaatcactttcaccgtccttgcggatggcatcgaagaacggcaggaaacaaaaaaactcccgacaggcatcgggagtttggtggcgaccccggccggacttgaaccggtgacctccgccgtgacagggcggcgctctaaccaactgagctacggggccgtgcgtgcctcgctgaggcacaagaggatatgttacagcatcatcggattacgacacgccgtctgatacatcgttccttccaccggcgaaccgaccgcaggtgtggtggacggtatgcggaccatatcgttcgaccgcgcacgaccgcactccccataagacagtagccgtcatgcgtcaacgcacgttgtgcgacaacgcggcacgacgcacggccaccgaggccagcaaaccgatgaacagcatgatgccggcgaccagaagcgtccactgaccgccttcgacgaaccctgaagtcatcgcatcggcaatcttcggcgcctcgtcgccgaatcgggccgccggtccatcaccgttgcggaacacgccgatcactccacccgccgaaccgctgaccgcttgggccagaccgtcgccgaccttggcgggcagcccgagggattcgagccgcgccggcaatgttccgttgacggccatggccaacgacgcgccggagatggccgaaccgacggcggtgccgagctgccgaaccgtggactgggtggccgacccttcgccggactgcatgatcggcacttcggagagcaccacgctggtcagctgcgcggaggcgaagcccagacccagaccgtacgcggccatgggaacaagctgccaccacaccgacaatcccacaggcataaggaccgcgaccaaggcgacggcgatgatctcgatcacaagaccgagttgaatcacgccggccggggtgagcttggcggccatgacatgggcctgcgcacctgcgacgatggaccccaggcccatcacggccagcatcgcaccggcctgcagcgtgttgagcccgcgggcgttgatgaggtacagcggcagcatgaacaccagcgcgaactcgccggcggcgatggccgcggccgccagattaccccacgagaacgtcctgatgcgaaacagggtcatgtccagcatgaccggccgaccggctttgccccgcgcggattcgaagacgatgaagacggccatcagaagcgcgccggcgatcaggcagatcggcaccggcgacaaccagtcacgattccagctcaacccgccgagcttcaactgcgttgaggtctgcttccaccaaccgtaggtctcgccttcgataagaccgaacaccaacagggccgaggtcagggcagacaacaccacgcccgggatatccacaccgacgcgacgggatcggacatcctgcgcggcatccgcggcaccggcgaccgaggcgttcccaccggtctgcggcaccaggaagatggccgacacaaagaccgcgatgcccagcggcaggttcaccaggaagatccaacgccatcccaaggtctcggtgaacacgccaccgagcagcggaccaagcgcggcggccgaactcatcaccgcgccccagacgccgaacgccgcggcgcggtacttgccacggaacagggcggacaccgtggacagggtgttcggcatgatcatcgcgcctccgatgccctgcagcacacgggcggcaagcagcatctccgcaccctgcgaggcggcggcgagcgccgaactcgccacgaagatcacggtaccggcttgaaacaccagtttgcgccctctggcgtcgcccaacttgccgaaaggcagcaacaacgcggcaagcacgatgttgtagagcgaggtgacccactgggcgtcggtcaggttaatgccgatgtcgtcgatgatggtggggatggagacattgacgatcgagctgtcgagcacgatcatggccaatcccagggccatcacccacagcgcgccccacggcggcgcctgggtgggcagcggcgacgaggccgtcggattcgttgaagagatcgaagacgcatcggcctgagtctgatgctgagatcgggatgcatgatccataacggggtttcctctcattgccatgattgcggcgaccgacacgcctatgcgccattcacggtacatccgcggcctagaccgtctcaccggatttcgcgggacattccgggcgttcagccatgggcgtaacctcggcggatcactgaagagaggagcaccaaagacggccgcactattccagatgcgtcatttcgaaatgaaagcccgacagaacgccggaatcgcaacgatcgacaaatcgccagacgatacagggccgggctctcgctcaggaaacagggcatgcccagcgcccatttaccggcgtcggcattgacggcatcgccgccgccttccacgtctcctcccgatgaccgaatcgctaattcccgcccgccagaaccccattgcatcgtgtagacgggatatgggataatccacaa

SEQ ID NO: 2367 - DNA, 10129 bp, Unknown
  R50_10m  MAG No. k141_2256
ccggcaacaccgcgttcgaggggctgattcggccttcgcaggaggtctactcccgtttcaaggggctggtcggcagctagaccgcatgtaaaagcccatccgcgtcaacgccattccgccgattttggagcgtgaatacttcggcatcagcccctcgaaacgggagtagacctccgggagagaccaaatcagcccctcgaaacggagatagcgcttgccgcgccctccttgtcaggctttctccgttcaaagaggtacattcgggcttctgcagaatgctatcttcgttcaaagaggcaccgaatacgggaaaccccgagtacaaacgttgtcattgcaacgctcatactcgagatttcagagttcaggcacctctttgaaggcagttagttgtccgcaaggggccaaatgtacctctctgaaagcagataccccgtctcaggctcgaatcggctaacctgcgtacccgtgtgcacaccttcacgaccgcagcgtgctgagcatgccggccacttcagcggccgtcacgctgggcacataggcgcgcaccaccgcgagcccgatctgcggcaacgccgccgggtccgggtagcacacgtagaccggcgcctcggtgggctggaacttgcgcttgaagttgaacagcgagtggaagccgtaggcgggttccatccagtcggccacgatctgcagcgcgtgttggagcacctgcgtgccttcgctggccggtgccccgtcctccccggcgttgtcccgatcgggattcatgccggccaggggcgccgcggacaggctcatgaactccacggcgtgcgtgggatcggcttcgccctcgtcacgcagccgctcggccatgcgcgcgatcaggaactccatgatgccgttggggctgtcggtgcgatggcgcatgaaatccaacgtccagccgacgatgcgcccgtcgcgccaggtgggcaaccagctggtgacgcccagcacgcgcccgtccgcgtcgatggcgtaaagcagccgcacgcgcgggtcgcgcagttcctcgacgccgccgagcgtgaacttcatttccggcagcgccttgagctgcgcccactcctcggagatgtcctcgatctgttcgcgcacatcgagcgacgcttccaggaatgtggactgcacgtcggtcacgccgtcgcgcttggccttgttgatggcggtgcgcacgtcctgccatttcttgccggtcgtcttccagccgcgcgggtcgaccaccatttcgctgccgacctcgatggagttccagccggcttccagcaacgcgtcgcgctgttcccgatgcacgccgtagaacaccggcgacagcgaacgttccgcacagtgctgggagaaaccgttcagatcgtccatccattccgccggatcgccgaacggtccggtgcaggtcagggcgatgccgttgagcacgcgatacgccacggccgatctgcccgtgggggacagccagtagctgttgccttcccacgtggtcatgaagctcatcgattcgccgccggtttcgaccagacgttcggcgcgcgcccgggcccgctcgttcgattcgctcacgtcgcccatccagtggatcaccacggccagcaccacgatccagaacaccaggccgacgccttggtacatgatcgaggccatcggagtgcgcggcacgaacgacagcttcatatggctcaggaagccgatgggcaggaagcgtcccggcagctcggccagcagcgacgaggccgtagcgcgtggcgagaaggtggcgggttgggcgatgccgtatatcaggtatatggcggcgcacgccagccaggccagcacgatggcgccgatgccgccgaccagcctgcaccagccgatgcggatcgggaagtgtttcatcgccgccagcagggcgatggcgaacagcagcgggggcaggacgttcgccacgcaggccacgatcgcgccgtgctgcagcagggaggccatgccgtccggcgcgaagctcagcggcacgaccagatagtaggcgacggcgatggccaccgtgaacaggttgatggccacggtgcagatggccgcgaaccgacgtccgcgatacaggccccacgccagcaccagggtcacggctgtgggcagcagcgagcgcagcaccgcgccgggcatcgaggcccgcaacagatcgaactgcaggaagcatccgccgtgcgtgtcaccggccaggcatttggccagcatgccgttgtcgacggaaaccgggctcatgagcaggccgatcgtgctgagcgggcccgcatggttatgggaggtgatggcgatgaccggccccagggccagtaccacggcgatggccgcgaatatgcgccgcgcctcgaaggaggtgctgcgcagccagtgccattcggcttcgacgtgcgcgggcggaccggccatcacacggccggcggcatggccgatcagcgcggcggcgagtatgcagtagccgctggggttgccgctgtagagcaacgtgaccaggaccgccacatagccgacgagtcggatgcgcctgcgccataggtggctgcagaacgcgctggccgccatgagcgcgccgaccggcaacaccagcgggctcaatgcgaaccgcatgcgggagacgaacagggagtcctggaacatccatccggccgccgcgcacagggtcaggcccgccagcacgccgccggccgcgcaggcgagcgcggtgacgacggtgcgcacacggccgagccatggttcggctatcgacagcatgacgagccacaggacggcgtcgaccatgagttggatgacgccgcgcgccaggaacagcgagcagatgagtttgccggcgttgaatgcggccatgctggtgctgagccgcagcggaaacgcgaatccggccatcgcggccaccagccacgccaccagattcagcgccaccagtgccgccgtggcggtgacggccagccggtggtcgtccgcccactgccgcacgtcaccggccagttcacgccagctttccgccgcatggctggaccttgccgtatgcggtttggtggctcgggaggtcgtggtgggcttcgtccgcgagggttccgcgtcccgcaggggccgccgcgtctgcggcatggccgccggccgcgcgttcccatgctgttgttcttcgctcattgcaacacctccacttgtgggtattcctccaacgatttcgtcatttcgcccagcccggttcgcgcgccgaaccagtcgagaccggggttccagaccgcctgcaccgcatgccagtcatggtcggcgccgggcacgaccagttcggtggtctccatgccggccgcgcgcgcggccgcggcgatggtgcgcatgttggctaccgacttccgatcccctttgccggcgccggcgaacagcgcctggccggccgtgccggtggcggcgatggcgttgaccggcacctgcctgtcgtaggccttgcggtcgccggcgaaatatcgccggaccatcgtctcgacgctgccgtcggtcggctcgagctcaccatccaccggcagcatcgcaccgtagatgtcggggtgacgcggcaccagctgcgtggtgcaggtgccgccttgcgagaatccgcccatcgcccacatacgggccgacttggctaccggcagcgtcgccctggcccagttcaccacgtccttggtgaggtaggtttcggcgttgcctcgggtggtgtcggcgcacaggctgttgtgcatggccgaaccgttctggtcgggtgcgagcacgatcggcgccagcccgtcatgttcggcggcgtaagcgttcatcgtggcggcgatgttgccggcgtcgatgaggcgaccgggactgcccggctgaccggcgagcagctccatcaccggcagggccggcgggcggtcggacagcgcggcgggcggcaggtagaccatcgccttgcgcgccttgaacttggattcggtgttcgggatgctgacgacgaacaccctgcccgagtcgggcatggatggcagagcgtccttgcgcgccttgtcgcgccactcgccgacgctcatcgaggctttgcgcacggtggccgaaccgagcggggggtatggcgtatagccgacgagattgccgatggtctggtattcgccgtagatcgagtccacgccgagcgcggtggacgccagcaccagcggcaccagcacgacggccagcgcgcgacgggccccccgtaacgtcacggcggcggccagcacgaagccgaggcccgcgaagcctcccgcgacggtgaggatcaccggccagcccaacgatacgccgaacaccatgaacacgtcggacatcagccatgtggccagtagtccgcccgcgccggcgagcacggcggcggccagcgcggcggccagcggatgcaagtgacgacgttgcggcgtacgcaggccatgggaaataaacgtctcttccgtcgaagctgcggatgacgccgtagcagccgcgttcgtaggctggttggccggctggttatctgggtcgacgggcgattgggccgacgattcgccgtccggcgccaggccgtctgctgccgggccgcgcttcttgctcaatgccagcccaacaatcagtatgattgccacgatcgcggtcagtccgaacacggtccacggcacgattccgcggaccagcgacaattccatgaacgttttccaaacggagttcttcatccttcaccccccgcgctccaggctcctcgccttgtaagctcacgcaacactagcgcgcgattcatagagcgtcacccaatttcacaaaaattgtcgcgagttctcatggtttccccagactccgttcagctcctgttcacatccggcctggacgtccgcagctcaaggccagtgtcggcgctggattagcggtgcgcaggcttgtcccagctttagccggaagcagggaatatgttggtggatatgactcacgcaaacgaacaacgtccagcagcgaccggcaatgtcgccgataacgtgtctgacgcccctactgaccccgcgacgagcgcggcggcaaggcccacgaccggcacggctgatggcacaacagccacaaacgccgcggccagttcaacagcaaaacccgcagccagcacctcttggaccagggaaaccaacccacgtcgagcactgttgacgattatcgtcacggtggtggttgtggtggccatcgtactggggctcggattcttcgtgaactggggattggcggccctttcggtgatcattatgattccgggggcgatttcgctggccgttctcgccaagcaccctgaatccaccggcgggcgcagcatgttcggcatctccgatccgaatacgctgcttgacccgattcgccgcccgtccgagcgccgcggcgagtaagttgctgctgcccatcgggcggtaatttacccatggggcggtaaaaggcccatggggcggtttgaagaaattgtgaaacggcagaataaagccattttgggataccgccccatgagggttttaccgccccatgggattattaccgccccatgagcaaagccaccccgctatttgcgcgcactgaccaagtaattgagcaccgatccggcggccaccagcagcgcgccacaccaaaacggcagcgacagcgccaaacccagcagcaccgcaccggccccggtggacagcaccggcgtggcataggacgcaatagccagccgctccatagacccatgcagaatgccatagccccagcaggcataaccgccgccaatcgccgccgcggcaatcaacacaaacagccatgcgaccagactcggcggctcggccggccacccctgcccggacgcgaagtggataatccacaacgccacggccacgcaggggaagaacaatgaagtgccgtccaccccatgactcatggctggcgtgaacaccgcgtacaccgaccaagcgagcgcgcccgcgaacgccagcgcatagggcaaagggttggcggcgatatgctgcacggccgcatgccagtcgagcccggaattaccgccgaccgccagcaccacgccggcagtggccacaatcgcgcccggcagcaccttgacgaccgcgtgcttgcgatgggatacgcccgccgacagcagcaccatcatcgtgggccacagatagttgaccaggctcacttccaccgaggatgcgtcggtagaggccagacccagcgagagggatatcgacgattcgtaaaatacgaacaacaggccgccgataatcaagtatttcttggggaactcgcgaatcgggaccgggcgccggaacatcagcagcaggatgccgccgaccgtgtagatcagggccgaaccaagcgtggcaccgaagttttcggagacgatgcgcacggtgccggccatgaagctccacagcaggatcgccatcaggccgatggtcgtggcgcgcgcggatacgacgtggccgccggaatggcttgccgccggtgccggtgtgccgcttgcgttctgtgcgccgttcgccatatgtccgcctctcttgcctcgtttcgaaggcattctactcatcggatgtgtacagctgcagaacggcacacgaccggcgcgcgaacagggtggggttcggtgattgaaacagcaaaatgccgggtagggtaaatccctactcggcatttgcattggctatgtttcccgccgtctgtcaggttagtcggcgttgaaagcgtagggcaggcggcgtgggaagcatggtttggttacgatttatctctcccccacccgcttcgcgggagctccctcgtcagagggggcaaagctactcgaagcgggacttcgggacgaatcaagtatcgtcagccctcaatcgcgatttggtgcttggactcgacttgcggctgggcctgcatcttcggaacctggatgcacagcgtgccgttccggtagctggcgtggatgtcggactccttcacgtcctcgccaacgtaaaaactacgcgagcaggagcccatgtagcgttcgcgacgcagccacttgcccgaatcggacgcgcaagcgcacttgctgtcggaagcctcgccctcagcggccggagccttgtcctcatgctcgctgcaacgcgaggcggacacggtcagatagccgttgttgagctcaaggttgatatcttccttcttaaagccaggcatatcgatgtcgacgtcgtaacccttgtcggtctcgcgcacatcggtggtcatcatgttggcaggcattgcggcactcatcgtgttgtccgtgttgcgccaaccctcaaagaacggatcatcgaacagatccgagaacatcgtgtcattcatcaaagccggaaacattgccataatcggtactccttgattaggagagaatcggcttggatgccggccgccaacccgtatcgcggggctagcagcggttatcgtggccggttccggaaccctcccgggctctcaacctttaaccttcacttcacccaattcccgagcgcggcaatcattccgggattatgcccacagagaaattgcggcggggaatggctgccggtaaagccggccgagccgagcgccgtgaccaccctcagccagtcttacggctgccagctcccgccagcgggagcatatatacgcacaccagtaggtgtactcatatacctctgccaacgggagcatgctggcgcgcgaacggctcacatctgccgggcgttttcgagcaaggcgtttttgaggtcggactcgatttggcgcatcttgacctgggcggcctcgcggttggccttgccttccttctggatctgcacggtctccttcagggtggcgatgagttcggcgttgatcttctccagcgtgtcgatttccaccacggaacgctggttggccttttccgcgtccaccgcacccttgtgcagggcggccgcgttacgcgccagcagcttgttggtcacatcgtcggccttgttctgcaggtcgagggccttgcgctggttggacaggcccagcgcgatcaccatctggctcttccacaccggaatcgtggtggagatggtggtgtcgatcttgtccacgatggtctggtccgcgttctggatgattttgatctgcggcgcggtctgcaaggtaaccacgctgatgcggtcgaggtcgtcgagtcgcttggcaaaacggtcgagcttggacttgaagtccttcagcacttgcgcctgcatggcgtcgccactggcggcggcctcggcctccagcgctggcagctggttggcgttgaagtcggcgagcgccttcttgccggccagtacggtcattttcagctcgcggtattgctgggcgttctgcgtgtacatcgtgtcgtacatggagatgtcggccacgagtttggcttgcgcggattggagggtggtgatgaggtgttgcatggcgtcgttgttgggcagttcggatacggccgggatctggtcgagcgtgccggccacgccgaatcggctgatcgaatcggtgccggcgaagttggccgcgcggaagccgtggcgctcccacgccagcttctgcgccgccggtgttttcaacaggttcagcagtgtgtcgcctttctcgtccaaggccatcagcgtgtgggtgctccacacggtcggcgtcgggtagacgatgaccacgtcgtccttgatctgcttgaacgcatccgtctggttcacggccaaatcaagcacatgtgatacgcgcccgaattgtccttggtcacaagtccgccgttcacgagcccgtccgccacggccttgtgcgtgtatagcacaatcggtgagttgaagacgatgtcgctttggggggccttgacgcctttcgcattgccgtattcgacggccgcgcgcgaggaggggaacatgtaatccatgcctttccggtccgcatccatcatggccagcgatccggccttgcgatagtcgatggcaatgccttgcttggcggcgagcgccttgaacttggcgtcatcgaacaggccgattttctcgccgcccaggtagccggtgatgctcacctgttcggtcggttcggccggcgctggttgcgattgccgccacaccagcgtgccgcagaccacgcccactaccgcaagcagggcgatcagtccgatgatttttgatttggagagtttcattgtgcgtccgttttctggtccgactggtgagccgggccgccagatggagtctgactgggtgcatgccgtccttcatcagcagccgaggaaggcacaggcgaaggtgcgacgtcgtcgtatccatccatgcgggccaaccgttggatggcgtcggagtcggccgtaatgcccaacgtcttggcgcttaccgcccggctgagttcgccggcggcggtctgttcgagcacttgcagcgcctcgatggtttcgattcgtaccgtggctatctgatcgcgtgcgccggaactttccacgtccacgtaggagcgcaacagtttctcggtctgctcgccgtacacggtgatgtagtggcgcaacgtcgggtaggcggaggtgtctcgggtcacgtattgcactcaatctttggtagcggcgatgaagtcgttggcttcggctttgacggctgggtcacgtacttgcttggtgagcatggcgatcgagttgagttgagcgttcgccgcgtcgatcgtatcggcggtcttctgaccgttgggcaaggcggaaaccagcattttgccgatgcgtcgctccggctcggtgagcgtggaggcggcgatatacccaagtgcggccagtaccacggccacgatcaggccgggcactccgccgccgaccagtccgaaaccgagcccggcgagcagcagtccgacaacgaatccacagattacctggagcatcagttgaagcccttgacttggcggaagacggcggcgaggtcgccggagcggccgtcgaataccttggcgttgctcagggtggcgagagacttcagctggctgggatcggcatcgccgaacagggttaagggtcaaaaagtgtgtccggaatcgcggattttcacggattgacctgtaggtttccggaaagtatatgctccggaagcatatatctagcccccgacgggaaatcctcggtgtggcagccgtgatgtgctatgcg

SEQ ID NO: 2368 - DNA, 25121 bp, Unknown
  R50_10m  MAG No. k141_2300
cctcgtcctcttcgatgtagtcgtcctcatcgtccacaacgtcgctcatgcccagataggacatcgcgtttttcatgaacccagccatggatcagtcctttcagcgcaggaaatcaggaatgtcgagatcgccggcgggatcgttcacggcgatgttcggatgcgaggtagtcggatcgtcaaagggcagggatgccgggtctgcggtcgtcggggtgaattccggacgcggagtggccacgggctgggcggccgaagcggcggcgggctgctgcgtttgcgtggcagccggctgggcggccggtacggcaattgccggagcggcggcagagggatcctgcggtgtaaccggatcgaaaccggccgcgatgacggtaacacgcacttcgtcgccataggcatcatccagagcaagaccccagatgatctgggcctcggggtgaatggccttgcgtacaagctcggtggcggcggaagcttcctgcagcttcagatcggtcgggccggcaatgttgatcaacgcgccgtgggcaccctcgatgctctcctcgagcagcggggagctgatggcgatttcggcggcctgggtggcgcggtcttcgccccgcgcggaaccaatgccgaacagcgcagtaccagcgccacgaagaatggagttcacgtcggagaaatcgacgtgaatgtaggaattcatcgaaatgaggtcggtgatgccctgcacgccggcgaggagtgcggtatcggccgtcttgaaggcttcgatgataccgatggaacggtcggaaagctcaagcaggcgatcgttcgggatgacgatcagcgcgtcgacttccttgcgcaggttgtcgatgccgtattcggcggaagcggaacgctgagggccttcgaagctgaacggacgagtaacaaccgcgatggtgagagcaccctgttgatgagccgcacgagcgacgatcgggctggcgccagtaccggtgccaccgccctcgccgcaggtgacgaacaccatgtcggcacccttcagggattcctcgatatcagactgatgatcctgtgcggccttagcacccttctccgggtccgcgccagcgccgagtccgcggctggactgatcggacagggagattttcacgtcggcgtcggagcgcagaagatccttcgcatcggtatttaccgccacaaattcaacattctgtaatccctcggcaatcatgcgattgacggcattaccgccggcaccgccgacgccaacaaccttgatgttggtcttgtcgttgaactcattctgcgcgatctcgctcacgtttggctcctgtcacttcacggttacacccaagagtagcgcaaacaggctactcttggagggaaattcacgcgcagaatggcgcgtgttgcgtgtattttcagtattttttcagtaactggcgtccattgggtcgtcaccgaagagcgcctcacgctcttcgtgggtggtggtacgcgattccaaccacccatacggcaagtgcaccttcttggcgaaacgcacgcggccgcgcggtttgtcgaccacgcgtggcgggtattcgatggtcgggtcgagcttgccgatctcgcggtccacatcggccaggctctcgcattccataaaggccttgcgggtggacccacccaccgggaaccctttcagataccaggcgatgtgcttgcgcagatcgtggacggccatcatctcatcgccctcatagaactcggtaagcagctcggcatgacggtgaatcacccggcagacctcgcccagattcgggttgagccgttcgggattgccctcgaaggcgtttttgatgttggcgaacagccacggccggccctgacatccgcggccgatggccacgccgtcgcagccggtctcgcgcaccatttcgagcgcgtcctcggcaccccagatatcgccattgccgaataccggaatgttgaggtgttccttgagctcgccgatgcgggaccagtcggaatgaccgccatagtattcggcggtggtgcgggcatgcagggttacggccttgcagccctcctcctgcgcgatgtgtccggcttcgaggaaggtctcatggttatggtcgatgccgacgcggatcttcgaggtgacggggatgcccgccggctcgcatacggcgaccacgcgctggatgagctcggtgaagatgtcggttttccatggcagggccgagcctcccccgcgacgggtgaccttgggtaccgggcaaccgaagttcaggtccacatggtcggtcatgttgccgtcgaccacgattttcgccgcctgttcggtgatggacggattcacgccatacaactgcagcgaacgaattttttcgcttttggcgaaatggcagagacgcagggctttcgggttgcgcgccacgagggcccgcgcggtgatcatctcggccacgtaaagaccatcgggaccgtattcctcgcagatcacgcggaacggccagttggtcacgcccgccatcggcgaaagcaccaccggggtcggcacggtaatgttgccgagctgcacgggggcgatgtataccggagtctcgggccgtgccggcgcgtccgtacgcgggtcgagattgttggtctcgtgagtagcggtgatggtggtttcggtttcagattctgccatgtggttcctgttctgaaatagttttggctcccctctttgaggggagctgccgccgtaggcgactgaggggagtcgcctcagcaagagccccctcagtccacttcgtagacagctcccctcatagaggggagcctctatacagacccgtctttagtacagaccgccggcttcctgaacgccggactcaggccaagcctcgccgcccatttccacgggcttcaggggcacgcgggtgcgcttctcgccgatgcgggcggccacgtaatcggccaccttgtcaagagcgacgcgctcctgggccatggtgtcacgctcacggatggtcacggcgtggtcctcgagggtgtcgaagtccacggtgatgcacagcggggtgccgatctcgtcctgacgacggtaacgacgaccgatggcaccggactcgtcgtagtcgatcatccattcgttgaagcgcaggtcgtcggccaggttctgggccacggtctgcagttcaggcttcttgctcagcggcagcacggcggccttgaccggggcgagacgcgggtcgagacgcagcacggtgcgcttgtcgacgccgcccttggtgttcggggcctcgtccacatcgtaggcgtccacgaggaagcacatcagggaacgggtcagaccggcggccggttcgatgacgtacggcacgtacttctcgccggtggcctggttgaagtagctcaggtcttcgccggagtgcttggagtgcgcgctcaaatcgtaatcggtacggttggcgatgccttcgagctcgccccagtcggaaccttggaagccgaacttgtattcgatgtccacggtgcgcttggagtagtgggagagcttctccttcgggtgctcgtagtggcgcaggttctctggcttgacgccgaggtcgatgtaccagcgggtgcgggcgtcgatccagtactggtgccattcctcatcggtgccgggcttgacgaagaactccatctccatctgctcgaactcacgggtgcggaagatgaagttgcccggggtgatctcgttacggaaggacttacccatgttggcgatgccgaacggcggcttggaacgggaggaggtcatcacgttcttgaagtcgacgaagatgccctgtgcagtctccggacgcaggtagtgcaggctgttctcgtcctcgaccgggccgaggtgggtgcgcagcatcatgttgaagtcgcgcggttcggtccactgtccacgggtgccgcagttcgggcagacgatgtccttcatgccgttttccggcatcttgtcgccgtgcttctcggcgtaggattcctcgagcttgtcggcgcggttgcgcttgtggcagttgaggcactcgacgagcggatcgttgaacacgctcacgtggccggacgccacccacacttcgggcggcagaatgatggaggtgtcgacaccgacgacatcaggacgggtgacgaccatggagcgccaccattcacgcttgatattgtccttgagagcgacgccgagggggccgtaatcccaagcggaacgggtgccgccgtaaatttcgccggcggggaacacgaagccgcgacgcttcgcaagggatacgacttcatcgagtttggactgagccacaatgcaccttctggtttgaacggtttggggtctaataacaaccgcttcaggatagccgtatacggtgacaggtcaggcggcattgtccggtatatgttccgcgtctcacgagcggccgttcgcagcgattcctatatcgcaacacctccatattgttcctgttgttttacccttcccgaatttgtaccactgacatcgcgtcagcgtcacaaatccgggagatgttgctcggcggaggcgtccacatatcacgaatggacgggacgcgccagacctgacgacacgtatcgaacaaatccgtcacgataatgtccatgttggcgcatagcgtcggcactgtagtgcagggggactcgcatgtggttcgcgagttgagaaaggcctgagcctgacccttagaacctgttggttaagaccatcgtagggagcagtaaatgagcaatagtgcatcatcgtttgccgatgtgtccagcggttgtaccgccgggactccggttccagccgattcacccatccgcgacaatatcgccgatgccgttcgccgcgtacgcgagacgactccgttggcccagtcattcaccaattttgtgaccatcaatttggtcgccaacgcgcaactggcggccggcggcactgcggccatgagtttcctgccggacgacgtgatcgaaaccgcgaaaatcgcgggcgcgaactacatcaacgtgggcacgctgctgccgttctataaggacgcgctgcccgaaatcgcccagcgactcaactacttggacaagccgtgggtgctcgacccggtggccgccggcatcggccacacccgcaccgccattcttcagaccttcaaggccgctcccccgaccatgattcgcgcaaacgcctccgaggtaatcgcgctggcgaacatgtgggggctcaataccgaaaccgtggggaacgcttccgagcaccgccccgccggagtggaatccgtcgatggcgtggagtccgcaaccgttgcggcggtggcgctggcacagtatctgaccgaacagcacgccaagcattcctcccatgacgcttccacccgctgtgcagtggctgtgtccggcatcgccgatctggtgaccgacggcgaaaccgtgtaccgactgccgggcggcagcgcgatgatgaccaagatcatcggtgccggctgctcgctgggcggcgtggctgccacatatctggcggtttccgatccgttgaccgccgctctgtccgcatctctgctgtacaaccgcgcggcagagatagccgatacgacttcgcacgggccgggctcgttccaggtcgcgttccttgacgcgctgtggaatgttaccgccgaacaggtggcggaatccgagattttggtgcagtagtttcagttccctctgatgagggagctcataacagtttttcccaataagacttccacaagaaacaacaaaggtaggaataataatgagtaatgaatacccatacgcctccatgcgagacaacttcgacttgtccgcgtacttcgtggtggggccggaggactgcaaaggccgtccgctgaccgacgtggtggatcaggctctgcgcggcggcgcaaccttcatccaactgcgcgccaaggaggccgatgcctctgagctgaccgacatggcccgcgacatcgcgcagatcatcgaggacaatgagaagtccgattccgtggcctttgtgatcgacgaccgtgccgacgtggtgtggcaggcccgccgcaagggcatcaaggtggacggtgtgcatatcggccagaccgacatggagccgcgagaagcccgcgccctgctcggcgacgaggccatcgtgggtctgtcggctgagaccgaaagcctcgttcagctcatcaacgagctgcccgacggctgcatcgactacattggcgccggccctctgcacgtctccaccaccaagcccgaggcttccgtgggcggcaacgacggctccggcaagacactggacgccgcccagatcaacaccatctgcgctgccagcgaattcccggtggtcgtgggcggcggcgtgaccgcagccgatatggccatgctcgccggcaccaaggccgccggctggttcgcggtctccgccatcgcgggtgccgagaacccggaagaggccgcgcgcaccatggtcgaaggctggaaggccgtccgcggcgacaagaagcacggctacgcgccgcgcgtcgtagcccacacccccgctgctgatactcaggctgctcaggaaggggccgcaaagcctggctccgaggccactgagaagaagttcaccaacgccaaggacgccaaggatgcccagaagctcgccaagcagcagcgcgtggacatcgccgcccgtggttccaagcagcgcgacaaggcgcacatccgcaagaccaagtccgtaccgttcacctatcagtatggttcctacgacctggaagtgccgtacaccgaaatcaagctgagcgacacgcccggcgtgggcccgaacccgccgttccacgactacaacaccgaaggccccaagtgcgacccgaaggaaggtttgaagcccctgcgtctcgactggatccgcgaccgcggcgacatcgaagactacgagggccgccgccgcaaccttgaggatgatggtaagcgcgccatcaagcgcggccgcgccaccaaggaatggcgtggacgcaagcatgagccgatgcgcgccaaggaccacccgatcacccagatgtggtacgcccgccacggcatcatcaccccggagatgcagtacgtggccacccgcgagaactgcgatgtggagctcgtgcgctccgagctggccgccggccgcgcggtgatgccctgcaacatcaaccaccccgaggccgagccgatgattatcggatccgccttcctgaccaagctcaacgccaacatgggcaactcggccgtcacctcctccatcgacgaggaagtggagaagctgacgtgggccaccaagtggggcgccgataccgtgatggacctgtccaccggtaacgacatccacaccacccgtgagtggattcttcgcaactcccccgtgccgatcggcaccgtgccgatgtaccaggccctcgaaaaggtcgaggatgatgcctccaagctgagctgggagctgttccgcgacaccgtgatcgaacagtgcgagcagggtgtggattacatgaccatccacgccggtgtgctgctgcgttacgtgccgctgaccgccaaccgcgtgaccggcatcgtctcccgcggtggctccatcatggccgactggtgcctgcgccaccaccaggagagcttcctgtacacgcacttcgacgagctgtgcgacatcttcgccaagtacgacgtggcgttctctctgggcgatggcctgcgccccggctccctggccgacgcgaacgacgccgcgcagctttccgagctcatgactctgggcgagctgaccgagcgcgcctgggccaaggacgtgcaggtgatgatcgagggcccgggccacgtgccgttcgacaccgtgcgtatgaacatcgagctggagaaggccgtgtgcaagggcgccccgttctacaccctcggaccgctgaccaccgataccgctccgggttacgaccacatcacctctgccatcggcgccaccgagatcggtcgttacggcaccgctatgctgtgctacgtgaccccgaaggaacacctcggcctgccgaacaaggatgatgtgaagcagggcgtgatcgcctacaagatcgcctgccacgccgcagacatcgccaagcaccacccgcacgcgatggatcgtgacaatgcgatttccaaggctcgcttcgagttccgttggctcgaccagttcaatctgtcctacgatccggacaccgccatcgccttccacgatgataccctgcccgccgagccggccaagatggcgcacttctgctcgatgtgcggcccgaagttctgctcgatggccatctcccagaacatccgcaaggcattcggtggcgaggccgctcagcagcaaatcgtgaaggaggctgctgctggcatcgactccgaggcactggctaaggccaaggccaatgtcgataacgacgtggtgtccgccaacgtgctcagccccgaagaaatcctcgccggcatggatgcgatgagcgaaaagtacaccgcccaaggcggcaagctctactccaccgcccaggagtaaacctctctggctcccctctctgaggggagccaattattatgcccggtggtgtcttaattcgggacgatgctcgactcgctcgaaggcggtgacgaggtcggcagcacggatcgcgccgcggcggtccttggcggccaccagagcggcctcggtccagatggcgcacacttcggcgccactccagccttcggtccgctgtgcgatatccaccaacggcagttcgccctcgattgacaacgaacgggcctgcacctgcagaatgcccaaacggtcgcgctcagacggcatcgggaaaggaatctgccagtcgaaacggcccggacgcaacaaagcgggatccacgtcctcaatacgattggtcgcagcgaccaccacaacattgcccttggactcgaaaccatccatcaacgtcagcaactgcgccaccaagcgcttgccgacgccattggtatcgttctcgcgcgaggacgcaatcgaatcgatctcatcaaagaagatgatggcgcgcttgtccgcctgcgcggcggcgaaaatcatgcgcagcgtttcctcactatcgcccacatacttgctcacgatggtcgggccggacaccagatagaactgcgcgtccgccacattggcgatgatgcgggccagatgcgttttgccggtgcccggagcaccggtgaagatcacgcccttgatgggcttggcaccgatcgcacgcatctgcgcactgttgcccagctgcgtttcgataagctccttggcgcgcgtgatcacctgctcataaccgccgaacgaatcgaaggtaagcgacggatcgctgcccggcgtgatgcggtactgcttgatgtcgtcatcgtgatcggattcgcctgggcggatggccgtgggccacagcactcgttcgatgccgaacaggtcggtgaactgcacggtgttgccgggcatgatcgaattcgggtaatcgccttcaagcagttcgaggccgtcggaagtctccaggaccacgccttcgttgagcgcacggcgcacgatgcccacacggggcttcaacggccacacatcatgcggcactttacgatagaaatccgtgccgacgagcaacacgtcgcccacatcgaacacctcctgacgcggaaatgtgagctgtgtggtgtgcccattaggcattacgccaaaatatgcggtgcgttcatcgtcaaaaccggtgatgcgtaccaagacgccgtcacggcgcagtacatcgttatcagccatgtcccctcccgaacatttcatgaatcaatcgcaatcagcaaaccctcccatctcaccacaggagcggcaaaacatcaaggaaaaccgctccgaaaaacatcatgggccccacttagaatgaacactatggcacagattgcaacatctacacttcccgctgttctcgcgatctccggctccgactcgtccggcggtgccggcatgcaggccgatctgaagaccatgctggcttgcggcgtgttcggcatgagcgccatcaccgcgctcaccgcacagaacaccaccggcgtgcgttccattcaggacaccaaaccggacattctcgccgaccagatcaacatggtgtttgaggatattccgccggtcgcggtgaaaatcggcatggtgtctgccactgacatcatcgacgtcattgctgaacgactcaccttccatcacgccacgaacatcgtgctcgacccggttatggtggccacttccggtgccaagctcatcagtgacgatgccattgcggccttgaccggcaagctgttcccgatggctacggtcgtgactccgaacattcccgaggccgaagtactgaccgatacgctgattcgcgatcaggaggatatggaggccgccgcccaccgcatcgtggagcgttacggctgtgccgcgctggtcaagggtggtcatggcaccgaggatgccaacgatgtgcttgccgagacggatggaaccgtgacctggtttgatggcgcgcgtatcaataatccgaacacgcacggcaccggatgcacgctgagctccgccatcgcctcgtatctggcgcttggcgacacgctgtccaaagccatcaagcatgcgaagaagtatctgaccggtgcgctgaagacccagctgaatctcggccacggctccggcccgatggatcatttctggaagtatcgctgacataagtgtggttgttaagctccccttgccaggggagattaacactactgaaaaaggagaatcatggttcttgaccgtaatgccgttactcaggaagtgccgatcgacccggaaaccggcaaaccgtacctcaacaccgtggcagccatccaggtgtcggccaatggcgtgggctccgaggtttcaccatacgtggctcaggccgtcgaagtgattcgcgaatccggcctgccgcaggaaaccaacgccctgttcaccaacgtggaaggcaatctggacgacgtgctcaaggtggccggtgaggccgccaagaagctcgccgagcagggctaccgcacttctctggtgctgcacatggatatccgtcccggcttcaccggccagctgaccgaaaagcccaagctggtggatgagatcctcgccgacaagcaggcgaaatagcaaagcatcgcttccaccagcaagggcatgctttgttattacacgtttcatggggcggtaactcacccatagggcggtaaatatctcatggggcggtaaaaccctcatggggcggtaggcgaaaacggctctattctgcggaaaggcaaaatccgctaaccgccccatgggccaaataccgccccatgagtgttttaccgccccatgggaatcacggttctgccttctttcaacggggtaagagcgtaagtggggcatatataggagcgttacaaactctgttatcgttcataatgtgaccgcaacgcggcgtgccacaagatcgaacctatagttaagccccatgtagtgagctatctcacaacgattggctcgctacgtggaattcaagacttggactgcaaacgtcgttcatcccacacaatgggagggcgaacggaacacgcagtccaatcaagagttcgctcgccgcaacatcattgagcagttgcacgcgggcaggtttgcaagaagagggctcaaatatgactgctgctgaacagcagatttccggcaatcccgcggctatggaaagcgcacaagcacgtaccaccgtgacggatcaagccaaggttcaggatattatctcgcgcgtggatcgcgcacatgaaaccccgatgttccatcgcatcgtggcgctggtcgccgctggcatgctgatggacagcatcgacgtatatattggcagcgccgttgcctccagcgcgttggccacacactggtccaccgttgcgcaaaattccacctttatgtccgcaggcttcctgggtctgctggtcggttcgctgctggccggcttcgtcggtgacctgaagggccgccgcgtggcttaccaaatcaacctgctgctgtttggcggcttcaccttcctcggcgcattcgccccgaacatggccgtgctgtccctgtgccgtctgggtgccggcctgggcctcggcgctgaaatcgtcaccggcttcgccatggtcaacgagttcgcaccgatgaaccgccgtggccactggtgcgcgattgtctcgctcgtggccaactgcggtgtgccgatcgctatgctgctgtgtgcatggatcatcccccgctggtcctggcgtccgctgttcgtggccatcggtctgggggccgccatcatctggtggctgcgccgcgacatccccgaatccccgcgttggctcgccgtgcacggccgttacgatgaggccgacgccatcgtcaagcagcttgaggccaacggctccgaactgatcgacgcagccgccaaggccgacaccagcgacaccagcgacacccgcaacgccggcggccgttcgctcggcatctgcctgcttgtagctgtggttgctgtggccgccacgaacgtgtgctcctacgccttcacttcttgggttccgacgattctggtcaagcgtggtattaacctgtccagctcgctgctcacctccacggcgatgatgctcggtgccccggtcggctgcctgattggctctctgcttatcgaccgcatcggccgcaagcgcacgattgtgccggccttcctgttcactggcgtgttcggtttaatgtatgccttccagacctctaccgtgagcgcaattatcgttggcttcctgctcatgatgtgcctgtacgtgcttatggcttccgtggtggctgtgtacgctccggaactgttcgccaccaaggttcgcttccgttgcgtcggcttcgcgaacgccgtggccaagctgctcaatgtgttgatgcctatggtggtgggttggatgcttacctcgcttggtgccacgtccatctttgtggccatcagcgcaattgctattgcatcgatgctgattgtcggcttctttggcgcggagactgcgcagaagtcggttgggtgatcggtttcctcacagtggaataactgctgataatgtccattcggcgtcttgcgtggtgatatgcagggcgccgttttgttgttctagtaattgtcggtaacggttgagaccggtaccggtggataggtccgcactgccatccgcatccgaatccgatgacgtgcgggccgtgtcgatgcaggcgatgcggacggtgtccagtccgatgccaatcgtcattacatagcccgcttccgggtcggcatgtttggcgatgttgccgtacagttcctccagcagcccggcgatcaggccactccgaccggctgcgccatgagcaccggaaataatcgtctgaccttcaaagccaagctctgataatcggcggtcaccattgctcgcaacatcacgaatttgctcggctagcgggcaatcagcgtctgtgatgccacatgcaatgccagaagcggcatcaacggtcgaatcatgcggagtcactgcactgtgcgccgcttctcccctgccttcaataacatcaatgacctgatgcgtgcgatccaatgcgcccatagccacgctacgcagttcgcgtaattcttcttcagaaggggtcttgccatcggcaatatccttgtcgaatcgcaaaatcaggtatgccaaatcattggatacgtaatcgtgaatgtcctgagctgtgcgttcctgctgacggcggtgagccaactccgctcgaaccaagctgcgttcgtgattccatcgcgccgccatgccaccaagcatgaagccaataaacaacacggccactggcatcacaccatagagggcaatcgcaccaagaatcacttgcccagtgcgatgctcggcagaagaaccgctcgattcataggcgcttccggtgaagtcgcttcccgactgccctgcgctgtcagacccactggatgaagagccaccatcagcagcgccaccatcagcaacactaccgtctagggcactactactcgccgcgccatccgcagaaccgctcatcgtgtctgagccgccatcaagccaaggaatggccacgccaccacgcgacaacatccacaccacaacggcaatgccggcaaccgccagcgccaatcgcttatcggcgtatccggcaatacccaccgccaataacacggcgagcattgcacccgacggcatccagatcggactcatgcacaacactatccaagccaccgctaccgccacgcatccggtgaccggacgaaacgccatccaccccacaatggcaacgaatatgaactccgcaaggcagtccgccgccgagacactgtcagcagccaagcccgccatggtttccatcgtgcatatcaaggcaacaaccagtatggcaatcaacagccatgcattgcgaacaccgctatccagctcggccaatcggtgtcgtaacgctttcatagcagttcctttcctaccatccatgccgttgcacataccgcccatgccaactcttaaatctcatgccgtttcacgcagattgatatggcatgagcgcgactgcgagcgccgagtttggcgagtgcgcggcgttcaaaagtcgccacagtggccacactgatgcccaatcgctcggcgatttccttggtggtcgacccatccgcatacatacgcagggtgtcgcgttctttgccggaaagcgcgccacggtgcacgtatgacgtatcttcgagcaccgcgtaggcggttgcggcatccatgaaggacagcgaattaccgctcccctcatctcccagtaccagctcattggtcgacaatccttgggctgcattgcgaatagcgagcgcaatgccgttcaaatcggttttaccaaccaaggcctgcgccccgcagcgagccgcctcgtcgtgaaatgacgcgagcgcgtatgaggtgacacccaccagcccaacctcgggtgttttggtacgaatcgcacgacagacttcggtaccgggcacgtcgcccatagacatatccgtaaccagcacgtcaggccgcttggtggggctcaggcatcggctgatggccacggcacccaaatcgcaggtccatatcacggcaaaatcgctggacatgcgctcgattagcgcgccgaacactttcagcgcatacgggtcattgtccacaatgccgatgcgtatgttgcggttgcgcgcttctcccattacattcaccccttcagtgtgcccgacgccgaactgctccgtcctgacatgtcatggtcactatgacaactatcattccacatttcctgcgcgatttacgatggaatcatcatcaatccttgacaaggcggtaaaggaggactgcaatgaaccgtgcacaagcactcagcaagctcaacaggagcgatatgcgcaatgccgccgccgagcgcgggacgcaacgaatattcgcgtggaaccgcgcgcattggattggcatggttgtactgatagcggtgttgttgctgctgcagtggagctcatcaatgtatctcatgcccgacgaggtccttgacagggctgccaaaaacctgttcgtatggttccccggtatggttctgcactggccattggtgttgggaatcaccaacctgatactcggttcgatacgatccggcagtctgtctttcccattggcgagcgcaatcatcggaccgctggcattcggctgtaccaatcttcgcttacggccggggttcccataccgttcctgggctcagtggtggaagctaatgcacgctgaaagcggccatcagctattggttcattcgttgatcggctcggccatgctgttgatctgttatacggccgttgcgttcatctgctatgcaatcggacgctacggtctgcgcgaattgtttgtggatccgaatccgcagacggcgagcggacgactgctcacacggattcgtcaggatgcgattcgcttcggctgctggctggcgacggcaatcatgtacggcttgctattggcgctgaccttacggggcggcatggctgcgatggccgccgcgttgctaatcaattttgtgattccgcccgccttgctggtcatcaacggcatctacgcgctacgcccggcctcactgacgtatccgtggaaaagcctgctgttcccgttggcgtgcacactggtacctgcgccgatgctcatggcgctcatcacggtgtatgaagacacgtgcccgataggaagtacctgcacgctgatcggcgaccgatacctctcctggggctcgatggatcaggtcttgcatttcgtcatcgtgttcgccgtggcgagtttcctcggattcggcgtggtgtgggccgtgcggtggattgtggctcgtcgcacaaaataagagagaccaaaatatactggaatcaggggcttcgtgcaatgatgcacgagccgatccaagcaaaggggctgaccatgagcgagaaactgatggaacagtaccggttgcgcaaacaacgcaaacgccgtaacgcttgtatcgccgccatcgtgacagtagtgcttgtccttgccgtcgccggcggcgtatggtggacggccggcgatggcagcgcactggttcgcaatatgttcaagccgaaggccacgcccgccacgcagccggtagtcaacagcaccgcagccttcgcctaccgcaccgcaccggaattcctggcgatggaagccggcgaccgaggcaccggcaatgtgaactactcccctgcttcgatgtggatggcgttggccatcgccgcgcagggcgccaatggcacgacccgctcgcaactgaatgagctgctgggctccggttcgctggccgacagcgactaccaatcgctgctgagttcgatcaacgggcaatattcgggggcgaaatccgagatgagcgccgcgaactcgctgtggatcgataacgactactctcttgccagcgattaccaatccaccgtcaagaagatattcgaggccgaagtcaccacgctaccgttcgacgatcaggccgccgccaagatgtccgattggattgccaagcatacgaatggttcgctcaagccgaagatcacgctgcgtgaccgtgaagtcctgtccatcatcaacaccgtctatgcggatggccgctggaaggatccgttcgaagagcagtccaccggcgacggcaccttccacggcgaagccggagatgctcaggtgccgatgatgcaccggaccttcagccaaatgacttacagccatgatgagtacaacacttggcagcgggtggagattccattcgacaacagcggcaatctggccatcgtgctgccggccaaagggcatttcgacgagctggccggcaatgccgagaaactcggatgggcgttcggctcgtgttcgtcggcatcccctggcgaggacgcaatgggttgcaccgcggacagtctgcccggatggggcgtctccgtcaactcggccacggtgaacgtctcgctgccgcgattcaccgtcgacagcatgttcgactcggaagccaccatcaaggcattcgaaaaactgggggtgaccgatgcgttcagtgcaggcgacgccgacttcaccaagatggtcgacaccgattcgcacggcgagaatctgtatatcggttcgattctgcaaggcacgcgcatcgaggtgaacgaggccggcgccaaggccatgtccttcaccaaagccggcgcagacttcactagcgcgccggtggacaacatcgagttcacggtggatcgcccattcctgtattcgtacgtcaccccggacggcataccattattcatcggtgcggtgcgcaacctcggcggagtcggtggagaacactgatactttcccgacagtccgtcaattagggtgtatcgtttgacgcatggctacgatgaaggaaatcgcgaacaaggcgggggtttccgtctctacggtgtcgctggtgctcaacggacgcgacgaggggcgcgtaaagtccgaaattgcggacaatgtgcgcgccatcgccaccaagctcggctaccggtcgaatccgctggccagttcgctgcgtacaggcaagacgcacatcctcggtttcatcagtgaggaggtggccaccaccccgtacgccggcggtatgattctgggcgcgcagaccgccgcaagccagttcggctatatgctcatcaccgtgagcaccgacggtgagaacagcgagagcgaggaaatcgccgcactcaagcgatacggcaccgacggtttcctgtacgccaagatgtcgaaccgcatcacccatgcgccttcttcgctggccaagacgccactggtgttggtggatgccaccgactcgcttggcaaaatcccgagcgtggaaccggacgagttccaaatcggctacgacgccaccaccagattggttaaggccggatgcgcacgtatcgcctatgtgggttgctcggaaccgatgattgcgcaggatggtcgtttggaaggctatcaggcggcgctcagggacgcctgcctcgactatgacgatcgtctggtcgtcaatgtgctcaataacgggccggcactgaccgcagtcagcgatttgttcgacgccgagcatccggacggattcttctgcttcaacgatgcccgcgcctggtatgtgtacgaatgcgccgcacgccgaggactcacggtcggcaaggacatctccgtgatcggcgtggacaaccatcgcgtgttcgccgaaacgttggaaccgatgctcaccactgtggaactgccgcatttcgagatgggctactgggccgtggccaagctggtgtcaattatcgaaggacgctcgatggacgacgtctcacggccagcgaccaccgctcccctgccgccgatcgacgcgccgattccggcgaagatccactgcacgctgatcgaaaaggcctcggtgaagtaaccgaggcccacacgatttctcaaggcctccgtccagcacggaggcctttttgcgtctcgaacgggtacgacacgccgatgacgtcacgacatccgccggactgatacgatgcccgcatcgtcacagcgacgcacggcgaccgggaggtgcatggtgagaacatacgagaacgcgcaggagctcaaagaggagatcagtgcggcgttccgcaaatacattgcggagttcgacgatattccggaagccctgaaagacaagcgcatcgacgaggtcgagaggaccccggcggaaaacctcgcctatcaggtcggttggaccaccctgctgctgcagtgggaggatcgcgagcggaggggccttccggtgcgaacaccgtcggatgagttcaagtggaaccagctcggaaagctgtaccggtggttcaacgacacctacgcccacctttcgctgcgggagctggagggcatgttgaccgacaacgtcgacgccatatatatgatgatcgatgcgatgagcgaggacgagctgttcaagccgcatatgaggcaatgggccgacgacgccaccaaaacggcggtatgggaagtgtacaggttcattcatgtgaacaccgtcgccccgttcggttcgttcaggacgaagatccgcaagtggaagcggatggccctataggttcggcgcggcccgcaacccctttgtccagttcgtctacgccccgatgatcaacgccggaggcgtcacccgctgggctggtgcactgattggctccatcgtcctgtccgccggcttcatggcagcctgctccctgtccgaggctgtcaccgaacgctactcccgtaagttcaacttcgaatacggccagtcccgcgcctggggctccttcagctacgccatcgtggccctgtgcgccgacttcctgttcaacatcagcccgatgatcaacttctggatcggcaccgcctgcggcgtcggcatgctgctcatctacctgttctgggttccggccgagcagaaggaagagctcaagaaggaagccgatccgaacgccgagaagaccaacccctccttcaaggagatggtcggcgtgctcaagatgccgaccctgtgggtgctcatcgtcttcatgctcctgaccaacaccttctacaccgacaagcagctgcgtcagatggaagctgccaaggcctgaaaggacacaccatgactgacttcactcccgaaacccctgttctcacccccatccgcgaccacgctgctgaactggcaaaagccgaagccggcgtggccgagatggccgccaagcgcaacaaccgctggtacccgaagttccacatcgcatccaacggcggttggatcaacgatccgaacggcctgtgcttctataagggccgctggcacgtgttctaccagctgcacccgtacggcacccagtggggtccgatgcactggggacacgtctcctccaccgacatgctcaactggaagcgtgaaccaatcatgttcgccccgacccttgaagaggagaaggacggcgtattctccggttccgcagtaatcggcgacgatggcaagctcaagttctactacaccggccaccgttgggccaacggccacgacaacaccggcggcgactggcaggtgcagatgaccgcgctgccggacaatgacgagctcaccagcgccaccaagcagggcatgatcatcgactgcccgaccgacaaggtcgaccatcactaccgcgacccgaaggtctggaagaccggcgacacctggtacatgaccttcggtgtctcctctgcggacaagcgcggccagatgtggctgttctcctccaaggacatggtccgctgggaatacgagcgcgtgctcttccagcacccggatccggatgtgttcatgctcgaatgccccgacttcttccccatcaaagacaaggacggcaacgagaagtgggtcattggcttctccgccatggggtccaagcccagcggcttcatgaaccgcaacgtcaacaacgccggctacatgatcggcacgtgggagccgggcggcgaattcaagccggaaaccgagttccgcctgtgggattgcggccacaactactacgccccacagtccttcaacgtggacggccgtcagatcgtctatggctggatgagcccgttcgtgcagccgattcccatggaggatgacggctggtgtggtcagctcaccctgccgcgcgagatcacccttgacgatgacggcgacgtggtcaccgcgccggtcgccgaaatggaaggcctgcgcgaggataccctcgaccatggttcgatcacgctcgatatggatggcgagcaggtcatcgccgatgacgccgaggccgtggaaatcgaaatgaccatcgacttggccgcctccactgccgagcgtgcgggcctgaagattcatgccactaaggacggtgcctacacctacgtggcttatgacgaccagatcggccgcgtggtggtggatcgccaggccatggccaacggcgatcacggctaccgcgccgccccactgaccgacgccgaactggcctccggcaagctggacctgcgcgtgttcgtggatcgcggctccgtggaggtctacgtcaacggtggccaccaggtgctgagctcctactcctacgcctccgaaggcccgcgtgccatcaagctcgccgccgagtccggtagtctcaaggtggattccctgaagctccaccacatgaagtccatcggactggagtagctctctcacctccctcacagagggaggttttttgtgtgcccctgtcgttcgccttcgcctatactgatggacggcatataacacaatccatcacacgaccggcaggcgcgcaggctcctcaccttactgttccacgccccggccgcaagcgccaccagcaaaccggactggcgcggaaagcaaggtgacatcccatgtccatcgccaagcgcctcaagcgccgcatgcccaccgtcatcgccgtcatcgtattgctggcagtctgggaaacgtgggtggatctaggacatgtctcccccacgatgatctccgcgccaagcgagattttcgccgccaccatcgaaacgtggaacacgctcggcccggccgcggcgatcaccggctatgagggcgtggtcggcttcctgttcgccgtgttcttcggcattatgatcggcatcgcactgtactgctcgcacacgttcaacgcggcgttctatccgctgcttgccgccgcacaaaccatgccgctgatttccatcgccccgttgttcctgatttggttcggctttgagatttccggcaaaatcgtaatcgtggcggtattcggcctcttccccatcgccgtgcagaccgtgcgcggactagaagcggtgccccagttctattccgacgtcgcattgacctgcggcgcgaccccggtctggacgctctggcacgtgaagctgcgcgttgccgcacgtcagatctatggcggtatccgcgtatctgccgcatacatcttcgccacggcatccaccgctgaatatcttggcgcgcgcaagggcctcggcatctggctgcaggctgcctacaattcgttccgcacgccgctgatcttctccgccaccatcgtcattatcctgatgacatgcgtactgatgctggcggtgaacgccagcgagcgcatcctgctcggcccggccggcgatgacgaagaccccgacgcggaccagtagttctttttaccgtcaaagacacaagccggcggccagaaccgactgaacggggcggcttctcatgaggtctccagccctgtctctataatggaacagctttaccagcgtgtggcaaaccggctttcccgagctttcatagggaatgtcgggggcgctggtcgaacggaaatcaaggccctccatatcgttttctgccgacttccgttcgaagcaatcccagagaacgatagagagacaacgaattagggaaccatcattatgaagaaaagccttgtatccaaggccgctgccctcgtgggcgcccttgctatgactttcggtttcgccgcatgtggtcagaccaacaccgccgactcctccaactccaacacctccgacctcaagaaggtcactttcatgctttcctgggcgcccgataccaaccacatcggcgtgtacgtggccaagaacaagggctacttcaaggacgccggtcttgacgtggatatcgtggccgtggcccaggccggtgccgaacaggccgtgaacaacggtgtggccgacttcgccctgtccaacttgaccaatgtgggcatctacacgctgaagggtgctcacatcaagcaggtgctgcaggtgcagcagaagccgagcgccatttggtgcgcactggcgtccaacaccgccatcaagtcccctaaggatttggatggcaagaccttcgccaccttcggctccaacgagtccgacgccgtggtgcgccgcatgatccagaccgacggcggcaagggcgagttcgacaaggtgaccgtcggcacctccaccttccagaccatggaatccggcaaggccgatttcggcggcttctacgccacgtgggaaggcgtgcaggccgacatgtacggcccgaagctcaactgcttcaccgagcctgactacggcgtgcccggcaacgccgacgccatcggcatcatcaccaatgacaagaccatcaagaacaatcccgacctggtcaagaagttcactcaggccactcagaagggttacgagtacgcgtacgccaacccggatgacgccgcgcagattctcgtggacgaagcccctgacgccaacctcaagcccgaattcgtcaagaagagcatgcaggttatcgtcgacggccagtactggggcgatccggccaagatcaaggacggctctttcgtgctcggcaccaacgacttcaagggcactcaggaatacttcgacttcctggctgaagaagacgcctacaccgacagtcatgacaaggtgattcatgaggccccgcaggccaaggaccttggcaccgacgaattcctcggcaagtaatttccgatattccgagtttgaatctacgcaaaaatgcgtccttcccatgaggaaaggacgcatttttgcgtatcggccgataaggttattcatagcgaatcatgctaacaaggaggcgattccatggcccaacgtcctgaccgcattattgccagcatggataccggtgttgatgatgcgttggcgttggcgtatttgttggggtcggcggatgagtgcgagctgagcggtgtgatcgccagttatggcaatgtggatgcgaacacggcttatgccaatacttgcgcggtgcttgatttgtttggccgggcggatattccggtgtttttgggctccgagcatccttcttgggctgatgcgtttattcccgatgcagggtgtgcccagtttcatgggaaggatggactggggaatacttggctggcaggggccggggctctggctgatggagctggtgtgcctggtgatgatatgtctggggatgacatgtctgaggatgtgcccgatggggttgtttctgttggcgggtatttggtaggggacgctcatgctcatccggcgtcggggtcttgttctcgtgtgggtcgctctcggcctgtggaccgtccccagtcggctacatcgacagctctcgccagctggggcaaaaggaggcgctccgttgatgctgcggatgggattgagtatctgattgagcaggttcgtgagtttggccgagacgttaccgtgctggctaccgggccgttgacggatgtggatgcggctattactcgggcaccggatattgcaccgaaactcaggctggtgatgatgggcggtacgcttacccaacccggcaattgttgggatgcggtggccgagacgaatatcatccaagaccctgaggccgcgaatcgagtatttcattccggcgcagacatcacaatggtgggacttgatgtgactcaccagtgtttgctaccgcaatcggcggccgaccggtggcgtgcgacggggaccaagcgcgggcggttcttggccgatctcgcggacttttccatcaaggcaaatttggaagccgaccccgcactgttctctggcggcatgccgttgcatgatccgttggcggcggcggttgcacttgattcttcactggtcga

SEQ ID NO: 2369 - DNA, 9766 bp, Unknown
  R50_10m  MAG No. k141_2424
aggaggatcaagacggagttcggcatgagcatcatggatcgtcgacgcgggctcggtcttgtggcatgattggtggtgatggaatcaatgacgagtccaacaaaacggcaccagccccattgaaataagaacagattcgtaggacactgcgaaaaacaaatagggtgctttccgccatcaacagcggaaagcaccctattcttatggtattcttatgatttctctgtcctaattagagcacctcactccgcagcaatcgcggccttgagctcctcgaccttgttggtcttttcccacgggaactcaacgtcggtacggccgaagtggccgtaagcggcggtcttcaagtagatcgggcgcttcaggtcgagttcgtcgatgatggcggcggggcgcaggtcgaagaccttgcgtacggcggcggcgatctggccgcgcgtcacgccttgctcggtgccgaaggtctccacgttgacggacaccgggtcggcaacgccaatagcgtaggcgatctggatctcgactttgtgagccaagccggcagctacgatgttcttcgcaacccaacgggtggcgtacgcggcggaacgatcgaccttggacgggtccttgccggagaacgcgccaccgccgtggtgggcggcgccaccgtaggtgtcgacgatgatcttgcggccggtcagaccggcgtcggccgccgggccgcccaggatgaacgaaccggtcgggttgaccagctggcggtagttgtcatgcggcaccttggaacccagcacctcatcaagcaccgggtcaatcacgtgcttcttcagctcaacagcaagccaatcctgcgtaacctcaggatcatgctgggtggagatcagcacggtgtccagacgaacgggcttatcgttatcgtcatactcaatggttacctgggtcttgccgtccgggcgcaggtgcggcacttcaccggacttgcggacctcggtcagacggaaggcgaggcgatgtgccaaatagatcggaagcggcatcagcgtcggagtctcgtcggtggcgtagccgaacatcacgccctgatcgccggcaccctgtgcttcgtaacgttcttcgcggctggcggcggtctcctgatcgccagtcagacgggcaacgccctggttgatttcggcgctctgctcggtgatggccacgaccacgccgcaggaatcggcgtcaaggccgacttcggaggaggtgtagccgatgttgcgcagggtttcgcggaccttggactgcacgtcgcagtaccccttggacgtgacttcgccgaagaccaggaacacgccggtggcggcggaggtctccacggccacatggctggacggatcctgggccagcagatcatcaagaatggcgtcggagatttgatcgcagaccttgtcagggtggccttcggtcacggattcggcggaaataagccgatgttcttctgtcatatcatccctttcttcaggacttatcgccccgcgggatgcgaggcacaatgatacggtgtcaatttttacttgtcactgcggaagcgggcatagataaaggctcgtgccaaccagcgcggtggctcgagccttacgtcttgttcgctcctgatgatgagttatagctgattgcgataactcaggcaagcgtgtcgctcaaaatcagttgtgagagaactctcacaccatcattcggcgacgaactgtccaaacaatccaaacgaatcgtctgaatcgatcagttgccctcgttggcgtcgtcctcgcccaaggtctcctcaagcagaccctcgtcgatctcgcggaaggcgatggacagaggcttctcgttgttctggtattcgaccagtgggccgacgttctgcagcaggccctcgttgagctgcgtgaagtaggagttgatctggcgtgcgcgcttagcggcgaaaatggccagcgcgtacttggaatcggcgtgcttcatcagatcgtcgatcggcgggttcgcaagaccgtcgggtgtcgggtcagtaccaaaagccattgttcttatctccaaacattggaaaatctatctcaaccgaagcaagtgtagccgtttggggggacttctgtcagccctataccggactctcgccagaggaatgtattccaaaaaaatgtgtgagaaacattacgtttttgcaaattccattattcgactcttgacaaatggcgtgtccctcgcaaaggcttgaatagaaccatgactgaaatgcgatctgcaaaaataatgtcagggcgcgtctttgcaggcgcccgagccctctaccgtgctgcgggcgtcagcggagacgacatgggcaagaagcccatcatcgccatcgccaactcgttcgatgagttcctgcccggccatgtccacctcaacaaggtcggccgcatcgtttccgaggctatcaaggaagccggcggcattccgcgcgagttcaacacgatggccgtggatgacggcatcgccatgggccacactggcatgctctactccctgccttcccgcgacatcatcgccgacaccgtcgaatatcagtgcaacgcgcactgcgccgacgccctcatctgcatcccgaactgcgacaaggtcgtgccgggcatgctgatggcagccctgcgcctcaacattccgaccgtgttcgtctccggtggcccgatggaggccggcaccacggtgctcgccgacggcacagtcaagagcaccgaccttatcgacgtgatgtacgccaccgctgacgacagcgtctccgatgaggaactgctcaactatgagaagaccgtctgcccgacctgcggctcctgcgccggcatgttcaccgccaactcgatgaactgcctgaccgaggccatcggcctggctctgcccggcaacggcaccatcctcgcctcccactcctaccgcaaggacctgttcaagcgtgccgccaagcaagtcgtcaagatcgctcaccagtactacgacgattccgacgattccgtgctgccgcgctccatcgccaccaaggaagccttcgagaacgccatgaccatggatgtggccatgggcggttccaccaacaccgtgctgcacatcctcgccatggcccagtccgccgacgtggacttcaccctggacgacatcgagcgtatttcccacaccgtgccgtgcatctgcaaggcctcgccgtccggcaagtgggagatttccgacgtgcatcgcgccggcggcatcaccggcatcctcggcgagctcgaccgcgccggcaagctgcacaccaacgtgcattccatcgactacccgacgctggaagccaagctggccgattgggacatcatgcgcccgacctgcaccgaggaagcccagcagatgtacaaggccgctcctggccacatcatctccccggagccgtggacgcacaccaccctgttcgactcgctcgaccgcgaccgcgccaacggcgccatccacgacatcaaccacccggagattcacgaaggcggcctcgccgtgctgcgcggcaacctggcccccgacggctgcgtggtcaagaccgccggtgttccgccggagatctggaagttccgtggaccggctctggtggtcgactcccaggagcaggccatcgaggtcattctgaacgacaccctgaagcctggcatggcgcttgtgattcgttacgagggtccgaagggcggcccgggtatgcaggaaatgctgtacccgacctccttcgtcaagggcaagggcatcggcaaacaggtcgccatgctcaccgacggtcgctactccggcggttcctccggtctggccatcggccacatggcgcctgaggctgccaacaagggcccggtggcgctcatcaagaacggcgacatcatcgatatcgatatcgaagcccgttccgtgaacgtcgaactgactgacgagcagctggacgagcgtcgtcgcgagcttgaggctggcgacggctacgtggctcaccgcaaccgccacgtctcccaggcgctgaaggcgtacgccgccttcgcccgctcggccgacaagggtgcgacgcgtgacccggagctgatcaacaagctctccggtctcaactgatcgccgattgcatagctgaaaggcccggcatcttctttatgaagatgccgggcctttactgtgcttccgaaggcgggagcgatattgcttgttatcgcacgcaggcggcgggggagaggcgtgcgcctcgggcccagtcggcggcgcgcatggccttcttgccttgcgccttgacttgggtgagttccagcggcgtgctgccggtaccaacccacacgttcttcttgcccaccttcagctcgccgggctgaagctcggccggagtgttgggattggactggtcggccggttgtgcggcgagaatatgcagggcgagggatttagcggttgactcgtcattatcggcgattggcccttccgcaaacagttcggtccatgccccgggatgtggcgtgcaggcgcgaatctgacggtcgatggcctcggcctcgtccgtccaactgatgcgggcgtccttcaccgtgatcttgtgcgcgtattccaggctctcggccggctgcgcggtgaatgtggcggtgccttcacctacggcggccagcgcatccacatacatgggcgcgccttcctcggccagacggtcaagcagttcgccggaagtctcacggccggtcagttcgatggtcagggaagcgacgatcgggccatcgtccaagccctcgccgaccttgaacacgtcggcgccggtggtcgggtcgcctgcccaaatcgcacgctgggcgggagcggcgccacgccacttcggcaggttggagaaatgcaggttgtaccagcccatgggcaccgcatcaagcacgttcttgggcaggatattgccataggcgatgacagcggcgatatccgcatgcaggtcgttcaacgcctccatgaattcgggggagcggggtttgagatcgatgacgggcaacccgagctccagagccgtcgccttgaccgggctgggcgtgagcttgcggccgcgaccggtaggcgcatcggggcgggtaatgacgccgaccacatcaaaacgtggatcggtggcaaaggccttgagcgagggcaccgccacgtcgggggtgccggcgaacacgagtttgagcatggtcctccttgaaatgtcgatgctcactgcacggccggaatgttcacgccattggcgatgagcagttcacgcagcttgaccggatcctggaaacgtacgccacggatgccggccgcattcgagccgacgatgttcatggccttgtcgtcgatgaacaacgcgccatcggccttgatgccgaactggttcaacgcggcctcgtagatttccttgtgtggcttgcgcagcttgacaaaaccggagacgagcttgccatcaagctgctgcagaatatcgcactgttcctcggccacgtggaacagactggattcccagttgctcaggccccacacgccgatgccggcggccttcaggtcattgaccagcacgcgcgcgcccggcacgatgccggtcagggagtcgcggaagttcttgatgtagtagtcgaggatgtccgcccacttatcgcccttgtcacggcgcatgatggcgatggcctcgtcggtgctggtgccgccgtccatcaggtcgttgacatcgtagaagccggagatgtcgttgtcgaggaattcgtcgatggtcttctggctgtagcgggggatgagtacggcgaccggatcccagtaaatcagcacgttgccgaaatcgaagatcacgtcggtgatcggcttgccggcgttcgcagcggcctcgccatccgcgaccagcacgtcgtaatccatatccggctctccaggccaacccttcatagtgtcctccttctagcgatgttcattctgtaattatcgtttcacgtgttgaagacgattagatcaggtccttgggatctactcggaagcgaagctcgccgggttcgcgggacgccacatgacgagcggtttcccggtgcagtcgggccgccagctcggctcgccgactctgcggcacacggattactgccttcacccggtcggccgtggcttcgagctcccgggcgtcgaccgtgtccggttgcgcgatcggcaccgggcccaacatgccgggcagctcgccgcaggccgtccaatcgccgcccagggcgccgatacgctgcatcagcatcatcaccgcatcacggcggccccacacgcaggcggcggccacggccggcggcataccggtctccacacgctcctcaagatccttggctgcaagaatcctcgaatcccagagcatcagcgattgggcgatggccgggtcggtttcgccgagaatcaacgcctggccgccacgggaacgcggcgcgcacaacgacaccgcacgcatccacgcggtcaatgtatccaagcgagcatccacgcccaacgcatacaagctggtccaagcgtcgagcacggccacggcacgatactcatggccagccgatccctgctcggcactgaccggacgcacgcgcggttcgaaaccgggagtggcgatgacgatcatcggctgacaagccacatcgcgcaccaggccctgcgtcttgctggacaaaactactggcacgccgcggaacaacccggccagttcagccgcagtgcctgcagcacccacgcgcaccacgcgcatacgttcatgcccacagcccgggcacttccaattgatggcagcagccccacaccagcggcatcgcggtgtggaatcccggcggtcggccggtagttgcaatggtccggaacacttggcacaacgcgcctgacgatggcatttcgcacaactcagagtctcactgacgctgtcttgcggaatggacagcagcacggggccgctctccaaagccttagatagcacgcggacggccgtatgcggcacgcgcgccccgatggacgggtcggcaagacgcgcaagttcatcgcgattgagccaacgcacccaaggagtggcgtccttcagcggcgaggcgagcggatgaattgtggtggaatagccgctcactggggtctccactgtacctggaccggtgttttcccactggctttgcggggtgcgcgcattggccatggccacgaacacgccgccatgggacttggcgcgcagccgcatcacgccacgggcctgtggatatggcatcataccgtccatgttctgataggcggcatcctccagaatggcgaacagcgccgggccttcaaccggcgcatacatcaccgcacgggtgccgatcaccaccttcacctgtcccaacgccacagccagataggtgcgataccggtcggccgcgggcatggtctccgcgttaagcacggcgacgtcgcccacccagccgccggccggagcaggggcgaacggtttgagcccataattgcgcagcataggcatcaggtcttcgacctcgcgcatggtgggcaattcaaccacggcagctttaccggcactcagcgcagtggccaccatccatgccatgttccgttgccactcctgtgcaccgggcagcgaatcaaacacaaaagattggaaacgctgaccggtaagcgcatcatgaagcacattgacgtcggcggaattggcggtcagacgacgatacccctgcgcagccccctccgaaacggtactggcaacggcaaaggtagagccagcaggtttggccccatcgggattggtgccacgcccggcaaaaccgccttgcgtattatctggtagggagccgccgaccggtcggcggaacgacgcggctaaccgctgttcggcctccaccttggccacgcgcggtggcacggcgaaacgcagaatattggcccgtgtgccgccataggctttggcaatcagaccgatatcctcacgcatcgaagcgggaaccagtacatcggggcttagcactcgctcgatatagcgaatcgaagagcgcggcgtatcgctggtatcggtgcgtgcccagatcacgccgctgaccctctgaccgccaaaccgcacgcgcaccagcacacccggttgtgcggcctcgctgtctttttcatcaatgaagtaatcgaatgtctggccgaggtggagcgcctgcacatccagcacgacttgcgctatgggatgctgctcggccggcgtatgctccgcaggcgcacgtttacgccgcttgcggggagccagccccgcaagcgtcaactgttctgcgcctgaagtagtcatggctcaactataagtgccggagccgaggtcggtaaaattttaccggcgcaggtaatcgagtacgtgggttaggtcgcggtcgttgatggctttgtcggcggcgagctgggtctttggcttggcacagaacgcgagacccaggccggcggcctgaatcatcggaatatcgttggcgccatcgcccacagccacggtctggctcatcggaatacccaaacggtccgcccatgtctgcaaggcgtgcaacttcacggtcttgctcacgatttcgccgagcaccttgccggtcaagcacccatcggcaacctcaagccggttggcaatccaatagtcgatatggccctcggccgccagcatatcgaccacttcatggaagccgccggacaccacgccgaccttccaaccgtgttcatgcagcgtgtcgataagctccagcgcacccttggtgaaatgcagcttgtcatgcaccgtatcgaacgcggaaaccggcagccccttcagcagcgccacacgagcgcgcaaggcgtcgcagaactccagttcgccgcgcatggcgcgtgcggtcactccggcaatctcctcaccgcagccagccaccacgcccaactcgtcgataacctcttcgtcaatgagcgtggagtccacatccataaccagcaggccgggcttgctcagcgtcggcacagaaaccgcagaatcagccgggctcccaacttcgctctcggcggacttgtcaacaaaatgcacatcttcttgcgtcatgcttctgattctgggaaaaccttgggacaatgccctctatgagtttttccatggcagccgccactattcttgcgaccgaccccacacccatctgcaccaccaccgaacccggcctgatcggcaccatcaccgactggctgatcatgctgatggaaaccatcggcggtatcggcgtggccttggccatcgccctcgaatccatcttcccgcccatcccgtccgaagtcatccttccgctctccggcttcaccgccgcacgcggcaccctgagtctgccgggcgcaatcatctgggccaccatcggctccgtactgggtgcctggaccttgtacggcatctcccgctgggtgggcctgcatcgcatcaatctcgcggcagacaaaatccccggcgtcagccgcaaagacgtgagcaaagccaacgactggttcaccaaatacggcacatggtcggtgctcatcggccgcgtgattcccgtggtacgctcgctgatttcgattcccgccggattcaaccgcatgaacttcctgcacttcaccggctggaccctgctcggctcggccgtgtggaacaccatcctcgtttccgccggttacctgctcggcgaccagtggtgctcgattcaaggcgcgctcggcgtgttcgaggacgtggtcatcgcggccgtgattgtgatcatcgtatggttcgtggtgcgaaaagtgcgtactgttatccgtaacaggaaatccgccgacg

SEQ ID NO: 2370 - DNA, 18096 bp, Unknown
  R50_10m  MAG No. k141_2507
gactcagtgtctacagcgtttccggcactgacagccttgcccgcatcggcggccttggcatcgtccgcggccttgacggctcgggcctcgtcaatcaacttttccgccactgcgggttcgacaggttccgccttggacacctgacgggtcgacttgatctccaagctttccggagcgttgtcggcgttatgttccccgcccaaagtgaaggagatgagatcctgcgaggtggccatatcgaagacatccagtgctcgggcagggcgtacgctgaccagttccgacgtagcgtcggcagcggcatcgtcgcgctcatcacgctcatcacgcaccgtaagcgatggttcaactcgaggggcgacggacttatccgacttagtcgacttatccgtgcgagcggaggcatcgggcgcggcggaagattcactggtttcggcagcggacttacggtcagcggattcatcgaccatagcagacggttcggcggcaggcttatcggcggcggactgtgcagtatcagacttctcagactgtttggcgtgctccgccgcggcctgatatgcggcggcggactgacgcaacgccttggccttggcctgctcaatctcggcatcgcgtaacgcgcggcgaatctgccgctgttccatgacctcggtggcagcatcctcaacatgctcggaaagctccttggcaggcgcagttacggccgcaaccggttcggccttgttcacacgcttgctgtccttggactcggcagacggtttcttggaccagcccgtaccgctatgagtccgctcgtagcggaccaccttgcgttcccattgccgggcctggcgtgaggcattggctcccagcaccagcaccagcagtaacagcacgaacggaataagagcaagcagcgggctgaaatgcagggggaacgatacggcaaacaccaacacggttatggcaagcaggcatacggcgagaatctgccggcggcggatggccgcgcggcgcagttcccgcacatgggcgatgtgctcaggtgtcagcctcgctgacggtgttgatgctggcattgctgcccctttcgccttatgcggcttgatgtctccgaatcgtctgccgttctctgcatcaacgatatgcagggaaggcgaataacgatcctgccggtgctcgtccacacgtttcatgccgttggccgtacgtacgggcagccatacaacgataataatcgccacaatcaccagcacgacgacagtgctcagtgactcataacccatagagtcaaggataggagacgtaccgacgaactggggctttccatccgggcgtgtcggagcggaattcttccggtcgacgcttatctggaaccggtggcggcgagtctggcagagaacccttgccccatatcttcagccaacagcgcaaatgttacgtggtcgcgccactggccattgacatacatataccgctcgcgcagtccctcatgatgggctccgaccttacgcactacagccaaagagcgcgcgttatccggaagaatggcgatttccagccgatgcaacgcgggcccgaatgggtctccgagtgcccaatcggcaagcatggccagtgccatcggcgcaaatccgtggccggcgtaccgttggtcaacccaatatccgaccacaccggtgcgcatggcaccatacgcgatggctcccaacgaaatctggccgacgatacgcatctggtattcgatggcgaaaatcacgccgacgccatgctgctcattacggcgctgtcgctgcacccattgattgaaggtgatggagccgccatgcatcgggtcgccggattcccaaggcgccagccagtcgttgttgcgccagcgcacttcgttccagccgtcctcatcgtccatggtcagggggcgcaggattatcgggaaaccgggatgggtgaggcgcggcggacggatctggtggtccagcttgaacgcctctttaatcgactggaaaactgacacggcctttattgtagccatatgaagggcttgcgccttcgcctcggccactttcgttttacggtggaaacactagattgtgcggtatgagcgaagcggacaatggcatgaatatcggcagcgaccacagcggcacggagaaaacagaaaagatggataaagcgacgctgcgccaccatatactgtctcggcgcaagcgcattccagcggaagaacgtggagcggccggtgaattgctggtgcgacggttcccggcacacatgattcaggatggtcccacagtggcggcatatgtgtcgatgggttcggaaatcgaaacccggccactgttgcgatggctgcgggctcatggctgccacgtgttggtgccaaggttggggtctgggttggaaattggctggagtgtgctggattcattggaatccttgcgctcgatggatgcagtgggtggcgcgaacaatgccggtagctgcagctctcccagcaccgtccatcacagacccgatgagccaactggcgcagttctaccgcccgaagcgttggagaaggccgatctggtcatcgccccggctttggcagtggacccgcaaggcaatcgtctggggcgtggagccggctggtatgaccgggccttggctcgacgcaagcccgcgtgccccctgattgcggtgtgctggccgtgggaggtgttggacaccgatttgccggccgaaccacatgatgtgccggccgacggagtgctgacgccggggggataccggcggcttggcgaatcgggccggctgagttgaccggccggccaagatactcggcgcaagccagactgaccaaccagccacgcacactggccgatggaaccagagtggcaaaagcaggctggctagtaagaccgtaacgccaatgtgtcagggcggcgactaggatatgaacggttgcacggcatggtgttgcacgccatgcgcgagaaatatgactttgttggaggaatccgttgcctacctatcattaccgttgcaagaactgcggctatgacttcaccgaacagcagtcgttcaatgacgacccgattaccgtgtgccccaagtgctcgcaggagcaggtgcgcaaggtgtattccgccgtgccgattgagttcaagggtcacggattctaccgcaccgacaaatccggcaagtaaggtcggctccccgtttttcctctgtaaacgacggtgtcgacggcggtatgccgcggatattggcactacgggcactgtctgttgcacgggtttgaagcgttgtggataacttggcaagctagaaccacataggtcgattcagcttgcgcttacgaaaaacttcaggtcaccatggttgcatggtgaccttttcgtttattaagccgcctgcgcgcggctcattgcggcgacggcgcatggcggatgccttgcgccgactcactgctgcgttgtgcgtgggactcgcagtgttgtttgggcttgaagccgtattggccgtggtggagaccgagccgatggtggtggccgctcgctcgattcgacggggtgacattattctggccgccgacgttcagttggctgatatgccggtatctgcgataggcccatcttgggcgtgcaatattgaggatgtggtgggcaaggtggcgcaaatcgatatcgaagcagccgatcccatttccacgcatatggccagagatgcgcccgtagcaccgaccggcactacggtgattgaagtccgcttggccagtagcgtcgacgatgtattggccggcgatcaggtgagactggtttccgccgtcggttgcgaaggtgccgattgcacgctggccgagaacgccacggtgatgaatgtcgacaaaccggatacgactggcgcattgggaagcaacgaccgactggtgtcgttcgcaatgccgccggaggccgcggccaaggttatggagctgcaacaggccggagcgattatggccgttgtgcggtaggaagcggaatcggccttcggccgatgttgtgtttcccgcagccgtacggctgcggaaaacacaacatcagagcgcacagagtgcgcctcaactcctactcgcgctcgttgaaaacagcccagtgtggaggcagttcgccgaggatgcgtttgtcgtcgtcggattgccgttgttggtcggtctgcatgtctccgggctcgagtttgacgccgtcagcgtcaaactgctcagtgcctttcatcaccacgcgcttgtgcttgcgcggtgtgcgccgtgtagccgagtattccgccatgattattcaacctcgcggtagatctcgccgatacggctgacgatacggtcgacttccttatcggggttcacgaaggcggcgacactccaaacggtcatcacattccagcccaaggaaatgagatcctgtgccgacaaacgatgacgcctgcgcgtggattgcacggacataaagttcgcgtcatcggtctgcacggccaaggcaaacggcttgtccttcaatcccaccacgagcggaatcttcacgcccttgtcgaatccataatcaacagcagcgttcagtcctcgcgcgcgcaacctgtcggcgatatcgtcgaacagcacgttgccgcctgccgcatcacgcaacggaagcaccggacggtcgtcaagctgttcggcccacgtcaacatggtcttcaggaaccgaggaccggactggtgcagtcgttcttcatccaaatcttcggaaccaaaggccgacacaatatccaagctgtggtccgccaatgccagggcatccagcaacagtccgcgaccgcctgtgctttcgagcgggccgaactgctgaagcagacgtccgtgcgtggttttcgcatagcacatcgacagaatcacgtcagtggcacgacctccggccacgtcacgcaaggaaaccagccgcacatggcgcaggaatcggcccatcgccttggatttgcctgccaacgacttcaattcggcacccaagcgtgtgcggaatgcgtcggtcaacatcacgaccacaagtcgatagctggaaggaaccacagcaaaaccggcggcacgttgcgtaatcagacgcaccacttcatcaatctccgactggctggattccaccagaccagaagacataaccggcacaccgctcgcttccacacggtggaaccgcacctcaccggcagccggctcggtggccacatcatagcgaacaggaccatatccctcggattcaaggaatgcggacaggcgcggcgcacggcgagacggggcagcatccacctcgatatgaggcaacgtgtcgatcagctgcttgacgctttcgctggttaccgtcgcgcagtgggcgatcaccaccacctgctgcacgcggccgatgatggacagcaactcgatagcgggaatgtgcgcgcacgcatcgagaatcgccacatcagccagcacacccggctcggtgagtgcggcgagcgtacccggcgaggccaccagaatcggcttggccgcggccagaatctccggatgatcacggcgaatcctgctcagcgacacactggcgcgccctgccagcacggtgtgcatctggttggcttcctgagtgcgggagaacagcatgtcgcacaggcggcgcatggattcctgcgacaccatcggtccgatggagcgcacgtgctccacatcgacctgtgcgaagcggtcggatgcggtctgcagcgcggcaccatcctggttggagatgatggcggaagaacgcacaatatcctcgaacacggtggtccaccatgccagctgcacttcgccacgcacctgctccacgcccacccggcgagcgttgagatcggcgaccaactcgttcagaccggcagaagcgaattcctgctccagcaggcaacgctccggcaaggtgtccagtgccttgcgatcatccagcagtgctttcaggcgtgcttccaccttctcgaaatcggcggtttccagattgccgccagcgggtgtggtggaaagcacggtatccagcgcggtcatattgctgaccaacgcctcttgggtggaaatgatctcgtcgagcttgctgggcagcaccggccaaccgccgtgaggcacgaactgatgccactgctccccttgcttggcgactaccttcaacgcttcgtgcaagtcctcgacctgcgcgccgacgcgcagcagatccttggcttccttgacgtggcggcggcgctcccagaatcccatcgacgtgccctcggccttgcgctggctcttcggcttggtggcctcgatcatggagctgatgtctcgctcgaaaatctctggctggaacacgtcaagcactcgtcgcagattcttcaaaaccgtaacctgacgctcccactcgcgagtggtgggaggaaccgggaatccacaggtctgcacggtgcgtgccacctgctcacgggtggcgggcaggaagcgacgcagcaaatcgtccacgcgctggtaagcggttaccgcttgttcttcagtggtgatggacgccttgtaccatgcggtgtcttccgggccgatggtgtattcgccgagctcgccggcacgttccatcttgctgatccatgtgtcaatatcgttggcgatgctcagggcacttgactcgtcaagtcgaacgtgggtggcggggtgtgtcgggagcacggagatacgggccaggttctgaatggtctcgtatgcggacacattccacttatcgttgcccccgtgcaggtcgcccagatagcgggtcaagcgcgagcgcacgcccacgagttcgtcggccagctggtcgaatcgctgggtggcgactccgggctggaatccgactgcggcaatcagctgcttatcaagcgcggcgttggcgtgttcatcggatacatccagtacctgcgccttcatctcattggcggaggccgtctggatgaacagacgcttctgctcggccacgccgggcacgtacagcacggaacgaccattcatcaggcagcgcgatgcgatggccacagcctgctccgcggtgcccttcgggaaggtgccgtcgaccacgatgctatggccattggcagcaagtgacgcggcatatcgcaccgtattgtccacatcgccgacttcgtactcagcatgcgggtctacgtcgaaaggactgtattgcggaatattggcatctttgagcgcggtgcgggcggatttgtcgccggcaagcgcgtccaacagcacattgccggtggggccattctccagctggtcgatgaactgtcggctttcgctgatcatctgcgacgaggggtccatgaagcatccgagcacaatctggcgctcgatggcgaagccggagatacgctccgatgcttcggacgaaatacgggcgaacatcgcggaagtttcgggagtgccactgtcatagctggcaccgtcaaacagggaatcctcatccaagaacaccccctgctcacgcaatgcattgacgaacgcggcgttcagggtcacgcgaccggtgaatcgaatggtggtcgacaagccatcatcctcgatcgtgacgctcaccgggtacaacagcaccggcagcgcgttgcccctccacgtggccacaccgaccacgagcgacaactccgccacgccggaaatcctgcgcttggcggcctggtcatccagtacgcgcccgatatggcgttcggcggccttaagcacacccgtgtcacggaacaacgaatccaaccgaacatggccggaagcgaacagctgggcgatgccggagggatgggcatgggtcatctccagcttcgcggccagttgattcacatcctcgagcggcgatggcggctgcatgctgcggtattggtcacgccagcgacggatgcgattcagaccttccgtgagattctggttctgagtctggctctgggtcatctctcgactcactttccaaccgcttcgcggtattcctgatagcccttgttgtgagacagggcttcgtcaatatcggcctcgccacgggcggcgagccaagaatacatgtcgtcgtacaggtacggattcatggcgaggaacgccagtaattcgggatgacgggcgacttcgaactgaacgttgaaatcttgcgtggtttttgcctcgtcagaggtcaggccatcgacttcgactgccggctcctgtgctttcagctcgcccttggccacacgctcgaacaccgagccgggctcgaagaccggagtgtgtacgcccgtggagtagatatcagacgcttcatacgcttcggagaccgactgctgggcggtttcggtcgccagctgctgatcctcgggtgcgtcggttgccggttgagcggtttcaggctgggtggttgtcggctgggcggtctcagactgagtgttttcagactgggcggcttcggactgagtgccttcagaatgctgtgcaacagcgtccaccggctgagaatcgtcggtattcggagcggactgaacgttttcggctgacttgcttgcgccagccaccacatcggattcaacaaccgccgccgacgccactgccggctcgcttgtgctgggagcgtgcttaacaacggcatgggcgatggcatctaccgggacaataccggagatcctgctgtgcttggatgcgggcgttacagtcgtcgactcaggttcggtctgctgcttcggcagtaccacggagtccatggcctgctggtttttgcgttcggtctcctgctcggcatgctgggccaacgcatccgcgaacaggtcacggggtatggccggctcatcgtttttcgtcactggctgcgtgatattcagcgagccaagttcaagctcgtcgaccttgcgtcgaacattatccgcgctgaagatggcggtcggctcgccggcccgcaaatcaagaatatcgtcgacagacatatccgccgcgtccggctcctgcggtgcttcgtgaaccgcatagccaaacaaatcaggcaccttaaggtcgagtggctttgccactggatcgtcgatacgaatgaagtccgcaggcacatcaccgaactgcatgcgcatgggagacgtcggcaacaggaactcgacattggccggcaagcgcaacaaatcaccattttcccgcaccacatacgatccattggtcgatccaagatcgcggaccgaagccgtaccattgctttttaccgtgaacatggcgtgccgtttggacatcgatttggtctgatcggcgacgtcaaggcgggtgttgccatcatcggcaagggggcgtaacggcttacggccgatttccacgcactcccccggcttgacgctgatccggtcgacaccgttgatcttcaccgtccactcgctcaccgtgaccgccttcctggacacactatttgaccacactacgtgccattgtgtcatcttttaccggcttttggcggattactgggcacagaattgacaactttcgctcattgccagctttgtgattccacgccggatcgcgttctccgcctcgccctcgtcaactagtctactcagtatgcggaaaccccgcagcctgaaacacaggtgcggggttcctcgaaaagctgtgattgcggcttatgccgcacaaatcacttgagctcgacggaggcaccagcctcttccagctgagccttggccttctcggcatcttccttcttggccttctcgaggacggccttcggagcgccgtcgacgagagccttggcctcggccaggccgagggaggtgatggcgcggacagccttgatgacctggatcttcttgtcgccgacggcggagaggatgacgtcgaactcatccttctcttcctcagccggagcagcagcgccagcaacagcggcaacagcggcaaccggagcggcagcctcgacgtcgaacttctcctcgaaggccttcacgaactcggagagctcgaccagggtcatctcgccgaaggcttccagcagctcatcgttggtgtacttagccattatggcttcctttcaatcttggcggcggacgaagtggtagatccgctgcctaataaaccttattgtttaaattatcgaagcgactgattcatgccgtgagggcgtaaatcaggcagccttctcctgcttttcgcgcagggcgtcgatcgtacgcacagccttggtaggcagggcgttgaacaggtacgcggccttggccatcgatgccttgatgtcgccggcgaattcggcaagcagctgcgggcgggacttgaggtctgccagcttcttggcgccctcggcatcgtagacagtgccgtcagcggcggcacccttgatgacaagagccttgttgtccttggcgaagtcacggatgaccttcgcagcctcgatgaagtcgcccttcacgaaggtgatggcggtcgggccggagagaatctcgtcgagaccctcgatgcccgcttccttggcggcgatgcgtgccagcgtgttctttgccacggtgtaggaagtatcgcggcctagcttttcacgcagatcggaaatctgcggaacggtaagcccgcggtactcggtcaggtagacggcgtcagcgttacggaattcttccgtaagctgagcgactaccgcttccttttcgggcctcttcatggcgttccttcctaagtcggccgttgacttggagttcggaactttcggccgggcaacaaaaaagccctgcgcacaggcagagcaatataatctcgcgaagcgaccttcgccggcccttgacgggcttatatctctcaacctgcgctggcttggcgaaccaaacttcggaaatgcactcgcgcgcacttcaaccaacggtctgtggtttacggatgattagattacggatggtcagcgacattgcagaattcgggcgtgtcgcaaggcattacaacgtggcggcgtactgggctacggacgcggtgacttccttcagatagtcgagcgagcgacgccagtggccgggcacctcgatcgaatggttggcatccgggtattcgtgcacgtgcggggtgagcgcgttggcgcgggctcgatcgtagaacgggtcggcggtgccggcgcagatcagcggtgccgggccggagtatcgggagctggcggcgtgcgactggtcggccagttctgcgcggatgatcgcccttgcttcggccacgctcggagcctcggattcggcgacgatatcatcgccgacagccggcaccggaatcacccgggcggatggatcgaagtcggcgtgatgcagcaccggggtcagcagcacgaacggcagaccgtagtgtgaggccacatgtgggtaggtcatcgtcgtcagcgacttgccgatcagcaacaggcgagggccggacggggtgtcggaatcacggttcggcgagccagctgcgccatcggccagcacggtagcagaatcatcggcggcaacgccatccccggaatcaccggctttacccgcgccggactcgcgcgcggcggccatccagccgtcaatcgcctgattgaggaccggaatcaccgtggacaggtcgtcggaagcgttgcgtacgttcatgcggtcgattcgccagccggcctcgaccagagcctgggccgaccagtagagcagcggacggtcgcagttgtagccggcgccaggcatcagcagtacgcggccgtactcctgaccgggcttgacgacattcttcttccaagaggtgatgctgacttcgacggccggtttcatcgcgcgccttccttccacgggtgtgccctgcgtgtccctgagttgttccgaattattctggcagtcagtctactcccggacccgttcacgttacctccacaagctataatcggccacggttctgattggatgcgcagcgcctgacgcgcgttgggcaggccgatcagggcgagtcgcaattctcgccggggccagccgcagcattatgcgcgcggtgcgcagccccgcataaacccaaggaagtagagagtaaatggagaagttcttccatttgaaggaaaacggcacgaccgtctcgactgagattctggccggcctgaccacgttcttcgcgatggcctacatcatcgtcgtcaacccgcagatcctgtcgcagacgggtatgccgtggggcggcgtgttcctggccaccatcatcgcggccatcatcggcaccctggtcatgggcctgttcgccaacgtgccgtacgcccaggccgccggcatgggcctcaacgcgttcttcacctacaccgtgtgcttcggcctcggcttcagctggcagcagaccatgtgcatggtgttcctgtgcggcctgatcaacatcctcatcaccgtcaccaagatccgcaagatgatcatcatggccatcccggagtccctgcaacacgccatcggcggcggcatcggcctgttcgtggcctatgtgggcatgctgaacgtcggactgatcaagttcacccccggcgacccgaaagccgcggccaagggaggcgccgtggcggcgaccccgagtctggccgacttcaacgacaaggtgctgtgggtcttcctgatcggcctcgtactggccattgtgttcaccgtgatgaaggttaagggcggcatgctgctggccatcgccatcaccaccgtgatcggcatcccgttcggcgttaccacctggtccaactcgcagtccatcagcgaaaccttctcccagctgccgcagaccttcggcgcgatcttctcagctgagggcttcccggcgctgttctccgacgtctccaagctgcctctggtcatcgtgaccatcttcgccttctccatgtccgatacgttcgacaccctgggcactttcatcggcaccggccgccgcaccggcatcttctccgccgaggatgagaaggctctggagaacggccacggcttctcctccaagatggacaaggccctgttcgccgactccatcgccacctccattggcgctatctgcggcacctcgaacaccaccacctacgtcgagtcttccgccggcatcgccgcaggcggccgcaccggcctgacctccgtggttgtggcgatctgcttcgccctgtccgcgttcctggccccggtcgtctccgccgtgccgtccgccgcaaccgccggcgtgctggtgatcgtcggctgcatgatggccgcttccctgaaggaagtcaagtgggacgacatcgccgaagccatcccggcgttcttcgcagccgtgttcatggccttctcctactccatctcctacggcatcgccggcggcttcatcatgtactgcatcgtgaagacctgcaagggcaaggccaaggaggttcacccgatcatctggattgtggccgcgctgttcattctggacttcgtgtgcatggcgattctgtaacgctgattgacaacggattagcctttaaggattaatccgccgccatacggcataaaggccgggctctcacaagggcccggcctttgttgttgccacagtgatcaacgcccatgagtaccttcgatgatcatccgccattcaatcaacggctggccatgactcggacatggcgcggcacgtcaagcggattttgctgttgggcataacaacagacgagagaatagatccggtcgtgagcaacaggataggtgccatgcggtgccgtgtacaaactgttgtcagttgtcaacgctttttagcgtggctccaatcatcttaatggctgttttccgccattcttgatgcatgagaatagttgtcaactgacaactgaatgtacatggcagcagcacgagtgccctattcaacatcgaaatatgtagcgcgaagaagccgaaaaaccaaaaggcttctataccgaatgaaacggtatagaagccttttggtttgcgattaagctcttctcacccgagagaagctagagaacgatcagtcctcgaatgccgaaccgttaagcgggaagccctgcgggcttcccgtaggggaggggggggaagcggctatgccgcgaccgatccgggagcgggctttcgtcctcgaacggttcaaagtcgcgacggacgcggcgacgcgggcgctcagtgcgctcttcgcggtcggcgcggtagtcgtcgtagttgtcgtcggtggcgtagcgcgggttgcggtccgagccacggccacggccgccacggaaaccgccacggcggtcatcacgatcgccacggtcatcgcgatcggaagagcgacggcgacgcggacgatcatcatctcgggagtcgcgagcatcacggtcatcgcgatcgtcgaagtcacggtcggcagaacgacggcgacgcggacgatcatcatcgcgatcatcgcgatcgaagtcacggtcatcggagcgacggcgacgcggacggtcgtcgtaatcatcctcgaagtcatcggagcgacggcgacgcggacggtcgtcacgatcgtcgaagtcacggtcatcgcgatcggagcgacggccacggctgccacggcgatcgtcacggtcaccacggccacggccaccaccacggcggtcatcacggtcgccacggctcgggcgggcattgttctcctgatcctcgaaaccggggatggccagggagatcttgccgcgatcatcgacgccctgaacgatcacctcaacggtgtcgccttccttgagcacgtcttcgacggcgtcgatacgctcgccgttggccaggttgcggatctgggagatgtgcagcagaccgtcggtgccgggggtgaggttcacgaaagcaccgaacgacgtggtcttgacgaccttgccgctgtaggtttcgccggcctcaggcacgtgcgggttggcaatggaatcgatgatggacttggccttctcagcggcctctccaccctcggaggagatgaagacggtaccgtcatcctcgatggcgatttcagcgccggtgtcttcctgaatctggttgatcatcttgcccttcgggccgatgacttcgccgatcttctccaccgggacggaggtggtgatgatgcgcggagcgaactcgctcatctcggccgggccgtcgatgcactcgttgatgacctcgaggatcgtggcgcgggcttccttggcctgctgcagagcggcggccaggatgtcggccggaatgccgtcgagcttggtgtcgagctgcagggcggtgatgaactcggaagtaccggccaccttgaagtccatgtcgccgaaggcatcctcggcacccaggatatcggtgagggtcttgaagatgtgcttgccatcaacgtcgccggacacgaggcccatggcgatgccggcaaccggagccttcagcggcacgccggcagccaaaaggctcagcgtggaggcgcacacggaacccatcgaagtggaaccgttggaaccgatggcctcggagacctggcgaatggcgtacgggaactcttcgcggctcggcagcaccggcacgagagccttctcggcgagggcgccgtggccgatttcgcggcgcttcggggagccgacgcggccggtctcaccagtggagtacggcggcatctcgtagttgtgcatgtaacgcttggactgcggaccggacagcgcgtcgatctgctgctccatcttgagcatgttcagggtggtgacgcccagaatctgggtctcgccacgctggaacagggcggaaccgtgcacgcgaggcacaatgtccacctcggcggacagggtgcggatgtcgcgcaggccacggccgtcgatgcggtagtcctcggtcaggatgcggcggcgcacgatctggcgctgcagttccttgaaggcgttaccgagttccttgtccttctcggcatcgtccatatcggtgaactcgtccgcgagcacctcgcgcacgtgctccttgatctcgtggatgcggtcctggcgcggcagcttctcggcgatagagagcgcctcgttcagatcctgatgggcgatctcgtcgatgcgggcgtacagttcgtcggtgtactccgggaagagctggaattccttggtctccttggcggcgatcttcttgagctcatcctgagcctcgcagatcaccttgatgaacggcttggcggcttcaagaccaccggccacgacctcctcatcgggcttggtctggccctcgtcgtagatgaggtgccaggcgttcttgccggcaccggcctcgatcatggcgatggcaacatcaccgttctcgatcacgcggccagcgaccacgatctcgaacacggcgcgctcacgctcactccaacgcgggaaggcgacccactggccgtcgatcagcgccagacgcacaccggagaccgggccttcgaacggcaggccggagatcatggtggaggcggaagcggcgttcagggcgatgacatcgtaagcgtcatcagggttcacggcgagcacggtctcgacgacctgcacttcgttgcgcaaggtgtgcgggaacagcgggcgcagcgggcggtcgatgatgcggcaggcgaggatggcctcggagctcgggcggccttcacgacggaagaacgagcccgggatcttgccggcggcgtacatcttctcttcaacgtcgacagtcagcgggaagaagtcgtagttctccttcgggctggaaccggcggtggtggtggacagaatcatggaatcgtcgtcgaggtaggcggccacggcgccatcggcctgctgggcgagacggccggtctcaaagcgcagcgtgcgcttgccgaacgatccattgtcgatcacggcctcaacggccttgatttcgggaccctccatagggttcctccttctttaattttctaattattcctacatactgtgctgcggtttggcgactcgcttgaaccgcaactgtcctcttcagcggacgtcacataccttgtttcgactggccccttggccgccgttcctcgtgtcaacctcttcattcgggttctcctgtcggcctcacctgctggcctatcctctaaccctcttgccgttgttgccgttggctggcgatatgtaaacgcccgggcaccatcctaggtgctcgggcggaagtcttcaattatcgacgcagacccagacgctcgatgagggaacggtaacggttgatgtcaacgcgcttgaggtagtcaagcaggcgacgacggtcaccgatcatcagctgcataccacgacgggagtggtggtcgtgcttgtgctccttgaggtgctcggtcaggtcggcgatacgcttggacagcagagccacctggacctcgggggaaccggtgtcaccttcgtgcgtcgcgtactcgttgataatctgggtcttctcgtcagccgtcagtgccacggcgtcctccttattgtgtcgttgcgcggtgtttcgtgcaggttcgctcgaaacgctctctatccgcgggcgaaattacgccaaatgaaaactatacggcaggggccggactggggcacacgcgctcacacagtggtgagcaatccgccaaacaacaccacgagcagggcgatggtttcaatcacgaagtacagaatgaagctcgcccagcttttggtcagcacgttcagcggcgaggtcttccggataatcaccagcagacccacgaacatcagggcatatacggcgatgccgatcgccgcacccataatgcccagattcgcggcattcgccaggccggcctgcttaccgtagaccacgtacgtggaataccagaaattgagattgagcatgctgagtcccgcgatgaactgctcgccggccaacccgatcacgaacacgatcagccacggccaggacggcgagacgaccaccgccatcgccaatccgacgtacgcaatcaccacggtcacccaaccgaccagtgcgatgccttgcggagacactcccccgagcacggccacaatggagtcagtattatttaccgccaacgaacggccgaaccagtacggcgcaacgatggcgcacagtacggcaagaataatcagcgcccaacgcaacggatgcgaacgacggcgctcgatatccgccagagacaaatcggtctcgggtatggaagcctcggggtgcttggaaacctcgacggtctctactttgccgcctacgatttccgtcgcctcgttaggttcttgctcgttggattcctgctccatgcaccgcctcgccgattacctgctcattgcc

SEQ ID NO: 2371 - DNA, 25791 bp, Unknown
  R50_10m  MAG No. k141_2568
agggcctgccggacgacgtcaagcacgacatcctctacggccacgacttcaaggtcaacgtctcctaccgcaatcgctggggacgcctgcgtgaatactccaccggcttcgaaggcgtgatccgcacgctcatgcgacgccacgacgaaaccgattcgcagtccatgcgcgaatactacgagtcgtacatgcgcgaagtgccctgccaggtctgccacggacgtcgtctgaagcccgaggtgctctctgtcaccgtggacggcaaatccatcttcgacgtatgtgacatgcccgtcgtacgcgaactcgcctggatcaacggcctgaaactcgaaggctcggcacagctgatcgccggcgaagtgctcaaggagatcaaggcccgactcggcttcctgaacgacgtcggcctcgactacctgaccctctcgcgcgcggccgccaccctgtccggcggagaagcgcagcgcatccgactcgccacgcagatcggctccggcctggtcggcgtcatgtacgtgctcgacgagccgtccatcggcctgcaccagcgcgacaacgaacgcctcatcgaaaccctgcaccacctgcgcgatctcggcaacacgctgatcgtcgtcgaacacgacgaggacacgatacgccgcgccgactgggtggtcgacatcggccccggcgccggcgaacacggcggcgaagtcatctactccggccccgccaagcacctcatcgaagccaagcgctccatcaccggcgactacatcgcccaccggcgagagatcgccgtaccctccaagcgccgcaagatccacaagacccaggtgctcaaagtcgtgggtgcccgcgagaacaacctcaagaacatcgacgtgagcttcccgctcggcgtgctcaccgtggtcaccggcgtctccggctccggcaaatcctcgctggtcaacacgatcctctacccggtgctcgccgacaagctcaacggtgcacgcatcgtacccggccgccacaggcgcgtggaaggcgtggaccaggtgcgcaaggtgatccacgtcgaccagaacccgatcggccgcacgccgagatccaaccccgccacctacaccggtgtgtgggacaagatccgcacccttttcgccaagactcccgaagcccaggtgcgcggctacggccccggccgcttcagtttcaacgtcaaaggcggccgatgcgaggcctgccacggcgacggcacgctgaagatcgaaatgaacttcctgcccgacgtctacgtggactgcgaggtctgccacggcaaacgatacaaccgcgagacccttgaagtcacgtacaacggcaagaccgtggccgacatcctcaacatgcccatcgaggaggccgccgacttcttcaaggcgtacaccggcatctcccgatacctgaagaccctcgtggacgtcggcctcggctacatccgactcggccagcccgcacccaccctgtccggcggcgaatcgcagcgcgtcaagcttgccaccgagctgcagcgccgatccgacggcaaaaccgtgtacatcctcgacgagccgaccaccggcctgcacttcgaagacgtgaacaagctgctcaaggtgctgcagtccctggtggacaagggcaatacggtcatcgtcatcgaacataatctggatgtgatcaaggaggccgactggctgatcgatctcggtccggagggtggcgacggaggcggcaccatcgtcacgcagggcacgcccgaacaggttgccgaatgcgaatcctcatggaccggcaagttcctgaaatccatgctttagccttccattgcagctgacctcgggtgggttggggtggtatgttgctggacacgctccgggccgctcaggccaagtctttacggtccagcagcacataccaacccacccaatccctgatgattggttttgcttaatagcgaggaggattatgacgaacgatattgagcggcatagtccggatgagtggcggaagaccgcggcggcgttaatgccggaaagcgtagctgtgggcgccggggaaacgacggcgaaggtgaatgcgaatggggcacctttgctgggggattctcgcgacctgttccgacccaagacctcggatatccccgccaaacccggtgtgtacaaatggcgcgacggggaagggcgcgtcatttatgtgggcaaggcgaagaacctgcgcaacaggctcaccaattatttccagccgctgtatctgctgcatccgcgcacgcagaccatggtgctgaccgcacgcagtctggagtggacggtcgtcgccaccgaactggaatcactgacgttggaatacacgtggatcaaggaattcgacccacggttcaacgtgcagttccgcgacgacaagacctatccgtatctcgcggtcagcacgggggagcgaattccgcgcgtgtgggtcacgcggtcgcgcaaacggcgggatacccggtatttcggcccctatgccaaagtgtgggaattgcggcacagtcttgaccggttgctgcgcacgttcccggtacgcacctgcaccaccaacgtattccacaaggcgcaactgaccggacggccatgcctgttcgcctccatcggcaaatgctccgcaccctgcgtgaaccgtatcgaagcggacgaacaccggcggctgtgcgaacagctggtcggcgtgatgaccggacgactcggacggccatacatcgcccagttgacccgcgacatgaaagaggccagcgccgaactcgaattcgagaaagccgcccgactgcgcgaccagatccaaatgctggaaaccgtggtgcaacagaacgccgtcgtcttcgaccaggatgtggacgcggacgtgttcggcttcgccagcgacgagctcgaagcctcggtgcacgccttttatgtgcgcgccggctctattcgcggcgaacgcaactggagcgtcgaacgagttgaggacatcgatgacgccgacttgatggccgactttctggtgcaggtgtattcggacgccgccggggacaatcacccccagtcggccgcgaccatctccaccaatcgcgaggccatcggctccacgcagaccatcacggccacggacgctgtggcacgcgcccaggccacccgagaacgcaacacccgtcaggagaccaccggacgcgcggacctgctggcacccatcgcaccggtaccgcgcgaaatcatcgtgcccgtcgaaccggcccgccgtgaggaactcgaaggctggctgaccaatctgcgcgggggagcggtgaccatccgtgtggcctcgcgaggcgacaagaagcagcttatggaccgcgccaacgagaacgccagccaagcactgcaacgcagcaagatgagccgcatctccgacatgggcgcacgcacccaggccatgaacgatgtggccaaggcattgggactcgcgcaagccccgctgcgcatcgaatgctacgacatttcgaacactgtgggcggtgccttccaagtggcctccatggtggtgttcgaagacgcgatcgccaagaaatccgaataccgacgcttcgccgtccgaggcaaggacggcaaaggcgcggtggatgatctgtccgcgctttacgagacgctcacccgccgcttcaagcacggcaacatcgccggcgactccggcgaaagcatcgacgcggaacagcgtgtggcctcggccgccggcaagatgaccactgccgtggcggcggagacaatcgttgcgaacggtaacgacaatggtgagggcggttccgacatcagtggcaaggggcacgcggtgccggtcggagtgcagaacgatgcacgggagtcctcgcccgacatcgtccagcagaacacaaaccggcatcactttgcctacacgccgaacctggtggtggtcgacggcggtaagccacaggtcatggccgccgccaaggcgcttgaggactgtggcgtgatcgacgtggccgtctgcggactggccaaacgcttggaagaggtgtgggtgccggacgacgactatccgatcatcctcaaacgccagtccgaaggcatgtatctgctgcagcgtgtacgcgacgaatcccaccgcttcgccatcacctaccaccgccaacagcggcgcaaaggcgccctgcgcagcgcgctcgacgagattcccggcatcggcgaaagctaccagaagcggctgctcaaccacttcggctcggtcaaagccatgcgcgaagccagtgtcgaggacttcgagaaggtcaaaggcatcggccacgccaaagccaaagcgctgtacaacgcgctgcacgagcagtgagccggcccggtccagcagcccagagtgaattttcggttgcggggcctgtggttgacatattcgaagcaaagtgtcggctagcatgggaacagacatcaaggagggatatggccaatcatcgttgcgctgtactcggcaaacccgtcgcgcactcattgtcacccgtgctccacaacgcggcttatcgttcgctgaaactcgacgattggctgtacgacaagcacgaggtgggggaagacgacctcgacgctttcctcaaaggccttgactcgacgtgggctggcctgagcctgaccatgccgttgaagaagaccatccaaccgtacggtgttccggaaaatctgtgggccaaggaactgaaggtggcgaataccgcggtattcgactggagtgtggctaccgatgatcccgcttggccgaacggcaagccgggcatcaagctgtacaacaccgatgtcatcggcatccaactcgccttcgaccacgccaatcgcgaactcggcgaacaccacaccgcatcgagaagcggcgccgcgttgatcctcggcaatggcaacaccgccacttcggcgttggccgcatgctgcatgatgcccgaaatcggccatatcatcgtcgccgcccgccaccctgggaaaaacaccgggcttaaaccagtggccgaaaagttcgtcaacgtgcataacccgtacagcgaaatcgaattaggcgacgatcaggccctgctcgaggcagcccgcaacgccacctatgtcatcaacacgattcccggacatgcggccgacaacgtcgcggatgccctcaccaatgccggaaccgagccattctccggactgctgctggacgtggtctacgatccacgccccaccaagctcatggaagcctggcgcgctcatggcggtcacgccatcggcggcgaagaaatgctgctgtaccaagctctcgtacaggtattgctgatgaccggtatctgggatgacgacccgcccagcgatgccgaccagcgtctgcaggacaccaccaccgaagacgaccagctggagatcgcgatgcgcaaagctcttgaggaggcgttgtaatgagtcaacagacaacaatccgcgataccggcgaggcggccgccacgaatgcgccggcgaattccgcgacatccacatcgactccggacaaccagccgaccccgcttgatgccttcgaggtgctgctcatcaccggtatgtccggcgcaggccgctctcatgccgctgactgcgtggaagacatgggatggtatgtggtcgacaacctgcctcccaaactgcttatcccgcttgtcgacatgatgaccacctccggttccggatcggggtcgggcgtccacaagcttgccgccgtcatcgacgtgcgctccagctatttcgacgagctggccgccgtgctcggccatctggatgatctcggcgtcaaaacccatattctgttcctcgacgccagcaacgaagtgctcatcaagcgctatgaatccgtgcgccgcccgcacccgctgcagcacggcaaccgactgatcgacggcatccttgaggaacgtcacctgctggaagacctcaaggagcgagccgactgggtcattgacaccagctccctgagcatccaccagctgtccaccaaactctacgagacgatgctcggttccggccccaccaccgtggcggtacacatcttcagcttcggcttcaaatacggcatgcccatcgacgccgatttcgtggccgatgtgcgttttctgcccaacccgttctgggttcccaacctgcgcgagcttaccgggcacgacaagccggtcgccgactacgtgctttccagcaagggagccaaggaatttctcgacgcttatgagaaagctatcgagattgcgttggaaggatacgcccaggaagacaagcactatgtaaccatcgccgtcggctgcaccggtggtcagcaccggtcggtggcgatgagcgaagagctggctcgccgcttacgcgcacatgggctcaacgtaaccgtttccgcgagagaacagcataagcgtcactcatcgtaagcaggcgtcgagcggtcatcgggcaagcgttcggtgaccacactgcgagaaagcaaagcccataatacgtatcaaacgggttcgcttgtccaccagattaggtatcacagaaagccgatggcttccgaccgtatgacagcagataacggcacgaagcgcctgaagcattgagaagaacgggactgtaggaggtagatcttggctcttctggacgatgtcaaaagcgagttggcggcctttgaaggcgattcaccagccgcgatcaaggcccaagctgcggccatgatccgttttggcggcggtcttcgaccggtacagaatacatacgttatccaagccgtattcacctcgcttgacgttgcagaatggctgaagaacacgttgaggaacacgttcgggcatgaagccgaggtcaaccacctcacccgtcagaccccgaacggccctgtcgagacctacgtggtgctcatcacccgcaacgtagtggccttggctttgcagaccggactggtcgaccgccgcaagcagcaggtccgtggactgccgtctgaagtggtcaacggatccatcgcccaaatcaaagcagcatggcgcggcgccttcatggcccgtggcttcctatccgatcccggtaaggccagcttcctggaaatcgcttgccccacggaagaggccgccatggccctgtgtggcgtggcccgtcgtctcggcatccaggccaagcatcgcacgctgcgcagctccgagcgcgtgaccctcaaggatcctgacgccatcgaacgcatgctcaagctcatgggcgccacccgttcggcccgcgaatggaccggcaagcgctccgacggcgaggcccgcggcaaggccaaccgtctggccaacttcgatgacgccaatatgcgccgttccgccaaggctgccgccgaagccagcgaaaaagtgcagcatgccttcgaagtgctcggcgataacattccggacaacctccgtcaggccggccagctgcgcatcgatcacgtggacaagagcctcgaggagcttggcaagatcgccgaaccgcaaatcaccaaggatgcgattgccggccgaattcgccgactgcttcagcttgccgagaaaacggagaaggctcgcgcagccgaaggcaagtaacccgacaacgacgtaacgaaacaccgcattcagtcagtagacgaatgcggtgttttgttccggaatgcctgtaatatgcaaagtggcaaaattggccactttgacgtgcgattcgtcaaggaaaggatattcatgaagacactcaaggaccttggagatctcaagggcaagcgcgttctggttcgcgctgatttcaatgttccgctggacggcaccaccatcaccgatgacggtcgaatcaaggctgctctgccgaccatcaagaccctgcgcgaagaaggcgccaaggtcatcctcatggcccaccttggccgcccgaagggcaaggtcgttcctgagctgagcctggccccggttgccgcccgcctcggcgagctgctcggcaccaacgtgccgctggccaaggacacctacggcgaggacgctcaggccaaggtcgccgccatgaacgatggcgatgttgtgctgcttgagaacgttcgcttcaacccggaggagacctctaaggacgccgacgaacgcgccgcttacgccaagaagatcgccgccctcggcgaggccttcgtttccgatggcttcggcgtggtccaccgcgcccagggctccaactacgacgttgccgccgatctgccggccgccgcaggcctgctggtcgagaaggaagtcaaggccctgtccaaggccaccgagaacccggagcgtccgttcaccgtggtgctcggcggttccaaggtctccgacaagctcggcgtcatcgagaacctgctcgacaaggccaaccgtctggtcatcggcggcggcatggtgttcaccttcctcaaggccaagggctacgaggtcggcacctccctgcttgaagaggaccagcttgagaaggtcaagggctacatcgagaccgccgagaagaacggcgttgagctcgtgctgccgaccgacgtcgccgtgaacgccggcttcccggccggtgacaccccggttgctccggaagtcgttgccgccgacgccatcccggccgacaagatgggtctggacattggcccggagtcccagaagctcttccacgacaagatcgtcgactccaagaccgtcgtgtggaacggcccgatgggcgtgttcgaggttcctgagttcgcctccggcaccaaggccgtggcccagggtctggtcgacgccaccgcagccggtgcgttcaccatcgtcggtggcggcgactccgcctccgccgtgcgtaacctcggcttcccggaggacggcttctcccacatctccaccggtggcggcgcttccctcgagttcctcgaaggcaaggagctccctggtctgaaggtgcttgagtaatccattttctagctcccctccttgaggggagctacgtatttttttagaggggaaacatatggcgtccaaacgcattccgttggtggccggcaactggaagatgaatttcgaccatcttgaagccacttacttcgtgcagaagctggtatggctgttgcgtgacgctcgctttgacttcaaacgctgcgaagtcgcgcttttcccctcgttcacgtcattgcgcagcgtacaggtgctggtcgaagccgacaagctccatgtcgcctacggcgcacaatccgtttccgtgaccacccaaggtgccttcaccggcgatgtgtccgcggacatgatcgcccatctcggctgctcgtacgtcatcgtcggccactccgaacgccgcaaataccatcctgaagatgacgccaatatcgtcgatcaggtacgtgccgtgctcgccgccggcatgcagccgattttgtgcgtcggcgaaagcttcgaggaacgacgtcaaggcattgaactcgatttcgccgtgggccaggtacgagacgtcacccgcgatctcaacgaagaacaagccgccgaactcatcgtggcctacgaacctgtctgggccattggcaccggcatggtggccactccgcaatccgcccaggatgccgcaaacgccatccgcaacgatttgaagaccacttttggcacgaaggtatccgatagcgtacgtatcctgtacggcggatcggtcacctcgaaaaacgcggcggaactcatttcccaacccgacgtcgacggcttcctgatcggaggggcggccctggatgttgaggaactcgccaaaatcgctcgactggcactgaaatccacgaaatcacggaactaataccacggttttcccgtgtgtgcgctatgctggtcaacagtccaatcaatccggaggtaccctgtgaccgctcttaagatcacgctgcaagtcatcgtcgtgctgctcagcttcgtgctgaccctgctcatccttatgcacaagggcaagggcggcggtttgtccgacatgttcggcggcggtctgacccagaacgccggtacttccggtgtcgccgaaaagaacctgaaccgttggaccgttatcatcgctctggtgtgggtggcattgatcatcggcctcgacatgatgaccaagttcaacctcggctgatcggcttgcacgccatatagacttgtcgctcgcgacccatgaccgttaccgtcggtcatgggtcgtatgcgttctatcgagtattacgaaaggacatcaccatggtcactatgaaccgcaacaaagtcgttatcgtcggcactggccaggtcggtgccaccgccgccttcggcatcgtcacgcacggcctgtgcaatgagctcgtgctcatcgaccgctccgccgccaaagccctgggggaggcccgcgacctcgatgacggcagcgaattccaggaccgccacgtcaaggtgcgcgccggcgactacgccgactgcaaggacgcggacatcgtcgtcatcaccgtgggccgcaagccgccggccaactccaaccgcatggccgaactcggcttcaccgtgggccttgtgggcgaagtggtcgacaacgtcatggcctccggcttcgacggcgtgatcgtcatggtctccaacccggtcgatgtgatggcctggtatgcctggaaacgttccggcctgccgcgcacccaggtgctgggcaccggcaccgcgctcgacacctcgcgtctcaagaccatcatcggcgaagagaccggcctcgacccgcgtaacgtgggcggcttcgtgatgggcgagcacggcgactcccagttcaccgcatggtccaccgtctcgctcggcggcaagccattcgcccgcttcctggccgacaaccaagaccgtttcgcctccgtgtccaccaccgaaatcgaagagaagacccgcacccgtggcgatgagatcgtcgcggccaagggcggtaccaacttcggcatcgcctccaccgtggccggcatcgtgcagaccatcctgtgggacgaacgccgcatcgtacccgtctccaccctgctgaacggcgaatacggcgaacatgacgtgttcctcggcgtccccactgaactgcgcgccaatggtgccaacgagatcgtcgaactcgatctgagcgaggacgagcaggccaaattgcaccattccgccgaactcgtgcgtgaacactgcgaggggctgctgtgattctcgacgccatcacaccgaaacaaccccgactgctggtcgccgacctcgacggtacgttgctgcacgacgccgaggtattcgaggaccggttcatcacccagcgcagcatcgacaccatcaaccgcgcgcacgatgccggactgaaattcgccatcgccaccgcgcggccggtgagtaccggcctccagttcgccgaaaaactgccggtggacgccgtaatctatctgaacggtgccctcatcgatttcgacccggcccactccgacttcgacctgctcacctcaggtgccacgccggccgatgagaaccatttgatcaagattggcttctcctcacggcgtgcctgcgaagtctgtctgttcctgctcgatcgcatgcccggcctgaagctcggcatcgtgatgaacgacgtgcgctacaccaacttcgatgtgcgcgtgtattggaaaacacaggccttccaatatacgaacttccacgacgtgcccgaaggcgtggcggataagatcaccatcttccccgagcctgaacagtggaacgagctgcgtgcgctgattccgccggacttcgacatctccattagcgaaggcgtgatgtggatgctcatgaacccgcaggccaacaaggagcacgcgctgcacctgctgtgcgaacgactggacgtgccgctcgaacagaccgccgccttcggcgacgacctcatcgatatcaacatgatgagcgaatccggccggggtgtggccgtggccaacgcgaaccccaaggtgttgtctatcgccgacgagatctgcccgcccaacaacgaggacggcgtcgcccaatggattgaagcgcagttgggctgaaccggccgagactcgagaacacgccaaaattgaacttgtgttgaaccgggagtatgctttgaactgttgttcaaaagataaattgaactcccggttggaggcataaggatatgagcgtatcggtgtttgcggaacgtctgcgcaatgcgatgaacagcaggggactgaagcaggtcgatctggtgcacgccgccgaacatcgtggcgtaaagatgggcaagagccatatcagccaatacgtggccggcaagaccatgccccgcgaagacgtgctcgaattcctggccagcgaactggacgtcgacgcgaactggctgcgcggcgaggaatccaccccgcaattgaactcggacgcttccaacagcgtcacggacggcgaacacgccgccacgccgcttgccacgggcactgccaagcccctgacggacagcgagattcccgtgggccgccgccgtaccttcggcaaatcgcacaagctcgacaacgtgctctacgacgtgcgcggcccggtcgccgacgaggcgatgcgcatggaggccaacggcacccacatcctgaaattgaacatcggcaatccggcacccttcggcttccgcacgccggacgaagtcgtctacgacatggcccaccagctcaccgacaccgaaggctactcgccgtccaagggcctgttctccgcgcgcaaggccatcatgcagtacgcgcagctgaagaacatcccgaacgtcaccatcgacgacatctacaccggcaacggcgtcagcgagctcatcaacctgtccatgtccgcgctgctcgacaccggcgacgaagtgctcgtgccctccccggactacccgctgtggaccgcctgcgtgaacctggccggcggcaccgccgtgcactacctgtgcgacgaacagtccgaatggtatccggacatcgatgacatccgctccaagatcaccagcaacaccaaggcgattgtcatcatcaacccgaacaaccccaccggcgcactttacccaaaggaagtgctccagcagatcgtcgacatcgcgcgcgaacaccagctcatcatcttctccgacgaaatctacgatcgcctcgtcatggacggcctgcagcacgtctccatcgcctcgatggccccggacctgttctgcgtgaccttctccggcctgtcgaaatcgcacatgatcgccggctaccgcatcggctggatgatcctgtccggcaacaagcgcattgccaaggactacatcgagggcctcaacatgctcgccaacatgcgcatgtgttcgaacgtgcccgcccagtccgtggtgcagaccgcgctcggcggccaccagagcgtcaacgactacatcgtgccgggcggccgcgtgcacgaccagcgcgacctcgtctacgacatgctcaaccagattcccggcatcaccgccgtcaagccgaaggccgcgttctacatcttcccgaagatcgacgtcaaacgcttcaacatccactcggacgagcagttcgcgctcgacctgctgcatgacaagcacatcctcatcagccacggcggcgcgttcaactggcatcgccccgaccacttccgcgtggtgtacctgccgcgcatgggcatgctgcacgaaaccatgggggagctcgccgacttcttcagctactactggcagagctgatccttggtacaggcgaacacgatcgatgccgggctgggcaccaaaccggtgccccgtctggccctgaccatgtcggtccccaccatcgtggcgcaggcggcgaacgcctcgtacacgatcatcgaccgactgttcatcgggcacatccccgaagtgggcaacgcggcgatgaccggcgtgggcatctgcttcccgattctgccggccgtcaccgccttcgcctcgctgatcggcgcaggcggcgcgcctcgcgcctccattgaacttgggcgcggcaacttcaagaaagccgaacgcatcctcggcaccagcgccgcgttcctcatcgccatagccctgaccctcaccgtgctgctgcatttggcgaaaccactgtggccatggtctccgtactcatcggcaccggcatatccatccttcttgaccccgtgttcattttcgtgttcggatggggcgtcaggggagcggccgccgcgaacgtgctcgccacattccccggcttcttcgcctcatggttcacctcggaacagacggtcatcgacatcgtgacccgcatgatgccgattttcgtctgcggctggggtatcttcggcatccagatgggcgcgcaatgcgcactcgtcggcatgggccaggccaaacagtcggtgttcttggccatcttccgcaagatcatcctgctcgtgccgctcgcgctgctgctgccgcactggatcggcgtcaacggcatcttcatcgccgaacccatctccgacgccacctccggcatcgtggccggcttcctgttctatgccacctaccgcaagattcggcgagatatggtctagactcctgattcaatggatgtgccgtctcatgcgttgcgaaacacgggacggatagaatgcctcgcaaaacgggtgcccgttgtttcgtgatatgaaggagattttatgccggtggtgtcgcgtcgtgcgcagccaacgtgatggccataatcgccgaaagcagggagaacaatggcagcacgcacaacacgacggtcagcagtcccaaagcttcacggccgatgcaataagcgacaagacctgcattgtcaattgccgatagcgctgggcagaaatcggtgtgtctaccagtgttgtagctgtaggtaaagaacgtgagacctgaccagaacagggcaacgggaacagagccgatggcgcgaaaagccctgtactcccgcaacggtcagacagagaatcgcgacaacactcagcgcagtcaccgtcataaaccacagtggtgaggtgacgcagactccataatcgtcagttgcttggcccgagagatagtaggtcattctgccaatcgccggacagttcggatgcagcatcatgccgccccaaatgcgctcatatagtggtgtatagtggtgcgaacgatacaccggcaccgctgagcgtcgcaacaaccgccatcaccgaccgaccgccagactccggcacagaccgggaagaactaccgtcgcggagcatcggcgataccaatggcaacaccgaggatagccgggaccacccagccgagctggtattgctgcaagggcagcatggccagcgtcgtgtccagccagccgatggagccgccgaagacggtgatcaggctggagatgcaggtggcgaaggagtcgatgcccaccagcagcacggtccagaagtagacatgcgggaatcgcgcgccaagcgacttgtgggtcagcgccagcagcaccagcacgatggcgatcggatacagtgcggacaacaccggcacggaaaccttgatgatcgcgcttagcccggcgttggacacgatgaaactgaacacggtgaagatgacctgccaggtgcggtagctcaacgttctccctgcaacggtctggaaccgagtgtggaagtaggtggcgcaggtaccgatcagtccggtgcatacgttgaggcaggcgatgacgaagacgataccgaggaacgcggtaccgaacgcgccgaacagggacgaggtgagattggtgagcacggtcgcgcccgtgtctttggcgggatcgatggtggcgatggcaccggacaccacgcccacgtagctcagtgcgccgtagatcacgatcagcagcacaccggtgccgagtccggcatacgcggtctccttctgcacttgcgattcgtcatcgacctgctgggtgcggatattcgcggaaatcacgatgccgaaatagagcgcggcgagcagatccatggtctggtagccgtcgaggaagccacgtgcaatctggtttgtggagtagtcgcccatcggtttggccggggtaccgataccgtggattaggcaggcgatgaacaggacggcaatcagcaccagcagcaacggtcccatgaatcggccgagcactttggagagtttttcgggatgctgggcgaacaggaacgccagtgtgaagaacacgagcgagtagatgagttgggccagccagccgtaggaggacggcacgaaaggcgccaccatcatttcgaacgaggtggtcgccgtacgcggaatcgcaaagcaggggccgatggtgagcatgatcgccaagccgaggaacagggcgaatttgggggagacccggccggcgagtttgtcgaagccaccggcgaaggtgaccgccagcacgccgagaatcggcaggccgaccgcggagacgatgaagccgatggccgccggtatggtcgcggaaccggcctgagctccgacaaacggcgggaagatcaggttgcccgctccgaagaacatcgaaaagaaggtaaaggtcatcaccaaccgctggcgtgcgacaagtttgttcattacggttcggcctttctctcatgtgctcgtactactgtagcaacaaacgtaagaagccccgaccggttggggtcggagcttctgtgagctaatcagttaatgcgcgaaatgcgcatcagctaataatctcaggcgttcacgcggtcgatgccggactggacgtcagccagcacggaatcccaggacttgatgaaggcggcgacaccgtcggcctccagcttgtcagtgacgtccttgaggttgatacccagctcagccagcttgttgatgacggcgtgggactcctcgtaggtgccctcgatggacggagcgccgttgccgtggtcggccagagcgttcagggtcttctccggcatggtgttgacgatgtgcttggcaacgagctcgtcaacgtacttgcagtcggagtaggcggcgttcttggtaccggtggaggcccacagcggacgctgaaccttggcacccttggcagccaggtcggcccaacgcggatcctcggcaaacttcttctcgaagagctcgtaagccaggcgagcgttggccacagcggccttgccctccagagccttggcctcgtcggagccgttggcttccagcagcttgtcgacagcggtgtccacgcgggagacgaagaaggaagcgacggagccgatgtgcttcaggtcgtggccgttggcgtcagcctgggcgatgccctcgatgaaggcgtcgatgacctgctcgtagcgctcgagcgagaagatcagggtgacgttgacggagatacccttggccagggtggcggtgatggccggcaggccttcgagggttgccggaatcttgatcatggcgttcggacggttgaccttctcccagagttccacagcctgcttggcggtgttctcggtgtcgtgggccagacgcgggtcgacctcgatggagacgcggccgtcgacgaagtcggtagcctcagcgatctcgcggaagatgtcggtggcgttgcgcacgtcggtggtggtgagctcgcggacagcggtctcaacgtcaaccttgccgagctccttgagctgagcgtcgtacgggccgacctggctcagggccttctggaagatggacgggttggtggtaacgccgaccacgttcttgttggcgatgaggtcctgcagggagccggactcaatgcgggagcgggacaggtcgtccagccagatggaaacgccgttgtcggacgtacgctgagttgcttcagtcatttattttctccttggattcaagccctaggctcccctctcctgggagaggggagctgtccgcaacgcggactgaggggagtgggctcaagcattgctcccctcagtcaagctttcgcctgacagctcccctcagggaggggagccaacaattattgaattattgcttagttgctcacttggcggcttcgacttcggcgatggaggccttggcggcttccaccacgtgctcggcggtgatgccgaggtcgatcatgttctgagcgccgtcaccctgcaggccgaactgctcgatggagacaggcttgccgtaggaaccgaggtacttgtaccacggcatggcaacgccggcctcgacggagacacgagccttgacagcggccggaagcacagcctccttgtactcggcgtcctgctcctcgaaccattccatggacggcacggacacgacgcgagccttgacgccctcgccggccagggtcttggcggcagccacagcccactggacctcggaaccggaagccatgaggatgacgtccggagtaccttcggtgtcgaccaggatgtaagcgcccttcttgacaccgtccttggccttggcagcggtctcggcaagaaccgggacaccctgacgggtcagaaccatggcgccaggcagggtgttcttcttctcgaagaagtaacggtaagcctcggcggtctcgaaggcgtcggccgggcgaatgacctcaagctgaggaatcgcgcggaaggaagcaaggtgctcaaccggctggtgggtcgggccgtcctcgccgacggcgacggagtcgtgggaccagatgtacaggttcgggatctgcatgagggcggccagacgaacggcggaacgctcgtagtcggagaacatgaagaaggtgccgccgaacggacgggtgtgggagcccagcaggatgccgttggtgatgcagcccatcgtgaactcgcgcacgccgaagtgcagctggcgaccgaactcgttgcagttcggccactgcttggtggcgcactcggccggggcgaaggtggcagcgcccttgaggtcggtcttgttggagccaccgaggtcggcggagccgccccagagttccggcatgacggcggcgatggcgttgagcacggagccggaggcgccacgagtggcgacacccttgccgacttcgaaggtggcctcaaggtcgtcaagggccttgtcgaagccttccggcagttcgccggccttcagacggtcgtacagggcggccttgtccgggttggccttgcgccaggcgtcgaacttctcgtcccaggccttgtgggcctccaggccgcgatcggcgaccttgcgggcgtgggccagggcttcttcgtcgacgtggaaggactcctccggatcgtagccgaggagtttcttgaggccggcgacggcctcggcgcccagcttggagccgtgggaggacgggtcgttggtcttgcccggggtcggccaggcgatcagggagtggaccttgatgagcttcggctggtccggggcggcggcttcggccttggcgatgacgtcggccagaccctcgatgtcctccttgtaggagccgtcgggctggatgaagctgaactcgtcggtgtaccagccgtaggcctggaagcgcttgagcacgtcctcggccagcaccaggttggtgtcgccttcgatctggatgcggttggcgtcgaagatcacggtcaggttgccgagcttctggttggcggccagggaagcggcctcgccggagatgccctcctcgatgtcgccttcaccacagatggcccaaatcttgtggtagaacggggaatcttccttcggggtctccgggtcaagcagaccgcgctggaaacgctcgccgtaggcaaagccgatggcggaggcgaagccctggcccagagggccggtggtcatttcgatgcccggggtcaggccgtactccgggtggcccggggtgcgggtggcagcgccgccacggaagttcttaaggtcgtccagggtcacgccgtagccggagaagtacagctggacgtactgggtgagggaggcatggccaccggaaaggatgaagcgatcgcggccttcccagttgggatcattcggatcgtgcttgatgaagtgctggtacagcgtgtaggcgacgggcgccagggagacgggggagccggggtggccggagcctgccttctcaaccgcgtcagccgaaaggaccttcgccatcttgatggcgcgctcgtcgagctcggtctccttgaattcggtcatggattactttccttccaattggtcgggccgcgtatccggcttgtgccgggcgcttgacgccctcacattgcgattaccatgctagcgtcggtttgcgacgttgtggagcaattttggcgtgttttggtagtttgtgttctgttagcgttcacagtgaacattgctacgctgcaaacgaacgcattagcactcaagcctaaggagtgctaatacaatgttctaaggtgaagtgcgccacctgcacgtggcggagccaagaaagaggcaatatttctgggttcccgcgtgtcgcggcgtggcgaaccgaccgtcggggtacgccctgagtgaaccgtgactgatatgaatatgtatgcatatataaggaggcgcgcatgacgcaatcaagacgcatgctggtgctgcgcgccgtggtggaggattacatccgttctcaggagcccgtgggctccacttcgctgacgcgcgaccatgatctcggcgtcagttcggccaccatccgtaacgacatgtccgctctggaggatgaaggatatctgattcagccgcacacttcggccggtcgtgtgcccaccgaaaagggctatcgatactttgtggaccgacttgctaccgtggtgccgctcagcgaggcgcagcgccgcggcatcaacagcttcctgtccggatcggtgagtctcaaggacgcgctgcagcgttcggcacgactgttgtccgaaatcaccggtcaagtggccatagtcacctcgccatcgctggccaaggccacattgcggcacgtggagatggtgcccgttgccatgaccacgttgctcgcggtggtgattaccgacaccggccgcgtggcccagcacggcctgaccatcgcatccatgcccgccgtggacgagatcaaccggctctccaacaccgtcaacgaacaatgtgtcggactgtccctatcgaaatccgcggagaccgtgcgatccatcgccgccagcgccggctacgagtcggtgcgcggcgtggccgacgcgctggccgacgccttcgaatcgatggcattggacgaacgcgcggacgaactgtacatgtccggcacctcgcacctggcccactcccggtccctggccgatctggccccgctcttcgacgcgctggaagaacaggtcgtgctgatgaagctcatgagcaacctgagcgaggagacgaatgcatccggcgtgggcgtggccatcggctccgaaatgcacacccccggcctactgcatgcctccgtggtcagcagtggctatgggcgcagcggtgcggcgggcgaaccggcggggaacgatcccgtaggcgaacccgaaaccgaatccgagacggagagccagacgaacgacacggaacccatcgccttcgtcggctccatagggccgacccacatggactatgcggccactatggccgccgtcagggccgtagccagatatttgaccgccttcctctccgagggccggacccaagactgaccgccgtctgtggcacaatgacccgcagaccaaacgaacacaaaggatcaatcaagtggcagattattacgagacgctgggtgtggaacgcggcgccagtgacgacgagatcaagaaggcataccgcaagctcagccgtaagtaccaccccgacatcgcgggccctgaattcgaggacaagttcaaggaagtgaacaacgcctacgatgtgctgtccaatccggacaagcgccgtatgtatgattcgggcgtcgacccgaacgatccgaacgccggtgccggcggcttctccggggcgggcttcggcgatatgagcgacgtgttctccacgttcttcggttccgcgttcggtggtggctcacagggcccggtgccgcgtacccagcccggccgcgacgccctggcctccgcgtccatcgacctgaagaccgccgtgttcggcggcaccgcgcacgtcaagatcagcacgttctccctgtgccaggagtgcggcggctccggcgcccagggcggcgcacagccggtcacctgccccgactgccacggccagggattcatgcagaaggtcgtgcgcaccatgctcggccagatgatgacctccgccccctgcgaacgttgcgagggccacggtaccatcatcaagaacccgtgccccagctgcatgggccacggccgtgtgcgtaccacacgtaccgtgggcgtcaccgtgcccgccggcatcaacgacaacgcgcgtctacgtttggccaaccagggcgaagtgggtgagggcggcggcgctgccggcgacctgtacatcgacattcgcatcaaggcggataagcagttcacccgcgatggcgacgacctgcactgctggattcaggtgccgatgagctgggccgtgctcggccacgatctgtccattgacacgttcgatggtgagaagaccgtgtccatcccggccggctgccagcctgaggacactgtgacgcttaagggactgggcgtcacgaacatccgcaacaaggacgagcgcggcaacctcatcgcccacgtcaatgtgctgattcccaccaagctcaacgaaaccgagcgcggcctcatcgaacagttcgccgcctcgcatgattcaggcgccacgcacgtctcccaggcatcccgtccacaggctggccaaaagaaaggcttcttcagcaagttgaaggacgcgctgagctgagagtggatgcgttcttggctcccctcagagaggggagccaagtctgttacttcagcagggagcggcacatggagcggtattcgttgacgtagccgccgccgaagaagacacagtgaccggcgatggggtagagctgccagagcgtgatacgctcctgccatccggccttcaacggatgcacggactggtagccctcggtgatttcgctcagatagctcatgccgaacaggtgcagcatagccagatcctcctcgcgatgaccgccatgtgccgccgggtcgatgagcacggcctcgggctgcccggaatcggcggtccacatcacattgccgctccacagatcaccgtggatgcgcgccggcttgtcggacgcggctcggcccatcagatccggcaacgcttcaatcacgcgctcggtcagttcgacatcgcgcttatccagctcgccacgcctcacaccaaggttgaccatcgggcgcagacgtccatcagcgaaatagctgatcgggtcggtccactcgccggtatccattttcactgggtcctgcaatggtccgaaatagcatgtgccgttatatccgtcaggcgcagacccgaaatattcggcacccacatcatgcatatgggccagagccgcaccaaaagctcgtgccgcctgaggcgtgggggacgcgctgcccacacgttcgatatccagataatccttgccccagccgtatacctgcaccacgcgcgggccgccctgcgcatgagccgctcccaaccattcgagtcctcgaccctcgcattcgaagaatccttccggtgcgaatgccctgcttttgcgatacgtggccataatgctcccttcgtcgcttacgtactatatccactttcattgtagaagccgtggatgttaccgattcttagtgttgttctacacccccttgggtagggtgttcatcgtcataacacatcaaatacttagaaatcacgaggggttatgaattttttccaagcgatcattctcggcatcgttcaggcgctgaccgagtatctcccggtatcctccagcgcgcatatccgtattttcggcgatttgatgctgggctctgatcccggtgcggcgtttaccgccatcatccaaatcggcaccgaacttgcggtgattctgtatttccgtcacgacatcatcaatatccttactcactggttcagctgcctgttcggcaagaacggcaaggattggaaggcccgcatgggccgcggcgacaattacgccacactcggctggaacattatcgtcggctcgattccgattatcatcctcggcttcactctgcagaacgtcatcgagacctcgttgcgcaacctgtggattacggtaaccgtgctgttggtattcggcattctgctgtggatggtggatgccaaggctcgccagaacaaaaccatgaatgatatgacgtatcgtgatgcgttcctcttcggtttgggccagtccatggcgctgattcctggtgtgtcccgctccggcggcaccatcaccgtcggtcgcgcactgggctacacgcgtgaggccgctgtacgtctgagcttcctgatggccatccccgcggtgttcggctcaggtttgctcgaagccatcaaggccgtgaagaactacaaaaccgatgcgatgttccccggctgggggccgaccctcgtggccatggtcatcagcttcgtactcggctacatcgtgatcatcggattcctgaagttcgtatcgaacttctcctataaggccttcgccatctaccgcatcggtttggctgtggtcgtcgccttgctgctgattgtgggcgtgctgccggccatcgatccctccgtggcggctgcggcataagacgggtcgatagacgactccaatataatggtgctcccgctggcgggagccgtcagcgaagctgactgggggtggtcactggaatatgccagcagaaccaccctcagtctcgctacgcgagccagctcccgacattttgtgcgacgtgcacatggtgcactgctatgaacagcccacagggctgttcatccagcgggagcacaccatatatgggctaattgcccatctggcgcagaaacgcttctgcttctttgactagttgttcggcctggggcgctcccaaggaagcctccgcctcggctttctgctgcaagtcgtagtcgtgctccaaatgctccacgtaatcgtgaagctggtcattacaacgaaccagtatcgaggcttgcgccttccactgttcggctttctgcttcagatctgccgtatcgaaggtgaagccgatatgcttgcccaacgcatccagcaatcgcatagtgccggcagaacattcgtcgctgcccaaatattgggggatggacacccacatcgaggaatgagcaaaaccttgctgcgcggcggccacatccaaaacggtaggaatgcctaccgggccgttatatgaccggtctccttcgcattgacagtctccgtcgctgacggcgatgggcaacgggcgggtatgcgggcaatcggagaacatcgaacctaacgtaatgatccgattgacatccagctcatcggcaatggccagactctggctacagtattccttccaccgatagttcggttcgggggcgatctgcgcatagatatgcttgcctgcgtccaacgtgatgtcgtagaacgtggtctgcggccagataagattggtgcgtcccgcaacatggcacagcataggacgggcaacctgatagtcatagaaatcatcacatctaatatgacgaatctcgcgggactcatatcgcttgaccagatggcgcaccgcgttcgtcgccacctgacaggcatcattccatccctcgaatgcggcgatcaatactgcgccggtgtccttcgctgcttcactcatacctctagagtaactggaattcattgcccgaagcgcacgctttagccataagcgagagtatgcaattacaggcgacacgccgcagctggacgaactacacgcatgtgagtatagtaaacactcgtgcttcggcagggagacctcgccaaggaaacacacgcggacatagcttagttggtaaagcgcaaccttgccaaggttgagaccgcgggttcgagtcccgttgtccgctc

SEQ ID NO: 2372 - DNA, 17438 bp, Unknown
  R50_10m  MAG No. k141_2680
ctttttaggaaacatcttcgctgagacctataagttgatccgagagtacattctgctgttggggagcaggattggcgtttattttattcctcgtccgccctgttctggcgcagctgctcaatgagatcgatgacggtttcgagttcaggagtcacatcgtctgaaggacgaacgttatcctcttcgtcgtccatctcatcatcctcatcatcatcggcaacggtgttgttgaggatatcctcttcggtggcctcgtcgtcagcatcagacttggactcgtcgctggaatcagctgcatcaacatccacaacggaatcggatgcgttctgtgcaacggactcatcaccggcagactgggattgcgaggtcccgtcgcctgccgcctcctcagcgggctcagtatcgacggcgttcccgtcaacagtcttctgtgcttcgatatcatcaccggcaggctcgcctgtcttgtcggtttcgccttcggcctcgtcctgggcaacctgctcctgcttgcacggacggttggcaaccacgtcgatatgcagatcgtcaaaggctggcttggactgcacccacagctggcttggctcgggaggttcgatttcggaatgctcaccgcagccgtggtccagggagaccacgcggccgtcatccggactccacttgttggcgcacacgccgaacatacggtcgagttcgcccgcgagcggcacgaagaaaccacaggtggagcacaggttgccttcggcggttttggtgctcaacgctttggggcctcgcggaccttcataccagcgcttggcagcctgcgcacgacccaacgaggtcagcacgtgacggcgggtcagtcggaaggtctcgacggcatcgttgacatcctgcagcgaggattcctcgacttcgccttcctcgatgcgctcgtcatccggatcggtaccgatcgaatcggtgggagccagatctgtgggctcaaggcgatctttccaaggaatccacttgggcggcatcaacgcgccctcagtggggatcaaggaggattcgttgacggtccaggagccgatctcctcgtcgtgatacagcgtcaccgaccattgccatccttcgtagccacggatattcgcggcgaagcggaagtcagtgacgtgatcctcaagatcatatgaggtaacgaaatcccccacctgatcgctctcgtcggccacttcgagcagcacggcgcgcgcgatggcgtgagggtccggtatcacgatggtttcggtggtatcagtcatagatcagatcagtcctgtacatcgaattgatccgccaccgcacgcagcaacgtggccagctttttgctgtcggcagcagatgggtaacggtgacggcgcaacgtattgccggccgcatcaagcatcttgataaggtcctcgcagatggcggccatgtcatccgccttcgggcgggtggccttgaccaagctgggagtggaggcgatcaggcgaacatccatggcctgcggcccacgacggccgtccaccacggaatactccaccttggcccccttgcgcaacgtggtggcgccagtgggtagggcctgagccggcaggaacacgtccttgccttcctcactggtgatgaagccataacccttggctgcgtcaaaccaacgaactcgaccggtgggcattgcgaaccttccttaatcctcaatggaaatagtaaaccgaaggtacagtttacctcacagggcttgacctcacgctttgggctgagtcgcctgagtcttacgctcagagctgaaccaagaagtcttctgtttggcgtccttggttttgccggtgggccgcttgggctcaggagcgacgatctgctcaatcggcagcaccacggtgaaggtcaggcctcccccatcggtgccggtggcgcagataaagccgtgatgtgctttgaccacggattgcgcgatggccatgcccaaaccggtaccacccttttcgcgggcacgggatgggtccgcggtgtagaagcgttcgaaaatcttcgagcgcgattcaggcggcacgccggggccatggtccacgaaacgcaatacggcgtatcgatagccggtctgcatcgaggcacctacttcggcggcgtcgatgaaccgccgcattgatgcgtcgctggcgggcatgcgagcgagctgtcttggatcgatggcggccggcatcacaccgagcgcggcctcggcaggcgaatcggcaggcgtgtagcggtggatgttgcccacgatgttggtcaccacctggcgcagtcgagaggcgtcgccgggcagcacgacctcgggccaatcgccttcggcaaggttgaattcggcgggatggttcaaatcgcgcgccggttcgagggaaatctgcatgcggcgaacggcacggtccgggtcgagcgcatgcaagtcgtcgacggcgtcggtgaccagcgacgagagtttcaccgtgccggtcacatcgatgccgcgcccctcatcgagacgggccaaagacagcagatcctcaacaagaacagtcatgcgctggctggaccgttcgatatgttcgatggactcgtccgcacgctccaaggcaccaggcatatcgcgctgcatcttatacagctccgcatagccatggatggcggccaacggggtgcgcagctcatggctggcgtcggagacgaaccgtttcatcttgtcggtggtctcctcctgttcatggaaactggattctattcgggtgagcatggagttcagcgaggcggccagggagccgacctcggtgttttccggcgcggaaggaatacgttggctcaggtcgccggcggcaatctttgcagcggttttctcgatgcgcttcagcggcgtcatcgtgtgctggatgatcagcgtggacagggagccgccgagcagcaccacggcgatgccgaccacaatgcagtatcgggtgagtgtgttgacggtgtcgatctggtcggccagtgacaagccgatgtacaccacggcacggtccttgccgttttgctggaaggtcaccggcagaatacgccatggtgccctcgccgtgacgatggcggcatggttggcattgacagtggggttggccagtaccttggcgatggtgtcagaggaattggagtttccgttggccggatcgttctggctgtccgcactgtcggactgcaccgtgatgatctgcttggccactgcctgcgtagtgaatgcctggccgagcgtgatgccactggtatcaccataggtaggaagaatcggcaccgatacgataccgtcctgcatctgcggcatcagcggggtcacgaccagaggattgccctctttgtctttggtgccgtcggtatattgaatctgcagaaagtacgagttcggccccgatgagtcattttttgacagcagatcgatattgttgaccaccagctggctttgcgagcttaactgggtgtcggttttctgcagcatgtagttgttcaccaacgcgcggatggagaaggaaatcaccgacacgccgataagcagcacggcgatggtgcaggccaccagcttgctgctcaacgagatacggtcgatatgccgcatcagcatgtttttcttacgttcgtgccgctcttggaaatgggcggcgaacggcggcattgcaggcatgggattcgtgttcggggcggcgttcggcgtgctgctcggcggtacgccgcctgactgcttatcggggatactcatgagattgcgatgcgttatggatggggcgactagttcttcggttcgcgaatcatatatccgatgccgcgcttggtttcgatcagcggagtcaccttgcgcttgccgccttcgccgtcgtcgacctcgatgccgtcgactttcttgcgcaggtaggagatgtacgattcgacgatggctgcgtcgccgccccagtcgtattgccagacatggtcgagaatctgtgccttggacagtactcggccctcattgtccatcaggtagcgaagcagcttgtattcggtggggctcaggtcaaccggctgccctgcacgggtcacatcgtgggagtcctcgttgatttccaagtcggcgacgcgaataatcgggtcgtcttccacctgttcgcgggtacggcgcagaatggcgcggatgcgagccacgacttcctcgaggctgaacggcttggtgacgtaatcgtcaccgccgacggtcaggcccatgatcttgtcttgggtgtcgtcacgagcggtgaggaacagcacaggggcgttaatgccttcctggcggatgcggcgggtgacggtaaatccatcgatgtcaggcagcatgacgtccaacacgatgagatcaggctgcactttttcgataacctcaatggcttcggaaccggaagcggcggtgtttacctcgaatccggcgaagtgtagggaagcgaccagcagttctcggatggacggctcgtcgtcgacaacaacaatcgatgcttcaataggcttactcatgcttcctagagtgtcgcgctcttctgggcgtttcctgaatgtcatcttggagttcggccttggaatccttcttgatctccttgcgccgacgaatcaccaccatgaccacgatgatgatgaccagcgccaccaacaccacacccatgatgattatgcctacggtcaccgtggatgatgaggtggaggcttttttggatttcacgatttgatccatcattgccgttgccgcgccagaccagctcggcgggttttccagtaacggctgctgtgcggcttcggatagcttatcgacggttttgttatcgagaagccacttatcggagttcttggacacgacgaccaccaggttgccgtcattcgaggccacggcaagcatcactgtgttcggcttgggattcatggactccatcacggttgccgcccagtcttccggtttctgttgactattgaaactggaaagatacagcagatgcacgtgtacaccggtttccttctcggttttggcgatggcatccgcgacttcggccgcatgggagcccaggagattttccgtatccgtgatgttctcggtgatggtcacgccgctgtcggtgctgctgctggagctgtcagagctgtcgcccgagttatccccataggcatttgcggttatccacattgcgttcatcgctactgcagcaagggcgcaaatggcacaaacaagccattttcggaccatattcccgaaggccgaacaggacggctccgaagataggaccacaatagttgtttttccgtcttcccgattcgttgttgacatatcctccaccttagcggccggtattggcaagcggccgccatacataccattaaccctctagaaaaggagcaacgatgccccaatatcaggtagattccgagcgaatccaatcatcctcggccgcagtggccacttcgatctcgcagatcaggcaggccgtgggcggcatgtacaccaatctcaatgccttgcaggacgcatggcgaggttcggcggccacccagttcaccgcggtagccgaacagtggcgtgcggcccaacagcagatggaggcctcactcgagtccatccaacgctcgctgacgcaagcctccaccgtgtacgctgacgccgaaatccaagcttcgcgcctgttcgccagctagtttcttggctctcctccctgaggggagctcgatcgcgaagcgaaactgagggagtatccctacaccgcagctccccttagtctcactgcgttcgacagctcccctcaaagaggggagccagaatacaaaaaaggggactcccgaaggagtcccctttcagctcaatcagctagcgatcgcttgcggatcagtagcccatgtcggcaccggcggccggggcagcaggcttcggctccggcttgttggcaacgacggcctcggtggtcaggaacagaccagcgatggaggcggcgttctgcagagcggagcgggtcaccttgaccgggtcggtcacaccggcggccagcaggtcttcgtaggtgtcggtggcggcgttgaagccttcgccatcaggcagggagcggacggtgttgatgaccacgtcaccggacacgccggcgttctcggcgatctgcttgatcggggcctcgatggcgcggaacacgatggcggcaccggtagcctcttcgccggtcagggaggcgacggcctcggccttctcggccttggcagcagcctgaacgagggccacgccaccgccgggcagcaggccttcctcgatggcggccttggcgttacgcacggcatcttcgatgcggtgcttgcgctccttggcctcaacctcggtggcagcgccgaccttgatgacagccacgccgccggccagcttggccagacgctcctgcagcttctcacggtcgtaatcggagtcggtgttctcgatctcagcgcggatctgggccacgcgagcgtcgatgtcttccttggagccagcgccctgaacgatggtggtctcgtccttggagacgatgaccttcttggcgtggccgagcacggaggtgtcgacggactcgagcttcaggcccagttcgtcggagacaacctgagcaccggtcaggatggccatatcctgcagcatggccttgcgacggtcgccaaagcccggggccttgacggcgcaggacttgaaggtgccacggatgttgttcaggatcagggtcggcagtgcttcgccgtcgacgtcctcagcgatgatcagcagcggcttgccggtcttcatgaccagctcggccacgtgcacgatgtcctgctgggaggagaccttgccggaggtcagcagaatgtacggatcttcgagcactgcggtctggtcgtcagcgttggtgacgaagtacggggcgatgtagcccttgtcgaaacgcatgccctcggtgaagtcgaggtccaggccgaagcggttgttgtcttcaacggtcacaacgccgtcctggccgaccttgtccagagcctcagcgatcttctcgccgacctcagggtcggcggcggagatggtggcggtagcagcgatctggtccttggtctcgacgtccttggcggcggcgacgagttccttgacgatgacctcggtggccttctcgatgccgcgacgcagggcgatcgggttggagccggcgaccacgttcttcagaccctcgtgaaccagggactgagcaagcacggtcgcagtggtggtgccgtcaccggcgacgtcgtcggtcttcttggcgacttccttgaccagctcggcgccgatgcgctcgtacgggtcttcaaggtcgatttccttggcgatggacacaccatcgttggtgatggtcggagcgccgtaggtcttgtcgagcacgacgttgcggcccttcgggcccaaggtgaccttgacggtgttggcgagcttgtcaaggccctccagcatgccctgacgggcttcctcatcataagagatgatctttgccatggttgcgtattcctccaaatggctaggtataccggttatcactcgcaagcgtcgagtcgtgacgaccagccgtcagctgccgattatcactctcgacctccgagtgctaacccagacattagcactcgcgaccgccgagtgccaacatcatcggcggcgattgcgctttgggcatgaaaaggccccaaccgtcgaaacggtcagggccttcaatgcacatccttgcgtgcgtgttgctcactcggagcgggcttcacccgaagacagcttgacaacatcctttgcctgcgtgcctttgccggacgaagcgggcgtatactccacgcgatcgccctcgtacagcatcttgaacttattggtgctgccgtcgtccttgatttccgcgtagtgcacgaaaacgtcctcgctgccgtcgtccggctggatgaacccgaaccccttcttggcaaggaagaacttcacggtaccttgtgccatatctgatctttcctttgttcccttaggcgtcgcgacacaaaacctatagggaacgtagaaagaaccgcatcgcgctcccctacctcgcgactagatgacgattgtacagtgacgagggaacaatcccaaccgcagtggcacattttcggtacgaattatttcatagacgtgagaacgctcacagttttcgatgtattccacgccgatatcaggggcgcatcaacaacgctagttgagcagcaccaccgtaatgggaacggcgagtccttgcacctgctccacagccgaaatgccaagcgtggtcgccacatcttcggcggtggctttatcggcttcattctgataccataccacggaagaagccggcaatgtgccgcgcggattggtcgcctcgacgctggtgtaaccggcggtctgcagcacatcggcctgctgacctgcatatccttggattcctgtggcgttgaccacacgcacctgcgtggccttattcacagtcgcggtggctccggactgctgagactgctgatcggagtcttgattctcattcgaagatgtcgtatcactgttggtatcggattttgccgaatccgaagtcgagtccttggacggatcggtcgaagtggacgaggaatcatccttggtgctgtttttggtcccagccttgctggacgaatcggacttggaagcagtcccggacgtggtcgcagtctgggacgatcctcctactgcattcctgtattccccggaaatccatgcccagaccccgacaccgcacagtgcggccaccagaataacgacgatgaacgggcagaggcgggccactgccgaacgagcgccacggtgaactcccaccggtcccttcggaggattgtcgaaggaatccggttcataggattcgtaggtcatcatgtcgcgtgccataatcgccctttcttcctgtcaaaactacccatgagtgtaatcggcaaacaactcatcagtccaccacaccacgccccatgcaccggatatgcacgtttgactacagtggtgagtcatgatcaaaccattgagcgaactggtagagccggggtgggcccatgccttggccgacgtggagcccgccatccaccatatgggcgattttcttcgtgcggaaaacgccgccgggcgcccgtggctgccggcaagccacaatattctgcgcgcgttcaccatcccgttcgattccatcaaggtgctgattgtcggccaggacccctacccgaccccgggtcacccggtgggtttgagcttctgcgtggcgccgaatgttcacccgctgccgaaaagcctggtcaatatttataaggaattggttgacgaccttggggtgcccatgcccaccaacggcgatctgacaccgtggacggaacgtgaggtgatgttgctcaacagatgtctgaccgtcggcgtcgggcggccgaattcgcatcagggcaaaggctgggaggaagtcaccgaggccgcgattcgtgcgttgaacgcgcgcacggacgccgacggcaagcccaagccgctggtggcgattctctgggggcgtaatgcgcaaagcctcgagccattgctgaccaatgccttcattatcaaatcgcctcatccgagtccgctgtccgcttcccgcggattcttcggctccaaaccattctccagagccaatcaagccctagtcaccatgggtgccgacccggtggattggactctttagacagaccaacagtcattgtgagtagttacagtgagggcatgactttgttccccacgcaaccgaacataccttcgccgaccaccgccgcacgaccggtcaccgttcccgcgcccggcgtatcggctccgctgggtgccgatgacgccaaacgcgcacgtatcctggccgacgccattcgggcgaggttcgcccagacactggtgggtcaggataatctacgcgaatcgcttatcgtgaccttggtggccggcgggcatattcttatcgaatccgtgccgggcttggccaagaccacggccgcccagacgctcgccacctgcgtatccggctcgttcaaacgcgtgcagtgcactcctgatctcatgccatcggatctggtgggcacgcaggtcttcgattttgcgtcgcagaagttcaccacgcagatcggcccgattcacgccaatttcgtactgctggacgagatcaaccgttcgaatgccaaaacccagtccgccatgcttgaggccatggccgagggtgccacgaccatcggcgggcagcgtatcgccttgcccaagccgttcatggtgatcgccaccgagaatccgattgaggaggagggcacgttcaacctgcccgaagcccagatggatcgtttcatgatgaaggccgtcatgacctatccttcgcccgacgaagaggctcgcatgctggccatgctcacccaccgtggctccgatatgatcggtcccgacaccatcaccggcgaacgcatttccgtgtctgacgttgattttctgcgcaaggcggcacgccgcgtgcatgtttccgacgcgatcatgcgttatgcggtcgatatcaccgccacgtcacgaggtgccggctcccgccccatcaagggactgtcgtccttggtgcgtttgggtgcctcgccgcgcgccaccatcgccttgacccgtatcggccaggcgaaggcgttgctgtccgggcgcgactatgtggtgcccgaggacctcaaggcgttcgctcatgaggtgctgcgccaccgtattatgctgacgttcgaggcactggccgatggcgtggtcagcgatcagatcgtcgacaagatcgtcgaaacggttcctgttccgtgagttccgattccgttcgcaagaaaatcgaggcccttggcactcagctgagcctgcctaccgtaaggaaggctttgggcgtgctggagggcgaacacgcatccgggcgtcgtggcggcagcggcgatgcgatggatgtgcatgcctatgagccaggcgacgaatcccgtcttatcgattggaagaccagcgcccgccaaggccgccccatggtggtcgagcgcgagcgcctgtcgacgtcacgggtctggttgctgatggacgttggcctggagatgactggcgtatgcccttccggagaacgcgcatggcaggttgccgccaatgcgctgcgtatgttcgccgcactgtcgttgcgccggtcggacgatatttcgctggtgttcggcgatgagtccagcatcacccgcgtgccgttcaacggtgggttcgcgcagttcgaacgcacgctggacaaggcgcttgatcgtgattgggatcatcaccgtaatatcgacgcgctgctggaatatgcgcgccgtatcaaggatcgtgaggcattgatcgtattggccaccgatgagcatgcgatggaggagcggcatatcaccacgatccgtcgtattacccgcacccatccgatggtgctgatcgatgtggcgacgatgaatccgttcaaggccgtctcatcccgccacgctcccgccgacggcttgagtgcacggcgtgtgccggcattcctgcgcaacgccaaggcagcggccgaggtcgatactcatcgcgcgtatatggccgcggctttggaacaggagctcacccgtgccggttcccatatcattcgagccgcatccagcgaatccatgttcgatcgtttcgtcgccctggtgtcccgggcattggcccgcaccacacgcaatagactgggcactgcacccgaactggtcggactgactttggcgggtgatctatgatgcacagcatgttccccatcatcccgctcgccactgatcccggcgatctcaggcccgtggagtcgttggccttgaccactcccctggtgatggccatcgtcgcatgcctgttgctggcggtaggtctgatcgcgttgatcatcatgctggctcgccccgcacgcaaacctcggaacagcgaccgtgcgcgtggcactcatagcaatgccggctccaaggccgagtggcgtgcccgcatcgacgatgtggtggcccgtcatgaatccggagcactgccccggcatgaggctttcgtcgaattggccgtcatcgcccgtgatttcgccggtgccgcatcaggcaaggagcttagttccagtacgctgaccgatttggcgtacctgaatcgcacgcccgcgaatcgccaaggattggacgcattgaagcagaccattagcgcgttgtatccaccggaatttgccgatgatgcccgcaaccgaatcgcccagacgaccagcgtgcagcaggccgccgagtgggtggcgaatctggtggaaaggtggcgttcatgatgctggcatggcattggccttgggccgctctggccggcgtcttggcagcgctggcgattatcgtgctgattgtcgtgttcgcccgccgtaacgccgccgacgacacccctgtattctcgatggacgacgatctcaataccgagcacgcttcccgtctgttccgtcaatggcgcgctttgggccgtctcgccatcagcgtgctggtgcttgcgctggcgctggccattgtgctggtggctcgccccagccaagtggatgccggtgacgaacgcgcttccagccgagatatcgtcctgtgtctggatgtgtcgggatccacgctcccctatgatcgcgaggtcatcgatacctatttggaactggtcaagcatttcgagggggaacgtatcggtttgagtatcttcaactcgacctcacgcacggtgttcccgctgaccgacgactacgaactggtcaccaaacagttgacctccgccagcaaggcgctgaaaggcgtcgagtcgcaggatgacatcgataagatgtccgatgccgaatatcaggacatcgccaattggctcgaaggcacgcagaaccgcaaggacgccacctccttgattggcgacggcgtggtgtcttgcgcggcgatgctccccggtttcgcttatggcgaagccaatcatgcgaatgccgaccgtcagcgtgcggcatccatcgtgctggccaccgacaacgtcgtgtcaggcaaacccacctattcgctgaccgaagcgttggacttgacccagcagaccaaaatcaccgtggacggcctgtattccgggccgaaagccagtgaatcggaccaaaccacaacggatatgaagtccgcgatcgagtcgcatggaggcatcttcctcacccaatcgaatggcgcgtcgatagatgagctggtacgggatattcagtcgcgtagagatacggatgtggagaacaaggtgaaatcctcaatggtggacgctcccagtctgtggacgcttgctctggccgtgatactcattatctggatcgtatgtgcatggaggttgaggcgatgaacggattcaccttctcccccgccttgggctgggtcgccggcggactgctggcggccgggctcgccgtactggccattctcgaaatcgtattgtttgttcgccgccgtgcttccagtgacgagaccgtgtgggcttgcatacgacgtacgcttatgctgctcattgtcgcggtgatggtactgactcccagcgtggtatcgtctaccacctcacaggtcatcaatgccaccgacgtcatcgtggcggtggataccaccgggtcgatggcggtggctgatgccacatacgggtccgagaagaccattacccgcatcgatgccgcgcgtcaggccgtgcatgatgtgaccgctgcttacccggacgccagtttcgcggcgttacggttcggtgcttcgggaacacttgatgtgccgctgaccccggatgcgccggccatcgataattgggccaacacgttggcggtggaagccacatccgtgtcggcgggatccagtctggatgctccgatcgatcaattgctgctgaccgcgaagtcgattcgtgaagcgcacccggatgatgcgattgtgctgtacctcatcactgacggcgaacagacctcgaatgtgacgcgtcgtacgttctcgtcactgcgacagtatctcaatgatgggtttaccgtgggcgtcggctcgaccgagggcggcaagattcccgtcatcgccgatggcgtcagtgccggcgattccaacaccacggaccactgggtggtcgacccggataccggcgaacccggcatctccaagatggatgagaagaaccttaaagacattgccgacgagatcagcggcacatatgtggccgtggacgcttcacagactttggcggattcggtttcggccaggtcgtcgaagcagtggcgcatgaccaccacggtcaaggaacgcacacgcaccacgccggtggtatggccgttggccattgcgttggcgatattgcttgccatggaagtcggtgcatggatcgcaacctcaaggaggctgctgtgaggaacagtaacgaaatccacgagaacgatggctcggcgaatattcggatgcgggcgaaatgcccgctttgggcacgtatcgtcctggcttgtggcaccgtattgctgctgctggttgccggcgtggcggcagtaaacctgtccgcttcgattacgttcaatcaggccaccgcatcattgaatgccaatatcaaagcggctcaggatgagtccacggatatcaccacgctcaaggcgcaacagcagcagaccgatgcgcaattcgccgaggccgggcgaatgcgtacgcttctgttgccgcaagtcaaggacgccatcgacaccaatgcttcgatttcttccgagctgacgaagatcaccctgaaacaggccgaggcgcagaacagcggttccgattccgggcaagcccaatcggcgcagcaatccgagagttcctcagccaatgccaaaaagggcggcgcgttgaccgacgagcagaagaagcaggtcgaggagctgatgaaggccaatcagcaatccaccgatacccagtcgaacaccacccaatccgagcagaaggcgacgcagaacaagggtaccggggccaccaagccgtggtaagcagtcgttcacggttgctctttttctcacatcctcacgggtcatggccttatcgcggctgtttcccggtttcggctgtcggctttggcgtttgtctgatcccgatagcccatggctgatccaaggtgtgcccaaacaggctatttgtggataatcgttacggctatacacaacacttgtgaataacttcgcccaaaatcggcaagctagaaccacattggtcgttccggctggacaagcatgagtcctgtccttttagctggatatatgaatacctacaccagcaccccagcacccatcgatcccgccggcggctttgccggcaatacggtgacgccgttcgattacggcacttgcccttgccatgcggcggtacagcgtagtcgcgacctcgtgtccgtccaacgtgcggccacactggcgcaatcggaccagatggcggtggccgtgaaccgctctcgcaacatcgtgtggaccggtaaagccgccgacctattccgatcgcggctcagtcgcaccgcacagtattcggccagtctcgcgcaagacatggagaccacccaccgattggcttgggggtcatcatgagcgagcacgattactggcaggtggaatcgtccgtttacggcggagtgggatatgcgccagccactcttgaagaatatgccgccatagccaaggctctcgatgacgaggcggcaggatttgcggccatagccacggcttgggaatcggccgcattacagttgcagtcacatcggcatagtgcgccgatgtgcgtcaccttgcagtcgggcgatccgagcgccgttgttcccggccatgtcactgcaccatatgccgcgctgggcaatcggtgttatgaccatgcaacggcatgtcagcggttgagcgatgatctgcgtggcgcggccgatctgctgattcgcgcacactctctgtattctcaggcggagatgacggctcggcgcatgtttaccgaattattgcaggccggtacacaggccaaaccgggatatgccgcggtgggtgttgccgctgtggcggcgggcggctttctggccggctgggctattgacggcaaaccgaacccagcatggatgtccacgttcacctatccgttccaggaaggagtgctcagcggcgcgggcggaatcattggcggcgtacctatcggcaagagcattgcgcacaccgatgaggtcaacaaggctgcggggaaaatcgccaatttctccggcccggcgaaagacgtcgtccaaggcaatcatctgaacgtgcgcgaggtgcaggcgaatgccgacgtcgtccgtgcaagcggatcggtggccgagtcaatggagaatctgcgcaggctcgccgaagaacggctcggcaaaatcgagctgaacagcggactcgaatatgggaccatcgccattcaacgctatgaacgggctgatggaaccaactcctggctggtcaccatcccgggtaccgatggacaacctgactcgccattcggctgggcgcagaacgtggaactgatgagcgccgatcaggagcgccgcaggaaagcggacagcgctcgcacggttgccgaggcgatgcgtcaggctggtatcggcaaggacgagcccgtggcactgatcggccactcccaaggtggcatcgttgccgccacgcttgcctcggattgggcagaggaatataccatcgagcatgtggtgacagccggatcgccggtggccaatcatccgattccgcaacgcacgtgggtcaccagcgtggaaatcgatgatgaactggtcgccgcgctggatggtgccgccaacccggtcaccgataattggctcaccgtgcaagggcatgtatcgcccgcgcccgcggcaacaccatccacagtgcattcggacgtctcatgcactcccggcgcaacgcccatcaacggtctgaccccatatgacgccgcatccgtggctggttcgaccaacggcagggagttgtcgcattggctcaaataccatcaggccgcttatcagaacgccaccgacctcggctcccccgccgtgcagcgccacgaagcgcattttcaggaagtcatcaacggagaactcaaggaaacccgctattaccaaggccgcatgacccagtccacaaccattgctcccggcgagcgcaccaccgagttcagcacgttcggcggttaaaagtaaataccacacttgacagagttgtcaagaaaggagttaacaatataatgacgagtaggagatggctcatcaaactgatgaagcaagcggcgaaacgcaagaatattacgtttgagagtatcaggcaaagagggataacgcccgattttttgcgcactttcggattccgggtctgacgtaagagggcatggcccgcgtcctgtgtacgattttcattcgccaaaacaaaaaaccgcgattggaagccaggagacggaaccaagacccttgaaca

SEQ ID NO: 2373 - DNA, 10743 bp, Unknown
  R50_10m  MAG No. k141_2861
cgccatcgtgaccacgctcaacgcgctcggcatcctcgccggcgcgctcatcggcgtcagcgccatcaaacaacgcctcgaccgcgccgcataaccaccacacagttcggccccgcccggcatcgcagacagctccacgagcttgactgcggccggcggggccggttttttcgttgttacagcagctaggcgtggctcgatttttgcccacattttgcccacattattccgggaaaccgagggaatacgagggaatcaccgggaatagaaaaagccgctcagccctactcccgcaaggcaaaacggctattttccacagtctagcgaaggtgcctccggtgggactcgaacccacaagccgaagcgatcgattttaagtcgactgcgtataccatttcgccacggaggccaacttttctattataagctatctcctgccctgagcattgcttgcgggttgctgcgcttcgtgcagccgtcgcggcatagccgctcccttcgcctacaaacagcccagtgggctgtttgtagcagccggtagcgatagcgtcgccggcgtcgcatataacgcaaacagcccaccgggctgtttgcttaacggctcagcccgctggaggcacttaccacttacgctattgagccagcaaccggcgaccataatcgagcacaatgccgtccagcagcccgtgttcgctggcgacgaacgaatcgatggcttcaccatgatcggccttggcggcttcgctgacacgcgccagcacacggctccacaccacagcgccgccgccgaccacatcgatacggccggggtggatggtcttgtattcgcggcgctcggcgcgcgtcatcctaaggaacttgtcgtccacggcataggcgtcttcaaggctcaaccgatgcccgtcgaccacggtgtgatcgtattctttcaatcccatagccaaggcggtcatcgtggtcaccgtgccggacacaccgatgatggtacgggccttgcctgcgtccacggtgcggaaggcctcatcgatatgctcgtcgatgtccgcaacggcctcatcgatctgcgcctgggtcggcggatcgttggtcagatgacgttcggtcatgcgcacggaaccgatgttcatggagaatgcgccctgaacctgggtggtgggcgcactgacgccgtcgccaccgatgaccagctcggtggacccgccgccgaggtcaaccaccagatagggggcgggcagatcgtcgcgattgaccacggaagtggcgccgaggaagctcaggtcggcttcttcagtgccgggaatgacttcggggcgcacgccgaggatacgttcgatctcatcctcgaactcctcgcggttttccgcgtcacgagtggcggaggtggcaacgaaacgcaggccgtcgatgggatgctcggcaatcacaccggcgaattcccgagcagccgcataggcgcgttccaacgcttcgtcggcaaaacgatgggtcttgtccacatcctgaccaaggcggatcacacgcaggatgcgcggcaccacctcatgcatgccatcggcatcgacacgtgcgatcttcagtcgaatggagttcgtgccgcaatcaatgccggcgacggttacggattccttgctcattgccttctcctcgtatcccttagtgcgtatgaatgggctgttcgcggtggctcatctgttgatcaatcgtccagtgtgcaacggcagacggtcggatcgaactcgtctttgacgcgttccagcaccaaatcgccaatggggttgacgcccggccccataaccaaggactgggccagcagggcatgcaggcacttgacgcgcaccggcatgccaccggccgaagtgccttcaatatgctcctcactgtcgccaagacggcctgccagttcgtgacggaatgccagatacagattatgggcctgctcatatgcggccttgagctcctcatcagcggccagcatatcgttgtattgctgcatcacgccggcggcctcgacatgggaggcggccttgacggcttccggaccggtcagatagcacgtggtggggaaagggattccgccgggcaacaccggacgggtgattacggcaagtggcctaccgcagacgcatcgcgcccccacggcgaccatgccgcgcgggtatcggccgagctgacgctgcacctggtcgatgtcatggtcgttggcgggctcggcaagcatggtgtcgacaagggccttggccttggcggcgatatcgatggtcactgttgagttccctcccctgtgttttgctgggtgttctgatcggattgggtgttctggtctgacttatcggactgcttggatgagtcgttggatgacgagtcagaggaaccggaagtatcggatttgccggactcgctatcggtcacaggctcatcggcctttttgagcgagtaagacagttcgctgtaccatggcaggacttttttgttgctggtattggaatcttccgttttctgggattcgcgatcggagccggtcacggcttcgggatgcagcacacgcacggcctgttcgccggggaatacgaagccgaggcgttcacgggcctgggcggtgatgtaggccttgtcatcccaacgcttgatatcgttctccaactcctgcttttgggcgatcagcgaggcttcctcacgcttgaggccattgagctcggccaggttcagggcataagtgtggaaggtggagaccagctggatggtgccgagtgcgatgatgaacagggagacgaagaacgctatgggccccgccgacccttttttcctgacttgtgctttgccggttttgccaggtttgccggtacgggacgacttgctcatgtcacatgaaaatacccgccgcattcgacttgacgaacacgacgggtatcgagcttcagtggaaactcacgcctttacgggcgtttcagctcacttggccaagtacttcttgcaggccttgaaggcgctgtagccggcgtactgagcggtggagccgagctcctcctcgatctcgagcaggcggttgtacttggcaacgcgctcgccacgggccggggcaccggtcttgatctggcgggtgttcttagcaacagccaggtcggagatggtggtgtccggggtctcgccggagcggtgggaaaccatggaggtgtagccgttggcggtggccagctcgatggcgtcgagggtctcggtgacggaaccgatctggttcagcttgaccagcagggagttggcggcgccgaggtcgatggccttctgcagacgagccgggttggtgaccagcaggtcgtcgccgacgaactgcagacgatcgccgaggcgagcggtgatggcagcccagtcttcccagccttcctcattgaacgggtcctcgatggagacgatcgggtactcgttgatgaggttctcgtagtagtcgagcatgtaggcggagtcgcgctcttcaccgtcgaagcggtacttgccggtctccttgttgtagaactcggaggaggcgacatccaggcagatgccgatctgcttgccaggctcgtagccggcggcggagatggcgtccatgatgtacttgagggagtcctcgttggacttcatcttcggggcgaagccaccctcgtcgccgaggccggtgttcaggccttccttcttcagaacgttcttcagggtgtggtaaacctcaacgccagcgcgcagagcctcggagtaggtgtcgaagccgtacggggagatcatgtactcctgaatgtcggtggcgaagtcagcgtgagcgccaccgttcatgatgttcatgttcgggaccggcaggatgtggccgttggtgccgccgatgtagcggtacagcggcaggccggcagactcggcggaagcgtacagagcagccagggagacacccaggatggcgttggcgcccagcttgcccttgttcggggtgccgtcgagctcgatcatcaggtcgtccagagcgcgctggtcagcagcgtccatgccgatgaccttcggagcgatgacctcgttcacggccttgaccgcgttaagaacgcccttgccgccgtagacggacttgtcgccatcgcgacgctcccaagcctcagcttcaccggtggaggcgccggacggaaccagacccttgccctgagcgccgtcttcggtctccaggtagacctcaacggtcgggttgccacgggaatccagaatctgacgcgcgtacacgctttcaattactgccacaactactccttaaaacggttgtgtatcttgaatgacattcttaagagtagtgcgatttgtggacgttgtgaacaacacgcccaaaatttagtgttagcgctcacaatgccgatgcgccgcctgattgcaaggcagtacggacgaaatcgctcagtcgacgtccttgccattgaggtagtcgatttcactgtcggacaatttcagttcgctggctttgaacgagtcctgaatctcctgcgggtttctggccgagggaatcgtgaacagatattggtattgcgcaagttcccacgcgagcgtgacgcgctggtaggagcagtcgtgggacttcgcgacttcgcggaaccggtcgaacagatgctcgttgaacgggtcaaggaatccaccgagcggcgaccagcagacgaaagccaaaccgagtttttcgcaggtctccaacgtgtgttcggggtcgcggtgaaccggggagaactggttctggacggccacgagacgatcgcccaaaatgttgtgggcggcttcgatgtccgcgttgtcgattctggagataccgaccgctttggccacaccttcgtccacgagctgcttgagtgcgcccatctggtcttcgtacggcacctgcggatcattgcagtgcgagtagagcagatcgagcgtatcgacaccgaggcggcgggctgattccttggcattggcgatcatggtttcgggtcgggcgtcggcctgccagccgtagttgccgttgccgtcaagcgtgcgcagccagccggttttggtggctacgagcacctgatctttggggccatgccacgagtgcagagcatcgcggaccagatattcgccatagcccatatcctccggttcgccggtgccgggtgcgctgggcagataataggaccaagccgtgtccaaataacggactccggcatcgagcgcggcatggatggtctcgatcgcctgatcacggttggaggggcgcccctcgatggcgagcgccattgtgcccatgccgaggcggggaatctcatagccggcaagtgttgccgcgtgttggtttttcatcgttgtggcctccatgccaagtcatcgaggagttggttagtccaaaggactacctggtcggagctcatggggccttggcccagggaaccggtgaacggggtgggtacgatgagctggtgggtgaccgggcggtattgggcgcctttgtaaatacggcccatacgcatctggatggattcgggcgggtcgatacggccgatccgcacgcggttggattgcgcgagaatctccgaaatgccgagcttgcgggccttgaacttcagacgggccacgtcgaacagggtctcgaattcgaccggcggcttgccgtaacggtcggtaagctcctcttccagatccttcaaatcggcctcgttgcgagcggaggcgagcttgcggtacgcttccagacgcagcttgtccgaatcgatgtactcgatcggaatcgacgcttcgatgggcaggtcgatggacacggccaccggctcgacgttctcttcgggctccttgtacttctccacggcttcggacaccatgcgtacgtacaggtcgaagcccacgccctcgatatggccggactgctcgtcgcccagaaggttaccggtgccgcgcaattccaagtccttcatggccacatcgaaaccggagccgagcgccgtgttctgcgcgatggtggcgagccggtcatgggactgctcggtcatcggcttggacgggtcgtacaggaagtaagcgtacgcgcgctcgcggccgcgaccgacgcggccacgcagctgatggagctggctcaagccgaaacggtcggcatggtcgacgatcagcgtgttcgcattggagatatcgagaccggtctcgatgatcgtggtgcacacgagcacgtcgatgtcgcgatgccagaagtcgcggatgatctggtcgagctgcttctcccccatcttgccgtgggcgatgccgacgtgcgcctcgggcaccagcgtgtggatcttgtcggcgatggacgagatatcctgcacacgattgtggacatagaacacctggccgcctcgcaacagttcgcggcgtacggctgcggtggcctgcgcatcctcgtaggcgcccacataggtcagcaccggcaaccggtcttcgggcggggtggcaagcgtggacatctcgcgaatgccggtcacggccatctccagcgtacgcgggataggcgtggcagacagggacagcacgtccacgttggtgcgcagggctttcagcgtctccttgtgttccacgccgaaacgctgctcctcatcgatgatgacgagtcccagatccttgaacttgattttcgggttcagcagcttgtgcgtgccgatgaccacgtccaccgtgccggtttccagaccctcgatggtctcgttgatctctttggtggtctggaatcggctcatggccgccacattgaccgggaaaccctcgaatcgttcgctgaacgtctcgtaatgctgctggacaagcagcgtggtgggcacgagcacggccacctgcttgccgtcctgcacggccttgaaggcggcacgcagtgcgatttcggttttgccgaagcccacgtcgccgcagatgaggcggtccatcggcacgggcttctccatgtcggatttgacctcgtcgatggtggtgagctggtcggcggtttcctgataggggaaggcatcttccagttccttctgccatggggtgtccgggctgaacgcgaagcccctggcgcgctggcgggcggagtacagcttgatcaggtcgtcggcgatctcgtggacgtgtttgcgggccttggccttggtggccgcccagtcggagccgccgagcttgttgagcttgggggcttcggcaccgatgtatttgctgacctggtcgagctggtcggtggggatgaacagtttgtccgccggggcgccgcgcttggaaggcgcatattcgatgaccaggtattcgcgagtggttttgttggcgccggtgccgatggtgcgctggcgcatttcgatgaaccggccaatgccgtgctgctcgtgcaccacgtaatcgccttttttgagttccaccaagtcgatggccttgcgccggcgtttcggcgttttggccacggccacggccgaagtgcggccggtcaggtcgcgttcggtgagcagggcgattttggcggctttgtccacgaagccgtcgatggcctgagagcggatgacgtcgaaattggcgatgccggtagtgttgatcgcgcgcctgagcctggccaaggtgccggccgcagcggcggtgatggtgacgtggaagccggcgtcgagcaggccttcgatgccttgggaggccttggcctcatcccctcggaattcggccgggttctgggcgtcgagctgcacatggccggtcagcgtggtgtccacgccgaaactggtgaggcgaatcaccggatgttcggagtattcgagggagctgatggtttccgcatagtcgaggaagctggcttcgtcgaagctgatgggcgcgccggcgccgtggccggaggcggccacatgccagctggcggccaggaactcgttcgcggtttttgccaagtcttcggcggaacggcgcagtttctccgggtcgctcaggaggatcacggcgtgcttgggcagcatggagcccaccggttccagatggtccacgagtgcgggcatcagggattccatgccttcgaccggaatggcgttggcgatggattcgagcatgtcctcagcattgggaatcgaaccgaccaaggctttggcgcgggcgcgcacggcgtcggtcagctgcagttcacggcatgcggtggcccagatggtcttgaggccgtcgccgtaggtacgctggtcggaggcgtggaattccttgatggtgtcaatttcgtcgccgaagaattcgatacgcaccgggtgcggtgcggtgggcgggaacacgtcgaggatgcctccgcgcaccgcgaactcgccacggtccatgaccaggtccacgcgcgtgtaggcgttttcgatcagacgtttggcggcttcgtcgaggggcaggtcctcccccacggtgaacacgagcggctcgacgtcgcccagtccttggacgaccggctggatgagcgagcggatcggcatgacgagaatgcgaatcgggccgaacatcggatcggtatcgctcggatgcttgagtctgcggaacacggccatgcggctggccacggtgtccgcgcgcgggctcagacgctcgtgcggcagggtttcccaggcttcgagctgggcgatgtcgtccgggtcgccgtcataccaggagcgcagcgagcccacggtctcttcggcttcgcggccggaggccacgaccagcacgaccggcttgccgggtttgccggtcacaccctgcccgatggcggcggccaaagccgggcgcaagccttcggaaacaccggccagaacggaattgtcgatgtcgtccgaaacctcgatgtcaccagtggcgagtctaaggaaggtcttgtcctgttccagctcagacaggatgcctaccagtgagccgttgatcaggtccgggtgcgtcgcctcaccggccattgaacttctcctgggtcttggcaagaccgcggaagatgatgtcctcggcggcgtcggcgccgtcagccaggaattcgggcagctgcttgcgctggtccggaccgaatccgcccagcacccagttcaccgtgttgtcatgcgcgttcgcaccgcgcttggagtgaccgacgcccatgcgcacacgcgcgtatttcggcgtgccgagggaacggtcaatcgacttgatgccgttgtggccccctgcggagccgcctgccttgaccttgatacgaccgaattccaagtccatgtcatcgtgaatcaccacgatatggtcgggctcgatctggtaataggcgctaatggaagccaccgcattgccggaatcattcatataagtcagcggcttggccagaaagaacttgacggtgcggccgtccaggttcatcacgcttttaccgagcatggccagacctttgtggtcggcgaagttcaccgtccaacgttcggcgagcacgtcggcggtcatgaagcccatgttgtgccgcgtgtcctcatattttttgccggggttgcccagtcccgcaatcagccagaaatccgatgccataatccactcctcgtccgtcttcctatattcccgtatgcacgttctgtacgttccgtacgtcatgcgcgcgttcgcctcgcgcactggcccatgcccggccggattcaaccgtcaagattgtactcaacgccgccgtcaagccttggaatcggcaagcagcagggcacggcattgctcggcatccatcgatcggaccgatgaatggtgaaacgcttcgacgtcacgagtcacgatgacgtcggcgtcattgtcctcggcaacggcacggatgagcccgtcctcgaagtcgggctcatcggatcggtacgacatacacgcatggcgttccataagtggacggatgtcgaacaattccatcagtccaccgatatcgtctcgcgccgcccgctcctcgccataatgcttgcgcaacacgcaatacacgtcattcaatgacgataccggcgccatgatctcaatgtttggctgtgcaacggcttccatgagcaaatcaacacattgtttatggaaaggcgctcgtttgtcattgcacaaatcgagcagaatattcgtgtcaaacagcagtttcatcccgtcccccaaatcgttccatacgtgcctgcgcgagaatctcctcatccgaaagatcgccttccgcctccggcaaattccggtcggcgaaacgttgaatcaactcctgctttttcctacgctcccgctcctgaatcagggagagcgtcagacgctcgaattccggcagttcccccgtatccgcaaggtagtcggtcagatcacgaatcaggtccgaataggtgcgcccattacgcttaagcactttctccgcgtcgcgcttccgttcggcattgacgcgcgccgtcaccatggccatagtcatatcgcacctccttgtaataccagtattacaagagatggggacgagtgaatcgcgtctattaggcggtccgccagcgaccttttcgcgctgtttgccgttgaggtaccagtaggccagcgccacgaacagggccgccgaggatattgccgagcgtggctgcggacaggttatagaggattcccgatggtgtcttcacctgcgcaaccaactagcgatgaattcaacgcgacatcagccgtatctcccctgcctgcgccgtcacctgaacatattgcaaagcgctattgcaccaattgcggcacgccttgccgagtctccgcacgattctgcccaaactgcggcaaacagttggactgatatgtccaccaatgccgtatatcgggcatcggtgacgagccttgattgtgcaa

SEQ ID NO: 2374 - DNA, 3062 bp, Unknown
  R50_10m  MAG No. k141_3280
tcgcggacatccccaccctcgacgtgtggatagaccgatggctcaacaccatcgcgcccaacgtcaaaccccgcaccctcgaaacctaccgatccgactgcaacaccatccgcagcgtcatcggcggaatgcgactcgacagaataacccccgccaccatcgacggaatgtgcgccaaactcgccaaggaacaccgaagcaaaaccgtccacaaccactatctcagactcaggcaggtgctcgacgcagcggtccgcgaacgcctcatcccatcgaacccggcgctcgccgcaacgccgccgcgctacgagtcgcaggccacccagatcctcgaacccggacagccggcccgggcggcgcaggccgcactcgaccccaagcgtcgcaaatacagccacctggcagataccgacgacgaccgcgaaatgtggagcctcatgtggaacatcatgttcgagaccggcatgagagaggccgaaagattcgccatcctgcccgaagagctcgccaccgtcgacggtgtgcacggaatccagatcatgtgggagctccaacgcttcagatccgatgcagaagtgcccaactggctccgctcccgccattacgagggatgcttctggctcgtcgaaccgaaaagcaagcagggcaaccggtttgtgcccgtcagcaaccagacgtggctcggactctgggcgctcgtcggacgcaggcaatgccagcccggccagctcatattcacgcgcgagggacacccgctcaccaacaccgtggaacgccggcgctggaaacgctctctcgaagacgcgggactgccctacgtcaccatccgaagcgcccgccacttcttctccacgcacctcgccgaagccggagccccggaagacgcgagaaaagcgatgatgggccacgcaaaaatcagcacgacggccggatacacccactggtccgccgcaagccttgcggcacttgccgacaaggctcgtcaggcggtgggggaatcggcctgattgcgattcttgcgcggccttcccccgcccgcaccgcgaccgggacgagcggcgttccaagcatcgatggtctcaggcagccagccgcgagtcgtgccgatcagcgcgtccggctccggcagatgataccccctcgcggccggattgctcgtgccgatgcgctcgccgacctccttgaggctgagatatcttgcggtgctcatttccggcctcccgacagatagccgaacaccccggcggccatgccgaaggttccggccgcgatggcctgaccgccgatggcgagaatgaggcacatcgcgccacatatcagcgagacgagcctgtatgcgtttgttgtgttcatgatgttccatggattagtctggggatagggagccgcagctccggatactaggactattcggaatctgcggctcttgtactaccggcgaggccttcgccgtatatgcggcggcttgggcttcggtacgggtgacggctcatcgcctttggatttcaccgccgcgatgactgcggcgattccgacaagcagggagccgatggcttctatcgccttccagacctcatccatgtctcacctccttccactgttccgtttttgtttacataataattatagcccaactaagtaagttatgcaagtcagaacggcaaagatctggatgtgcctattcgaatgttctccattactcgcacatggtgtaacaagtgcatgtaaaaccggtagaaaatcaggataatgataagacgacaaggaagcgtctggccgttgtttttgcgtcggacgccagccggaaaaagtggagatgaattttagaataataaccagtcgaattgttaactatgagtcaatttcgcgtgggagcctatatagatggctttaatctgtattacggaatgcgttcgcatatggggcgttcgacgcctgaatggcgatggcttgacatacgtggaatgctacagccgtatgcgcagtattgggatcccaacgcctctctgacggtggtctattgcaccgctcgtgtgaacgcctcttcctcgcagtcggcggcgattgaccagaatttctatctgaaagcattgcgtgcgtctggttcggtagatgaaatcgttttggggcattacgtagttcgcagcaattatgccttcatggttgataagttatcacgcagccgagtgcctcaactgctgagcgtaacggcgcagcagttcagcaggataatgccacgcggtccacagaattggcccatctcactccggaatggccatgtcggagtggatatacaacgaattgaggagaagggctccgatgtaaatgtggctccaagactgttgcgcgacatgtacgagaacacaatcgatgcagctctcgttctgactaacgactccgatctgtcggaacccatacgcattgcgcgagaacgtatacctgttggagtgttgaatccccataaagggccgatcgcgggcagtctgaaaccattccgtaatgcgcagaacagaattggcagctggaacaaagctctctctccagccgattttaaagctcaccaactgcccgatgaagtcaacggaatggtcgacggaaaatacgtgtttgcgcgtaagccagcagaatggtgacatgctggaatacttgacgacatacgcctaccaaggtatatttaccactgtacccaccccgattgccactggcgacggggttttttcatgcccgatcgatcggcagacaaaggcgaaccatcggtatggtcatgttccgtattctggcaatcggagtatggatattcgccctgctgattttcgttggcggattgagcaccgatttcctgacatgcacaatagtcgcgctgatcatcgcattgaataccctgattccgtcaagccaaagccccggcgcccgcagagagcgatcggggcgattccgtatatacggcggtagaatctaatcaagccgcatcgagacggccgagagaacaacgaggttgggggcatgatgccggaacgagagaacggaaaaatgggcaaaatcgtgaaatgggtcaaagacaa

SEQ ID NO: 2375 - DNA, 7170 bp, Unknown
  R50_10m  MAG No. k141_3369
aactacacgcatgtgagtatagtaaacactcgtgcttcggcagggagacctcgccaaggaaacacacgcggacatagcttagttggtaaagcgcaaccttgccaaggttgagaccgcgggttcgagtcccgttgtccgctccacaacgaaacctcgcttcggcgaggtttttttcgtattggttcagatgctggtggtatttgtcgcacgcccaacctatcgtgtcctacgttgattaaccagtccaggcctgcacattagtaccgtgggccccgatagcaaaggacaaatcatggcgcaagctaccatctccataaccgtcaacggcgaagcgaaggaggtggaagcaaccaccaccggcgtagaactgttcgcggaagacaagaacatcatcgcggtcaagatcaacggcgagaaccgtgacctgtacacgccgctgaacgatggcgataccgtcgaccccatcgccctcgactccgaagacggcctcgcaatcatgcgtcactcggccacccacgtcatggcccaggccgtgcaggaagtctacccgaacgccaagctcggcgtcggccccgtcatcaaggacggcttctactacgacttccaggtcgaccagcccttcaccccggacgacctcaaggacatcgagaagcgcatgcagcgcatcatcaagtcctcccagtccttccgccgccgttccgtgactgaggaagaggctctgaaggaagaggccgaccagccctttaagatcgaactgatcgaagacaaggaagcacacctcgacccggccgccgccaccgagatctccgaaaaggaactcagcttctacgacaacgtagaccgtgatggcaatgtggtttggaaggacctgtgccgcggtccgcacctgccgaacacccgctacatcaaggccttcaagatcgagcgttccgccgccgcctactggcgtggttccgagaagaacccgaccatgcagcgcatctacggcaccgcgtgggccaccaaggaagacctcaaggcctaccagacccgtctcgaggaggccgccaagcgcgatcaccgcaagctcggcgccgagatggacctgttctccttcccggatgaaattggccccggcctggccgtgttccacccgaagggcgccgccgtgatcaacgcgatggaggactactcccgtgagatgcaccgcaagcaccactacagcttcgtgcagaccccgcacatcaccaagggcggcctgtacgagacctccggccacctgcactggtacaaggacggcatgtacccgcccatgcacctcgacgaggagaaggacgcggacggcaacatcaccaagccgggcgccgactactacctgaagccgatgaactgcccgatgcacaacctgatcttcaagtcccgtcagcgctcctaccgcgagctgccgctgcgcctcttcgagttcggcaccgtgtaccgctacgagaagtccggcgaggtccacggcctgacccgcgtgcgcggcctcacccaggacgactcccacatctactgcacccgcgagcagatgaaagacgagctcaccagcctgctgaccttcgtgctgaacctgctcaaggactttggcctgaccgacttctacctcgagctgtccaccaaggacccgaacaagtacgtcggctccgacgagatctgggaggaggccaccaacacgctcgccgaggtcgccaaggaatccaacctcgagctcgtcgacgatccgtgcggcgccgccttctacggcccgaagatctccgtgcaggcccgcgacgccatcggccgcacctggcaggtctcgaccatccagctcgacttcaacctgcccgagcgtttccagctcgagtacatcgcgcaggacggtacccaccagcgtccggtgatgattcaccgcgccctgttcggctccatcgaacgcttcttcgccgtgctgctcgagcactacgcaggcgccttcccggcgtggctggcccccgtgcaggtgctcggcgtgccggttgccgacgagttcgccccgcatctggccggtttcgtcaagtcccttgaggacgagatggtccgttgcgagatcgactactccgacgatcgtttcggcaagaagattcgcaacgcctccaagtccaaggtgccgttcatcctcatcgtcggtgaggaagacatgaacaacaacgcggtcagcttccgcttccgtgacggcagccagctcaacggcgttccggtggacaaggcccgcgagcagatcctcaccgtcatcaagaagcgcgtccaggtgaactccgccgacgacttcaacgccgctgtggctgagtgatgtgaatggtactggctcccctctctgaggggagctggctccgtaggcgactgaggggagtcctgcatggctcgcactcccctcagtccgtttcacggacagctcccctcagagaggggagccaagaaagggtgcgaaaatgactgacgtgcgtgtcgataatccggcggactttccgcctcaggaggacacggtcgaacgactgtggactccgcagcgcatgacctatgtgctgcgcaacagcgaggatcgcccaaccaagcccaagacgaaggaatgcccgttctgcgccggacccaagaaatccgacgaagacggcctcatcgcctggcgtggcacgcacgtgttcgccatcatgaacctctacccatacaatgtcgggcatctcatgatctgcccgtaccgtcacgtcggattcatcaccgaactcgacgatgccgaactgttcgaattcgagaaggccaccaccctcgccatgaaggtgatggaaaccgtctcccgtccgcacggttacaatatcggcattaatcagggcgaagtagcaggcgcaggagtcgccgctcacctccatcagcatgtagtgcctcgctggaatggtgacgcgaacttcatgcccatcgtcgcccagacacgcaccatgcctattctgctgtccgaccagcgagaagcctatgcccaggcattcgaacagctggctccgcagtatcatctgccgcttgcctaacacaggtgtggcaccccgcgtgaccggtcttatcggtacgcataacaagacaatcatcggaaacatcacgggtatgtctgattaacggcctacaatcgtttcgtttgacatcatccgtttcaataattgctaggagcattatgtcaggtcattccaagtgggcgaccaccaagcacaagaaggccgccatcgacgccaagcgcggcaagctcttcgccaagctcatcaagaacatcgaaatcgccgcccgcctcggcggtggcgacccggacggcaacccgtccctgtacgatgccatctacaaggccaagaaggcctccatgccggccgacaacatcgctcgtgccgtcaagcgtggtgccggtgctgaagacggcgccgccaactacgaagacatcgtctacgagggctacgctcctgccggcgttggcctcatcatcgaatgccttaccgacaaccgcaaccgtgcggccgccgaagtccgttccaccctgaccaagggcaacggctccctggccacctccggctccgtgtccttcaacttcgagcgcaagggccagatcgtggtgccgtccgagggcgtggacttcgacaagctgttcgaaaccgccgccgaagccggtgccgaggacgttaccgatgacggtgaggtgttcaccgttgtgaccggtccgtccgacctgttcaccgtgcgcaaggctctgcaggacgccggcttcgactacgattccgccgaccaggtcatgcagccgaagaacgaggtcgagttgagcctcgacgatgcccgcaaggtgtccaagctcatcgacaacctcgatgacctcgacgatgtgcagaacatctactccaactggaccgcttccgacgaggtgatggcccagctcgacgaggagtaatcctcgtgattatccttggcgtcgaccccgggctcacacgttgcggggtcggcgtgatcgaagccggcgagcaccgccggctttcgtttattcacgtggacgtggtgcggtcctcaccggatatcacccaggatctgcgtctactggccatctacaacggcctgtccgagaaaatggatcgcttcgcacccgatgccgtatccatcgaacgagtgttcgcacaatccaaccgcaacaccgtactcggtaccgcacaggccgccggcctcgccatgctcgccgccgcgcaacgcaatattcccgtggcgttgcatacgcctaccgaagccaagctggctatcaccggtaacgggcaggcgcagaagattcaggtggagcgtatggtgacacgtattttgaacctcaccaaaatgccgactcccgccgatgccgccgatgccttggctttggccatttgccatgcgctgcgcccggcaggcgcattgcagggcggcgaacgcgaacaacatctgaccgccgcgcaacgccagtgggctgaggccgcacagaaatccacgcgccgccgcatcaaccacgaccgaggcatgtagtatactttcgaacagttgttcgagtcttgaatcctggagccctgaaggagtacctgtatgatcggcatgctgaccgggcgggttgaatcggtcgaaaccgataccgcattgattgatgttgggggagtgggctacgaagtgcgcatgtccgccaccgacctgagccgtctgcacgccgggcaagacacccgcgtcttcacctatatgaacctctctcaggatgccattaccctgcatggattcctggatcgggacgccaagaaaacctttctgcaactcatcaaggtctccggcattggacctaaagtggcccaatcgttactctccacactgacgccgagtcagctggcccacgccatcgccgacaacgacgccaccgcgctggccaaggctccggggctgggcaagaagggcgcacagaaaatcatcctcgagcttaagggctctattgatttgagtcagatcgagggtgcttccgctcaggcggcaatatccaagtctccggtggataccggtacggaacaggttgtcgaaggactgatttcacttggctggcgtcagcaggacgcccagcaggccgttgccgaggcttgcgccgaaaacgatattcccacgccgcttgccaccgacgatgtgccgcgtgtgctacgtctggctttggcgctgatggataggggccgctgatgagcgagacaacggattacggtacctcaaacaccggtgccaacgaagagtcgttgcgcatggtctcctcccagccgatcggcaacgagccggtcagcgacgaggagctgcgcccccatgttctcgaaggctttatcggacagccacggctcaaggcccagctgcaactgttcctggacgcggcccgtaaacgcgatgtgccaccggaccatattctgcttgccggccctcctggcttgggcaaaaccacgttggccatgatcgttgccaatgagcttgaagtgccgattcgcgtgacttccggccctgcggttcaacatgccggtgatcttgcttcgattctgagctccctcgacgtcggcgaagtgctgttcatcgacgagatccatcgtctgccgcgcgccgccgaagagctgctgtatatcgcgatggaggacttccgcgtcgatgtgatggtcggcaaaggcccgggcgcaagctccatcccgctgaccctgccgcgattcaccgtcatcggtgccaccacgcgcgaaggtatgctgccaagcccgttgcgcgcacgctttggcttcaccgcacatctcgacttctatccgcacgaggagctggaaaagctcatcgaacgttcggccaacgtactgggcgtaaaccttgatgcgggttccgctcatgagcttgcgttgcgttcgcgcggcacgccgcgtatcgccaaccgattgctacgccgtgtacgcgactgggccatcgtccacgacctgatcgtggtgcggccggacgacgtcaaggaggcgctggccctgtaccagatcgactccgaaggcctcgaccggctggacatcgccgtgctcaatgccatcgtgcgcaacttcaacggtggacccgtgggcctgaacaatctggcggccatggtgggcgaggaatcggaaaccgtggaaaccgtgtgcgagccgtatcttgtgcgcgaaggttttatgattcgcacgcccaaaggccgcgtggctaccgagaaggcatggcagcatttgggaattacgcccaaagatgatgtcagcaagctcttctagactttctcctgtttgcacacttggcggcgtttcgtcaatgtcgctcgtttgaaggagttgtttcgtggaacaacagtacattatgctcatcgtgatcgtcgtcgtgttcggcggcatgatgtggtggcagtccaagaaggccaagcagcaacagcaggagaagcaggacttccgtcgcaacctgcagcccggcaccgaggtcatcaccatcggccaggtgatcggcaaggtcgtcgaagtcgacgagcagtatgaggagatcgtcatcgactccgaaggctccaagctgcgtttcggcttcaacgccatcgcccgtgagtacacccgcccggcctatgtgtccgatgatgaggtcgacgagaacggcaacccgctgcccgacgaagacaccgaggctccggctaacgatgaggctggtcaggttccgatcgaggcgtccgtcgtgtccgaggaagacaccgctgacgagaccggtgacgacaacgaaaccaagacgaagtaagctgttcgattcggtagcaccatccgagtatcgcatcgcaaaggcataaaaggggcgagcactatggcacagtcggacatcaccatcgacgcattgagcaaggtagggcaacaggacgccgaatatctggtgtccttggtgcgttccataccggggtttcccaaggaaggcattatcttccgtgatttcatgccagtgctcgccgaccccaagggcttgaagattctgctcaaggcgcttgaaacggctctgccggtgtccccgagcgaattcgactccattgccggtctcgaatcgcgcgggttcctgttcggcccggccatggccgcccatctgggcaagggtttcatcgccgtgcgcaaggccggtaaattgccgcccgaa

SEQ ID NO: 2376 - DNA, 13463 bp, Unknown
  R50_10m  MAG No. k141_3396
ccggactgtcgaacaggttcgagagcatgtaaatgaatgtaatattagcggtaagcacgtgagaatacggcgatagaacagtgatgacggggaaggtgcgatcatggtcggcatgcgcgatgtggcgaagaaggccggggtgtctctgagcaccgtctcgctggtggtgaacggcaacgggtacgtgtctgatgacatgcgcgaacgtgtgcgcaaagccatgcaactgctcaattatgtgccgaacgagcttgcccgcaatctgtatcatgatcgtacgaatctggtcggcgtcatcgtgcccaccatccgccacccgttctttgcaacgtttaccgcacatctgcagcatgcgctcgccgcgcaaggattacgcactatgttgtgctctaccgcagatgaggcggagggcgaaatccagtatgtcgacatgttgcgtcggcacatgatggacggcatcgtcatgtgtgcgcacacttcgcatcccggcgattattggacgtcgattcatcgcccgatcgtcgcgttcgaccgtgtgcttggagacggtatttcgtcgattggatccgaccacgagcagggtgggcgattgattgcgcagatgctgatccgcaatggtgccaaacatgtggtgatgattggcggtccgcgagatcaattcttcgatttggctgcgcgcggagaagtcgaggaaggatcgttcgatttgggaaagaccacgttcccgacggtgcgctattacctcacgttggaacaggaattgacctccgcaggcgtgaaatacgagtatgttgaagctggcgaagtgatggattttgccggctatcatcgtgcggtcagcaatgcgctcgacaaggtgacgaccgacggcgtcgatgccgtggtcagttccgatattggcgcgtcgttctgcgtgcgcgaagcgttgagccgcggaatttccattcctgacgagctgcagatcgttgcctacgatggtacgtatttgactgatttggctggcatgaagctgaccgcggtcgcgcaggatttctcggcgatcgcacagtcggcggccgaccatatcgtgcaggctattgccaatgaggaagtggctgcggctaacgcttcacgcaggaacatccccaagccgttcgagccgaacgtgcttattcccatgacgctggtgccaggcgataccacgcgttgatgctgcgcgttggaacgctgagtggggatcggacaggctgggctgcatagaacaccgcatcgaaccggttcgacacgcgcgttccgctgtgtgactggacattgactcccctctcgaggtaatatcgaaccggttcgatgcatacgtgagtatgcaaatacgtaaacaacaaacaggcagacgcgtacacattgcacctgcatccatgaaccaagggaggtcccatgaaaaacaaagtgcagctcatcgcttacgccgatcgtctcggcgatggcactcttagctcgatgaccgacatcctgcgcacccgcttcgacggcgtgtatgacggcgtgcatatcctgccgttcttcactccgttcgatggtgcggatgcaggctttgacccgatcgaccacaccaaagtcgacccgcgtctcggcagctgggacgacgtcgctgaactttccaagacccacggcatcatggtcgatgccatcgtcaaccacatgagctgggaatccaagcagttccaagacgtgcttgaaaaaggtgaggaatccgagtattacccgatgtttctgaccatgagctccgtcttcccgaacggcgccaccgaagaggaactggccggcatctaccgcccgcgcccgggcctgccgttcacccactacaagttcgccggcaagacccgcctggtctgggtcagcttcactccgcagcaggttgatattgacaccgattccgacaagggctgggaatacctcatgtccatcttcgatcagatggccgcatcccacgtcagctacatccgtctcgacgccgtgggctacggcgccaaggaggccggcaccagctgcttcatgacccccaagacctttaagctcatctcacgcctacgcgaggaaggcgtcaagcgaggcctcgaaattctcattgaggtgcatagctactacaagaagcaggttgaaatcgcctccaaggtggaccgcgtctacgacttcgccctgcctccgctgctcctgcactcgctgttcaccggtcacgtggaacccgtggtccactggaccgaaatccgcccgaacaacgccgtcaccgtgctcgatacgcacgacggcatcggcgtgatcgacatcggctccgatcagctcgaccgcagcctcaagggcctcgtgcccgacgaggacgtcgataatctggtcaacaccatccacgccaacacccacggcgaatcccaggccgccaccggtgccgccgccagcaacctcgacctctatcaggtcaacagcacgtactactccgcgctcggctgcaacgaccagcactatctggccgcccgcgcagtccagttcttcctgcccggagtgccgcaggtctactacgtgggcgcactcgccggccgcaacgacatggaactgctgcgcaagaccaacaacggccgtgacatcaatcgccattactactccaccgccgaaatcgacgaaaacctcgagcgcccggtggtgaaggccctgaacgccctggccaagttccgcaacgaactgcctgcattcaatggcgagttcagctacgaagccgacggcgacacatccatcaccttccgctggatcgctgccgacggcaagaccaaggccgccctcatcttcgagcccggccgcggactcggcacggataacaccactccggtcgccagcctcgcctggaccgatgccgccggtgaccacgagactgatgatctgctgagcaacccgccgattgccgatatcgactaaccgttggcccataaacgccactccgctgtgcgcgctccaagtagtgcgtccggcgtaagctgggtccatggaaaacaaaccgcccgcagtgcactgaagctagtgcgctcgggcggttttgcatgtggcggggttgcgggtcatgctcagtcggagctggccggtacctcccgccggtgatgagagcaaagaaagagcagcaacatgttggaaccgtacgtgcgcccgggtattgacgaccgcccggatctcgacaaggcattgagtcccgaagacaaggatgccgtggcccgactggccatcaaagatcgtcggcgtcctcccgaggcatccgccgatcagcccgaggcccaggccgtgcgtctggcggccgccggttcgtcggctgctgccgctgccgcggccagcgtggatgcccctgcgcctgatctgtcgtctgcatatctcgatatgcgcgatccgatggtcgccgccaatggtcagcgacccaccacgggccaggtatcccgtctcaactgggggttcttcgccgcttccattctggtcggcgcaccttggatagcattgaataccatcgccatgcccaacgccgtggcgcgtttgttcggctacgacaccgcttctgccatatcggtcaccatcaatccgtccaccggccgtccgctgcccgtcgccactgacttggtggtgcctctggccgtgctggtggtcgttggcgtggtggcctccatgttcgcgatgcccttggtctccgcgctgtccgaccgcacacgtattcctctgggccgccgtaccccgtggatggtggcgggtggcgtgctgtgcgcgctgatcacgctggttctggggcggaacacaggcctcgtagtgctgtgtttcttctgggcgctcatgcagtttgcctatgcgatgatttccgtgccgttggccagcgccatcagcgaacgggttccggacaaattccgtccgcgcattgagcgctggcacggtatcggcgtgatgcttggccaagcgcttggtgtatgcatgggtgcgctcggcgtgatgttcgactccttcacgccgtttgcctacaccgccgtgctgtttgcggtttccggcatcctgaccgtgatcatgctgcccaaggagccttccagccaggagcagccacatcaacgattcgagtcgagccaggtgtttgaccagctgcgtccgccggcacatgcgcctgcattcgcccgtgtgttcgccgctcgcgtgtgcatgatgacgggcgttgggctgaccggggtctttctgtggtatctcgtgcgcttttgggtgtatggcaaggctgtggtgttcacttccgcgccattgaccattcccgcgggcctcctcatcgccggcatggccgcggcaacgctcatcggtgctgcgctcgcgtcctgggccgctgggccgatctccgagaagatcgaggaacggaacatcgccaccactgcagtggtggcggcatcctgcctgctgtatgccatcggcgtggcggtggcatgggggctcggcgtctggtccaccggcacggcacgtgaaaacggcatgctgctcttcgcgctgatctccggattcgccttcggcgtctacgatgcgttaggccttgaactggtgatggactctttgcccgacccgcgccgagccggccacgacctcggcatttatgcgctcgccaactcggccggtctggcgctcgccgccatcatcggcgcgctactggtgaacgccttcgagcgcagcttcggctattacctgctcttcccgtccgccatcgtcatggtgctgctggccggaatcgtcaccctcaccgccgagtccgcgcaatgacgggccggtccggctccccggccgccggcggcgttcctccccgcggcgggggcgttcgtctcggcgacgtggcgtccacaatgtgaacccttgctggattggcaagacagccaaacctatgtttacattccagttcaggtcgaacggcctgaggaaataccgaaaggaggccacgcgatgactggattcaatgcttctgcgtttgtatccgcacgaattattagcccgtcttcgctggcggactaattcggcattgatgcttgaagccccgtcaacgaaggcagggccaatcaagctgacacaatcggtaaggccctgcaagttgcggggctttttttgttgcgctcacaaggcttacggcagaatcccgcagacggaaacggtagcggacagtacacggcaacaacacagcaacagaacaacaacctccctgtgagacgaaataatcgcccgccaatgagagtgaacgagagcaaaacaggagtaacaatgactgcagcagtcgaagagactggcttagggcaggcggcaggtaaagccgctaccttggtacgcgattcggtcaagaccgtgatcgccgcatcgatggtcggtaccgccatcgaattctatgacttctacgcctacggcaccgccgcggcaaactacttcccgcacatcttcttctccgcgaaggacaaccccaccgtcgcactgctgatgagcttgctgaccttcgccatcgccttcatcgcccgcccgctgggctcgctgatcttcggccacttcggtgaccgcatgggccgcaagaccacgctggtcgtcagcctgatgaccatgggtgtcggcaccttcctgattggctgcctgcccacctacgatcaggtcggcgttggcgcagtcgccatcctctgcctgctgcgcttcatccagggcatcggcctgggcggcgaatggtccggcgcggcactggtcgccaccgagaacgcgcctgaagacaagcgcgcactgtacggctccttcccggagctcggtgccccgatcggcttcttcctgtccaacggcacctacttcgtgctcgaatccttcaacaatcaggacgcgatgctggcttggggctggcgtgtgccgttcctgctgtccgccatcctggtgatcgtcggtctcgtggtccgcgttcacatggaggagaccccgatcttccgtatggctcaggagcagaagaaggtcgtcaagtccccgctgaccgaggtcttccgcaagtcttggcgtcaggtgctgcaggccaccttcctcgtggccgtgacctacacgctgttctacacgctcgccacctggtccctcgcttggggcaccaaggagcagggcgaaggcggcggcggccttggcttcaccaaccaggaatacctgctcatgctcatgatctccatctgcgtgttcgccctgttcatcgtgctgtcctgcctgtacgcggacaagatcggccgcaagcgcgtgctgaccttctcctcctgcgcactcgtcgtgttcgccgcgctcttcccgttcctgctggacggacaggtcgtcggccagcacaacttcttcgccaacatggtgttcctgtgcgttggctttgccctgatgggcgtcgccttcggcccgatcggcgcgttcctgcctgaactgttcgaggcgaacgtgcgctactccggctccggcatcggctacaatctggccgccatcgtcggcgcggcgttcgtgccgaccatcgccacttggctgagctcccactggggcgtccactccgtgggcctctacctcgccgtgatggccgtgtgctgcctggtgtcggtcctgacctgccgcgagacgaaggacgctgactttaccaagtgaaatcctccataactaaatatcgccaagttcacaacgtgaaaaatctcaattccactaagtgaacctctgcagggcttttccgggtcaacaggactaaacctgcatatcggaaaagcccacaaggaaagccaaaactaaaaacagtttctgcagaaccagcagagcacaataacaattaaagatttcaccccccataaacaaataaataaaaggagcgccaaaaatggcagcaactatctggtacgagaaggacgccgatctgtccgtgttcgatggcaagaaggtcgccatcttgggctacggctctcagggtcacgctcacgcgctgaacctgcgtgactccggtgtcgacgtggtcgtcggcctgcgtccgacctccaagtctgtcgagttcgccaaggagcagggcctcgaggtcaagccggttggcgaggccgtcgctgaggctgacgttgtgatgatccttctgcctgaccagtaccaggccaaggtctacaaggaagaagttgagccgaacctgaagccgggcgctgccctggccttcgcccacggcttcaacatccactacggctacatcaagccgtccgaggatcacccggtgttcatggttgccccgaagggcccgggccacatcgttcgtcgtgagtacgccgctggccgtggcgtcccggtcgtcgttgccgtcgagcaggacccggacggcaagacctggccgctgtgcctggcttacgccaaggctctgggcgccctgcgcgctggcgccatcaagacgaccttcaccgaggagaccgagaccgatctgttcggcgagcaggacgtcctcatgggcggcatcaaccacctgtgcgacctcggcttcgacgtgctgaccgaggctggctaccagccggagatcgcctacttcgaggtcttccacgagctgaagatgctggtcgacctggctaacgagggtggcctgaacaaggctcgctggtcctgctccgacaccgctcagtacggcgactacacctccaccgtcatcaccgaggagaccaagaagcgcatgcagtaccagctcaagcgcattcaggacggctccttcgccaaggagttcatggacgaccaggccgctggcgccccgaagttcaagaagctgcaggaagagttctctcacccgcacctcgagaccgtcggcccgaagctgcgcgccatgttctcctggaacaacgccgaggccaaggacaaggacgaggccgagtccttcaacggcaagatcgctcgtacccaggttcagtgattgccgcccctgaaggggatttaagctagcaaaccgccgttcccgcccatacgggagcggcggttttgtgttgttgcgcgcagcgaatcattctcaataacaactgtgcgctgatttcttgcaggcaaacgaacaccgaatatgcaagatcgttgatatctcagcctttccccatatgtgggattgtgcgattctgttcaaaagggtgcagagttgttatcgagaatcgttctctgcacacggctgtccatactccaatagtgacctagctcacgttgtggactccagcggggctgtgacggcgttctcggtaggattgatttcggtttgaaggacacaatcctcgcaacacaggacttatctgcacaccgtagataccccggcgcccagcggcgccacaccccactactgaaaaggagtgccaataatggcagcacagatctggtatgagaacgacggcgatctttccgtcctcgaaggcaagaaagtcgcaatcatcggctacggctcccagggccacgcccacgcgctgaacctgcgcgattccggtgtcgacgtggtcgtcggcctgcgtccgacctccaagtcggtcgacttcgccaaggagcagggcctcgaggtcaagtccgtggccgaggcttccgccgaggccgacgtgatcatgatcctggcccccgaccagtaccagcgcaccatctgggccaacgacatcgagcccaacatcaagccgggtgctgctgttgcgttcgctcatggcttcaacattcactacggctacatcaagccgtctgaggatcacccggtgttcatggttgccccgaagggcccgggtcacatcgttcgtcgtgagtacgccgctggccgtggcgtgccggtcgtcgtggccgtcgagcaggatccgcgtggcgatggttgggctctgaccctggcctacgccaaggccctcggtgccctgcgcgccggcgccatcaagaccaccttcaaggaagagaccgagaccgatctcttcggtgagcagaacgtgctcatgggtggcgtgaacaagctcgtcgagatgggcttcgaagtcctgaccgacgccggctaccagccggagatcgcctacttcgaggtctgccacgagctcaagatgctcgtcgatctgatgaacgagggcggcctgaacaaggctcgttggtcctgctccgacaccgcccagtacggcgactacgtcaacaccgtcatcaacgaggactgccgcaagcgcatggaataccacctgcagcgcatccaggacggctccttcgccaaggagttcatcgacgatcaggatgccggtgccccgcacttcaaggaactgcaggagaagtactccaacgagcgcatcgagaccgtcggcccgaagctgcgcgccatgttctcctggaacaaggatggcgtcaaggatgccgacgaggccaactccttcaccggcaagatcgcccgcgcccaggttcagtgagcccctgtagctcccgctggcgcataagcgcctgaggagagtacccagcacgtaccaaaaggccgccgctccgattcattcggaacggcggcctttcgcatggtcccaccatatagtcaaacctccaccacgtagtaaaatccccacgacgtagcaaactacccaccacgtggtgacgcaaaacggctttattccgcggaatacaaaattacgctgacatcgtggtagaagattcatcgcgtggtgggcagttcatcgcgtggtgggatagacagttgatatacgccggctatcaaatcaatgatgccttgctgtgttccccgtatgccgagctgctttatcggaagcgtttcatgggatattttcccaagaaaatcagcgagatcatggtaggcctcgtcgttgagagacacgcgatcctctggagcaagtagttgagccaaacggaatacatcatatttatgcttcttgagatcttttccgtctacgtgctcgccatgttgttctcgggcgttgagatccaaccatgctttcgccttgaaaggaatgagatatttctcgttaagcacgctgatgccttgtattgattcgcggccttgctgcagtagccgatagtagctgtcgttcagcatgatggctgacaggctggaaacatcgtttgcaatatgcaatggcgtcagggacgagttcggcacaatagggaagtcagggtgacgtgaaaatagctcgatcatagtgggatacccgtacgtactggggtgcatgaaacggtacaggtgaggctgtgcggagttcttcgtgatagaggtgtatccgccatcgcgaatgaaagaccacaatcgttgtgcaaactcgcgaagatgtccctcggcaatcagcaccatgtcaatatctttggtggctcggaagtccaggtcgttgtcggtcatgatgatgtcacaagcggtgccgccgatgattacgtaagaatcttcgtagccggcaaaggccgttctgatgagctgcaggccttgtgtcatattgtcactcctgagaaagtattgcggatggatccttgtatggcgtcttccaaacgttcgtcggcaatctcgccaagagtcagggccgtggaaatggggtcggcaaggtagtcttcctgcgtatattgagcaagtaggcggggatcgtacctccacagctccagaatatatgcattatctggcaccttttccaaagcggggtcgataatgcatagttccttgttgtgctgcttgagccaatgacgttcaacggcatagattcgcagttttggggtggccagttgcgtcctgcgcgaaagagcaaattcgccggccggaatcagctcgtcggcaatcatctggcgattgcgattcgtgacggtatatttgctgaatattggtgacttcaggagatgccaagatgatttcagtaaatcaagtcggctggtctgccttgaagtcagtagttcgacgctattgctgcggccttgcttggtgcggtgcacgaatgccagctgttctaacagcgtcacggcaacgctgacctgagcttcggtaaactgaagcgctcgggcaatatctgattggactttgctctcgttggagtagagcaaatacagccagaccagctgtgttgcgggggagaagggccgcacctcgatatcctgtgcgttctccagcggccgtgaggagatgcgctgggtgaacaccatgcccagtgaagggatatacagttgggtaccgggcacgatgaaaggaacgtgattctgaatcaaggcttttcgctggtatgcagaaagccggggaaactgaaagacaatgggcagatccgtccgctgctcaagcctgctggcgtcggcggtgacgcgtgtgatgctgaatgggtgagcctctccgctcgcgattagcatgctcgtgttgtcgatggtgagtttgctgaatgtccgtccgttggtcagaaatagcggcagtgaggcagtgccatcccaagaagtgatttggcagggcagaccaagtgtctcgcgaatgtaatgctcggcatccatgtcgacctcaatccttaacgaaaatctgtaagattcacatctcttgttaagtatatagaatattattaagtatttcggggttggcatgtcgcgaatggaaagaaagggcagtcatccccgaaatggagacagcttagccgggaaaaaggacgacgccagcatccggagaagatggatgactggcgtcgggtaagctcgcaaaagctctactgaataacccacgcagaagtgtcggtggggagctggccttcgggggtcagcgggccggacgccagcaccacggagccatcgggcagcgcgaccggggcattgccgaagttggtgattgaggtgaacacccgcccgccaaccgccgcgcgggtgtacgccaccacatcgtcgcccatgtccacctgctcggccgtggtgtcgcgcgtggcggtcagcgactcctggcgaatcgccagtgcggcgcgatacagcgcgagcatcgagtccgggtcggcttgctccacgtccaccgcgtaatccttgaaccacagcggttgcggcaggtgcgggtcggcggccggcgtcacgccctcagcgcgcgtagccggcgagaagccgaaggaagcgcccgtgccgaactggccggcggcgcacagcggcacatggttctcgccggtaccgtcatcggccggagtcggacggctgaaatcggccaaggccggctcatcggcggcggtccacggcagcggcacgcggcagccgtcgcggcccttgtccatcgtggcctgagcagtgtggaaagcggtcggatcctccaagtgatcccacggaatatcggccacttcaaacaggcccagctcctcgccctgatagatataggcggcaccgggcaggccgagctccatcaaagcggcggcgcgggcgcggcgggtgccaagctcgcgatcctcgggataggtagtgccgttgcgcagcagccagtcgtgcggcagctggtggtagggcgcgcccttgatctgcggcaggccgtaacgggaggggctgcgcggcacatcgtgattgttcatgacccacgtggtggtggaaccgccggtttcggccgccgccttgagtccggcggcgatggcctcgcggaactcgtcggcataccagttggcttgcgcgaagtcgaagttgaaggactggcccagctcgtccatcgaagcgtacaggtgctggtgctcgggcaccacccacgcctcggccacggcaaagcgcggcgggttgtactcgttgaacacctcgcgccattcgcggtagatatcgtgcacctcgcgacggtcgaacagcgggtggctgaagtcatgattcagcacgccgaccacgctgtattcgcggccgagctcttccaacggcttggattcgaggtccttggccaggccgtgcgccacgtcgatgcggaagccgtcggtgccgtggtcggaccagaaacgcagggtcttcttgaactcctcgtggatgtccggattcttccagttgacgtccggctgcgccttatcgaacaggtgcagataccactggccgtcggccacgcgcgcccaggccgggccgccgaagaaggattgccagtcgttcgggggcagttcgccatgctcgccgcggccgtcgcggaagatgtagcggtcgcgcgccggggagccaggctcggcggcgagggcctcctggaagaacacgtgcttgtcagcggtgtggttgggcacgatgtccacgatcaccttgatgccggcctcgtgcgcggccttggccatcgcgtcgaagtcttccatggtgcctaggcgcgggtcgacgttgcggtagtcgattacgtcgtagccgccgtccgctaggtcggaggggtagaacggggaaagccagatggcgtccacgccgaggctcttcaggtagtccatcttctcggtgacgccggcgatgtcgccgatgccgtcgccgttaacgtccttgaagctgcgcgggtaaatctggtaaacgacggcctgcttccaccagtcgtcattgaggttatttgcggtcatgcc

SEQ ID NO: 2377 - DNA, 5497 bp, Unknown
  R50_10m  MAG No. k141_3661
cgggatcgcgcccggtgatgcttgacccctctcgcggacaggacggtttcttcatcggcgagacccgccacatcaattccgccgattccggcttcggtaccagcttcgtcagcatgcccgacccggaaatgcaccatgcgctgacctcccttggccatgtggacgcggtactgccggtgctgcacggtccctatggcgaggacggcacggttcaaggcctgctggaaatgatgggtgtgccgtacgtggggtgcggagtgtttgcttccgccgcctgcatggataagcattacaccaaggtggtgctgggtgccgccggcattcccaccgcgccgggtgtgacggtcgatgcgcgcaacttcaccgccgccgatgtgcttgccaagatcgaggacgccggtcttacctatccgctgttcatcaagccttcacgcgccggctccagcttcggtgtgaccaaggtcgagaaaaccgatgaccgcgagacccagcaggatcgtctggccgccgccatcgccaccgccggcgagcacgactggaaggtgctcgtcgaacaggggattgatggtcgcgaaatcgaatgtgccgtgctgtgcccgaaggccggtgacgagcccgaggccagctggcccggcgaaatcgtgctcgatcatcagaacgacgaccagttctacgatttcgactccaagtacatggatgcctccgccagccacgtggaagtgcctgccaatctgccggtcagcgtgcttgaggacgtgcgtgacgtggcccgtcgcgcgttcaaggccgtggatggtgccggcttgagccgtgtggacaccttcgtgacgcctgatggcacggtgatggtcaacgaaatcaacaccatgcccggcttcacgccgatttctatgtatcccaaggcttgggatgccaccggagtgagctacaccgaactcatcacgcgattgattgagggcgtgctgaggtaagtgtggtgcggaatcggccgccaaggaagagggcgcgctgaacgtcatcgcccttccgcacgactggtccaactacggcgaggtcatcgagggcttcaagaagaagtacccggagatcaagatcaccgagctgaacccgaacgcctcctccaaggaggagatcgacgccgccaagaccaacaagggtaccgacgccgcccccgatgtcttcgacgtcggccaggccatcgccgccacctccaccgactatttcgccccgtacaaggtgcgggcctggaacaagatccctgatgctgccaagaacgtcgacggcgcctactacgccgactacaccggcatcatgtccgtgggctggaacgccgacaagtacggcgatgtcgcctccctgaacgacctgctcgatccgaagttcgccggcaccgtgtccctgaacggcaagcctaccgaggccggcgcggccttcaacggctatctgatggtcaaccagctcgccggcggcgacatcaacaaccttcagcccggtctcgacttcttcaaaaagctcaaggaagccggcaacctgaacaccatcgatgtgaccaacggcaccatcgactccggccagaccggcgtggtcttcgactggacctacaaccaggcctcctacaagaaggaactcaagtccaagggcgtgaactggaagtacaagaccttccccaaagcccaggtcgtcagctactacaaccaggccatcaacaaggacgcgccgcaccccgccgccgcacgcctgtgggaggaatacctgtacaccgccgaaacccagaacctgtggttcaagggcggcgccaacccggtgctgctcgactccatgaaggccgacggcaccgtcgaccaggccaccctgaaggacgccatcaccatcgaaggccagccggtcacctacagcaacgatgactccacccgcatcaccgagtggcttcaaaacaactgggataagacgatcggcaactgagagtccacgatgaccgccgcaatcgcacccatcgcaccggacggacccgccgcctccaaggccgcgggtccgtccgccgcatcgacccccgcttcgtccgcactggcgaagcgccgtcaggagcttggcacgctcaccaccacgctcccgttcttcgcctacaccgcctgcttcctgctggcacccaccgtgatcgtgatcatcggcgcgttccaggatcgcagcggcggtttcacgcttgcgaacttccacaagatgttcgaagccaacaccatcgccgcgttcggcacgtcaatcctggtgtccgtggcctcatccctgatcggtgccgtggtgggcgcgctcgcctcctacgcgctggtgatcggcgccaagccgaacggaccgctgcgccgtatggtcgccgccatctcatcggtgctcgcccagttcggcggcgtgatgctcgcgttcgcgttcatcgccactcttggcatcaacggcatcggcaccatgctcatcaaaaccctgactggctataccgtgaacccgaattggctcagctccctgccggggctggtgaccgtctactgctacttccagattccgctgatgatcatcatcttcctgcctgcggtcgattccattcgtccacagtggcgcgaagcctgcgagtcgctcggcggcaacaccgtccaatactggacgcgcgtggcctgcccgatcctcgcaccccgcttcatctcggcgttcctgctgttgttcgcctccgcgttctccgcatacgcgaccgccgcagccctgttctcgcagcgctcgattctggtgccgttgatgatccaaggtgccatgcgcaatgagatggaccccaaccagcagggcttcgcgcaggtgctggcattcgcaatgatcatcgtcgtggccatcgtcatgctgctgagccacgccgtggaaaagagggccggacgttggcaatgaccgaaacttccacaaccaagccgccgcagctgcgtgccgcccgcgtgcgcaaacagagcatcatcaaattcgtgatcctgttcgtcaccctggcgttcctgttcgtgccgctgctggccatgttcatcttcaccctgcgtcacccgttgtccggtcgctggtcggccgcgccgtggacggcgattttcaccggcaacggcgaatcgttgggcgccgatctgagcgtgctatggcagggcgtcggcatctcgctgtcgttgagcgccgtcaccgtcgtgatcatgctcatcctgctggtgcccaccatggtcatcgtgcatattcgctccaaagccttggagcgtgcaatcgaatgggtggccacgctgccgctgaccattccggccatcgtgctggtggtgggtcttgggccgatctaccgttggctttccgccgacgtgttgagcaccaacccgatctggctgtgcttcgcctatgtgattctcgtgatgccgttcgccttccgcgcgatcgccgtgggcctcaactccatcgacgtcaagacgttggtcgaagcctcccgatcgctcggcgcctcctggcccaaagtgttcttcaaggtgatcatcccgaacctgtggcagtcgatcctctcggcatccttcatctccatcgccgtggtactcggtgaatacaccgtcgcctcgctgctcggccgtatgaacctgcaggtcgcgctctaccagctcggccaatccaatgcccaaatttccaccgccatgtcgctgctggctctgctcttcggcgtggtgctcctcgttgcgctcgacctgatctccgacgcaatgcgtaagtcaagggaaggtaagtgacccgatgaacaacgattcaactcccacccgtcaggaaaccggtaccgcagtggacgccgccccggcgtccccggccattccggcagccgtgtcctccactgccgaggacgccttcaagaacgatcccaccgctaccctcgagggcgtgcgcggcaaggacgtgaccaaggccgccaaggccctgctcaaagacaccgccaagcgcggcggtggttccattcagatgcagaacgtcgtcaagatctatcccggctccaccgttcacgcgctcgacgacttcaacctggacatcaagcccggcgaaatggtcgtgctgctcggtggatccggttgcggcaagtccaccgcgctgcgatcgcttgccggtctcgaagacatccaaggcggacgcatcatggtcggcggacaggacgtcaccggtgtgccggtgaacaagcgcgagatggccatggtgttccaggcgtactcgctgttcccgcacatgaccgccctggagaacgtggaattcggcctcgaagtgcgcggcatgggcaaggccgaacgccgcaagatcgccatggaacagctggagctcgtggggcttgccgatcaggccaagaagtacacgcagcagatgtccggcggccagcagcagcgcgtggccctggcccgggcgctggccatcaagccgcgcgtgctgctgctcgacgagccgttgtccgcgctcgacgccaaagtgcgcgtccagctgcgtgaccagattcgccgcatccaactcaccaccggcaccacaaccgtcttcgtgacccacgatcaggaagaggcgctggccgtggccgaccgcatcggcgtgatgaacaagggcaagatcgagcagatcgccgccccgcaggacctgtaccagcgccctgccaccgagtacgtggccacgttcattggactcaccaaccgcctgctcggcgcttccaatggcgacgaggccgtggtcttcggccagcgcgtgccgctgctcgccggctccgccaagggcgattccgtggccgtgctcgtgcgcccggagaacctgatgctggccttggctggcagcagcgattcgcacgtcggcgaacgcgcccgcgtggaggtcattcacttccttggctctttggttcgtgtggacacggtcatcacctccggcgaataccagcgctggaacaaaggtgaacagctcaaggccaccgtgcagctgcccgccagcgagctgccggccggtctggcggtgggcgatgacgtgattgtcgccccgcgtccggtcgccgcgctcgcctgctgaatggcgttgcgatgatcgtgcggttctgttctgttttgtgactgtacgatcgtcgaatggcttatcggcaatgatatgtgtgggacggcggcgatttttgggcgattatcgcgtgccgtcccacgccggtgcgggacggcatgaacgtcaaacgatgtacattcgtgccgtcccacagaatgtattggggaatcgttgcaatgacgccatttcttcgtgcggcgtcatcagtcatatgtggagtggtgtgggccgccgcgaaaaaatcgggtaaaatcgcgtgccgtcccacaacaatcccgcagagtagaggactctctcggcatggggattgattgacgtagatcattccttgcccattgatgattttccccattcccaatgcaatcgaaacgccgtgccgtattcttgaagagtattgcacgtgtgatcggtc

SEQ ID NO: 2378 - DNA, 5247 bp, Unknown
  R50_10m  MAG No. k141_3892
aatcgtcgctgttcttgtctttggcgctatcagacgtgttcttcttggccttggactttgcgtcagaggaatccgtcgtgccatcatcggcggaatccgacgcatcggacccggtcgactgtaccgatgtttgcgcctgcggctgagctccccacaatcccatgctatgggtgacgaacaagccgatgaccaacgccacgacgcaaatcagcgcgatgagcacaatcaccaccgctttggtgtgatcgccgccaggacgcccggcgggaggttcaggagaagcaggtgccgcagggccagcggtcatgggtcccggtgccataggccccggcaccgcggaacccggcgccgttggcgtcgcgacggcgggcaacggcgccgccggctgcttcaccagcgtcagcgcgttatcgtcataggcaggggccgccggattggcctcgggctgctccaatgggcttccgcattgcgaacagaaggcatttccttgctcgttggcaaacccacactccgtgcaatacaccatcaccgaaccccttattgctgtgacgttctcatcttcggattccatagtatcgccaccattgggtgatagtgttcgtgtgagtcggtattgacaagcataaaagttacgctaacgtaggttacggcagcgtaagaagcgtatcgtcaactcgtgaaacgggggcatcaccatggcatcaacaaccgacgacgcggaaaagacgatgcatcacgacgctcataacagcgcgacgattgcagaggatgccaccatcgcatccaagcgtcaggcggctatcgaggcgcgcgaacaggcgttgcaggccaaggctgatgccgtacgggccaaggcccagttcaaggccgaggccattcgagccaaagccgaggagaaggcccggcacaagctcgccaaagcggagcaccgtgcgctgaaaatcgagggcattgcccctgcggaagtggaacgcaagattcgtctcgacgtgcacggacgaccaaagccgttgatgcgcggctggattcacgcgattgccgctcccctgtcattggcggcaggcatcgtgcttatatgcctggcacatggcgcgagtctgaagtgggcgtgtgccgtgttcatgacagcgtcgctgattctgttcaccaattcggcctgctaccatctgggcgattggagcccgcgcgtcaccgatgtgctgcggcgtatcgatcatgtcaacatcttcctgctcattgctggcacgtataccccggtttcgtttgcgctggaaccgttctggcgcaatgtgatcatcatatcgatgtgggcgtgcacggccatcgccatcgtgattcatgtgatctggatcaatgcaccacgctggctgtatacggtggtgtacatcatcttcggcatctacggcctggcttatatggtgatgttctggaattcgccgtatgcggggccagccgtggtggtgctgctgtgcgccggcggtgcctgctacatcctcggcgccatcgtctacgccttgcgcaagcccgacccttggcctcgcgtcttcggcttccatgagattttccactgcggaacggtggccggatatgcctgccatatggtggccatctacatggtgatcgtctcgctgtggcaataaacgctacgacatataagtatgcccccgcctacgggggcatactagtcacttataactcaggccagcggcttggcggccttgaccgtcacggacagctcgcggccgttcggtgcggtgtaggaaacgacgtcgcccaccttggcaccttcgatggccttgccaatcggggaatccggggtcatgatgtcgtagtcggtgccggccacgatgtcacggctgccgagcacgtaggtcatctcgttgccgttgagctcgatggtcaccacagagccctcgcccacggtgccttccggggcattctcgatgatcttggaatcgcgcagcttgacggtgagctcggtgatgcggccctcgttcttgctctgcgcctcacgggcggcctggtagccgccgttctcggacaagtcgccctcggcacgcgccacggcgatcttgtgcgcgatttcctcacgcagctcgccttcacgatgggcgagctcttccttcatcttgttgtatgcttcctgcgtcagcaggtagaccttgtcctcagccatatcgtcctcctgaaccgttgtcgatgctgaaacaattttcgttatttatgacaaaacgccggctataaccccggcgttcgtcatgtgctgacctatggtcagcgggtggaaatgatgtcgatgacgaacaccagcgtgtcctcgccgccgatgccggcctgcgggatgccgcgggaaccgtagccgtattccggcggaatggaaaccaccagacgcgagcccacgttatggcccggcacggtctggtcccagcccttgatgacctgtcccacgccgatgccgaagctggcgggctgatgacggtcgaagctggagtcgaatggggtgtccttaccccacaccacgccgtggtagttcacggtgacggtgtcgccgcgacgcacgatcgggccgtcgccctcggtcagctccacaaccttgaggcccttcggggcttcgggcgtcgggaactcgataacgggcgtggtgccgtattcggcgttcacctgaggcatctgatctgccattagtcctccttcaaagacacaatgcgccctaccttagcaccatcggcgaatcggcggtagtccttcatccctgtgcgatacgacacgccggccgtatacgtcaattccggtcatcatgctggtgaataccagacatgtcaatcagcattcgacgacattgacggcaagcccgcccttggaggtctccttgtatttggccatcatgtcttcaccggtctgcttcatggtttcgatggcctgatcgagggtcacgatgtgtgagccgtcgccgagcatggccatacgcacggcgttgatggcggtgttggcggccatggcgttgcgttcgatgcatggaatctgcaccagtccgcccaccggatcgcaagtcaggcccaagttgtgttcgatgccgatctcagcagcattctccacctgttccggcgtgccgcccatgactgcggcaagtccggccgccgccatcgaacaggccgagccgacttcgccctggcaaccgacttccgcaccggaaattgaggcgttgcgtttgaacaggtatccgatggcaccggcggtcagcagaaacgtgaccacgccctgttcattggcgttgtccacgaaatgccagtaatagtgaagcacggcgggaatgatgccggcggaaccgttggtcggagcggttacgatgcgcccgcctccggcattctcctcagagacggccaaggcgaagagatccacccatgcggcgtcggaagactcgagcacggcgtctttgcgccggctgtcgcggcgcagcacatcggaattcgaagcgagacgccgatacatcttcggcgcgcggcggggtacgtcaaggccaccgggcaatgtgggctccgccgaggtgcatccgtggtccacgcaggcgcgcataacacgccagatggcatcaatatcggatcggacctggatgcctgagcgtgaagcggtttcgttggcccatacaagttcggcgatgctgagatgatgttcccggcacaacgacaccagttcggcgcatgatgagaacgggtagggtgcctcgacgccgaaatcagtggatgatgattcgtccgcgtcggcaaaggaggtgccttccggaggacgttcatgaatgccgatcatcgggtcttcgggagcgcctttgcgcacgaatccgccgccgatggaataccagacctgttcgtcgaccaagcttgcggcggcgtcgaaagcctggaatcgcatgccattggggtgcgcggccatgcgcttccattgttcgaacaccacgtcgcggtcgtagtcgaaatggatgcgtttgaggccggcgaggttcagagtatcgtccaacgcgcaggtctcgcggatgcgcatcatgtggtcggtatccacggtggccggcagattgccttcgagcccggccatcgcagcacgatcggtgccgtggccgagaccggtcagcgccagagaaccgtaaagcgtgattttgacacgtgcggtgcgatcgaccaaatggtcggccagcaacgaggaggcaaaggcatgtgccgcgaccatcgggcctacggtgtgcgaggatgaaggtccgacgccgatggtgaacatgtcaagcacactgaacatttggctccttctcccctgctggttcggcatgccggtgtcaccaggcgtcatgccatcacgatatcgtattccagcctagcgcccggaatctttcgctttgcgcgatgatggccgcgcgcgtcgtgccggcgagcgataagtcagtcagtgagatagtgcggagaacatcataaccagtacgatgataccgatgatggccaatacgatctgcaccaccatcagcccgatggtcagtcccttcttggtggcgattttgggtgcgtacgcctgtgccaacaggaaggcaatgaagccgaacaccgcgtagttgacggtcagggccatcacatcgctgttcgacaacaccacgccgttcagcggctggttcagcgtgttcatcatcgtgctcatcacgaacatgccccacacgccgtagccgattaatccgacgacgccgtacagccatggcttgagtttgtcgttggcacgcagggtcagggcttcggcacaccacaacagggcgaagccgacgatgtaggtgaacgccacggcgatcagtatcacgatagtcgcccacggcaggagtgcggccacattgccgatcatggacagatagaatcccgagcaggcgatggcaccaacggtgagtgcagtgcccgcaatgacggcttgggcaagcatggtgggcagggcgccttgttcgactcgttcgacatcggtccagcgtgaagccatgtggattcctcgtttcatcaggtacatcgtcacaacgccacatagcctaacggccttttgtttcggccttataagctctccacatagtaagctgcgagcccctctgacgaggggagctgtcggcgaagccgactgggggagagaccgcggcacagccgcaaaaaacggcatcggccacaggctgatttcaaggtgcctccggtgggactcgaaccctacggagaaaagccgcttagacttactcccgtc

SEQ ID NO: 2379 - DNA, 3114 bp, Unknown
  R50_10m  MAG No. k141_3899
ggcctgctcgaaacgctgcagcaaagcgttcacctgagaaaccgtcacgccggaaccataggcgatacgggcgcggcgggaaccattgataatcgacggatcgcggcgctcggccggggtcatcgagcgaatgatcgcctcggtgcggtcgatttccttctcatcgaactgctcgagttccttgcggtgctgggccatgcccggaatcatgccgagcagcgacttcatcgagcccagcttgcgtacctgctgcagctgatcgaggaagtcgtccaggccgaaggagccttcggagattttctcggcggccttgcgggcctcttcctcatcgaactgcttctgcgcctgctcgatgagcgtcatgatgtcgcccatgtcgaggatgcgcgaggccatgcggtccgggtggaagacctcgaaatccttcaggccctcaccgttggaggcgaacaggatcggcttgccggtcacggacgccacggacagcgcggcaccaccgcgggcgtcgccatcgagcttggagagcaccacgccggtgaagtccacgccctcgtcaaaggccttggcggtcttgacggcgtcctggccgatcatcgcgtcgatgacgaacaggatttcgttggggtgcacggcatcgcgaatgtcgcgagcctgcttcatcagctcctcgtccacgcccagacgaccggcggtatcgatgatcaccgtgtcgtagagcttctgcttggcgagttcgatggaatcgcgggccaccttcaccgggtcgccggaggtctggcccggagctgcgacggcctcgccgccatcggattggacgcccttttcgggagcatagacgggcacgccggcgcgttcgccgaccacctgcagctgcgtcaccgcgttcggacgctgcaaatcggccgccaccagcagcggcgtgtggccggaatccttgagccagtagccgagcttgccggccagcgtggtcttaccggcaccctgaaggccggcgagcatgatgatcgtcggcgggttcttcgcgaagttcagcggacgatcgacgccttggccgagcacgtcggtgagctcctcgttgacgatcttcaccacctgctgggcggggttgagtgcgtcggacacctcggttcccagtgcgcgctcacgcaccttgccggtgaaggaacgcaccacgtcgagcgccacgtcggcgtcgagcagcgcgcggcggatttcacggatcgtaccgtcgatatccgcctcggaaagcttgcccttgctcttgagatgcttgaacgcattcgagagtctgtctgtcaaagatgaaaaagctgccataatgggcaacagtctagccgccacgcgggaaattgcggtgttggggacgacgctttccggggaatgcgtcgcgtagtagtcagggatgttgggcattcagacggcaaatgccgtgccgtccgctcgtggcaaagccaatcgagtgcttccgataccatggaaaccgtaaagaatcctgtgttttttggaatgcttacgctgttttgaaaatcgctggacaccgcttatacgcagactgccgtgcgctccgaaccatgacgttcgggccaacgcagacatgccgtgcaataaggaaggcccactgatgcccacccaaaaactactcgaacgcaaagccctaatcgttggtatcgtcatcaacgtgctgcaggtcttagccggcatggccgtgttcttcatgaccggcctcaaggccatgttcctcgacttctccttcaccgcgatttccgtcctgtccggaatggtggcggtgtacttctcgtcgcgcacggtgcgaaccaccgagcgcttccccaatggcatgttcgcactggaacccatctacgcgatctgcaaggccattttcaccatgtcgttgttggtgtattcgctgattgacgtgtgccgagtagcgtacgactacttcgtgttcgggtccggcgaacgcattgaaaccggcccggtggtcatctacgagatcctgaccgtaatcgtgtgcttcagcctatacacgtattaccggcgttccagccgctccatcggcgattccagcaccatgctcaccgccgagtgcaagagcacgttggtcgacggatcgatgtcgttcggcatcggcgtggttgccatcttcctgatgctgctaccggccggcggtccgcttgacttcctgcactacaccggcgatttcttcatcaccgtggctttggtggcattgaccatcaaggagccgttcagcgtgctcaaagaggcgttcgtggaattggtcggcggcgtgcatgacgacgatgagaccaacgcctacgtggaggccgaggcacagcgccatctgcctgccaacaccgactacgagcagacgctgatcttcaagaccggtatgaactacaccgttgacgtgtatctgagcggcatcggcgaaaccattgatgtagctgacctcatcgaatgcaagcgctcgctggagaaggagctcgccaagcgcctgcacatcgtggacgtggacttcgtgtttgactgattgatgggtttgaagcggctacttcaggctccaagtggaaccctgcgggccgtcttcgatggcgatgccggcctcggtcagggcgtcgcgaatctggtcggccttggcgaagtccttggccttgcgggcctcggcgcgggcgttgagctgctcggcaatcagtgcctccagcgccgcatgttcgggcgactcggccgtgccatcagcggcaccgccagcagacacccacggctcggccagcgggtcgagacccaaggtgtcgagcatggcacgcacggcgagcagcgcctcacgcacctcggccttggcggtttcggaatcggcgcggtcagccagctgtgaaagcaacgtattgccggaacggatggcggtgaagatcgcggcggttgcaccagacacattgacgtcgtcattcatggcggccacgaaatcggcgggcaaatcgtcggcggagacggcagcaacctcctcgcgagaaggctgaccgcccagtgtcacaccggctcgttcgatgaagttcgagacgcggtcgtatgcggcctgcgcctcgaccagcgcctgatcggaccattcgagcatcgacc

SEQ ID NO: 2380 - DNA, 8979 bp, Unknown
  R50_10m  MAG No. k141_4698
aatcggcggagtcagagggattcgaaccctcgagccgtttacacgactaacaccttagcagggtgcccctatcggccactcaggcatgactccacgttacgcaataatgcgcaacagcaaattactgtaccacgtcctgcggatacggcgtgccgaacgacacattattgaccgtccgcgggcgcggcatcgccggagaacgtaacaataaccgcgcaaatcaccaacgccacaccgatgatttcaccaacgctgggaatctcgccaaacgccagtcccacggccaccgccatggcgggattgatggattgcattaccgaaaatgcgccggatgtggtgcgtcgcagcgtgatctgctccaccacatagggaatgaacgaggccatcagggaaatcacaaacagcagagccagcagcttcagcgagccgccgggctcaagcgcccacgtggcatcggccttggggtgaaccacatgagccacagccggcacgccaaggaacagggactggaccagccagccgatggtcacggcgatgcacagattatccagcgaattgccgccagccgccacgcgccggccggtgatgatgtacatgccccacatcgacccgccgatcaaaatcgcaatcagaccatacaaaaacgtgccattgccggacggattggccaatgatatgccggccaacagcaccacaccgaccgccgcgatgccgataccgacccgctcacgccagcttttgccggtaatcaccgccaccgaaagcggtcccaaaaattcgatagacacggcaatgcccatatccatattgctgatggccacataaaacagggtattcatcagcaccagcgagcagccgagcagtacgaccagcccccagccgcgggcgtcgcggtgaaacagctgcgctcgcttagccttgctccagggcctgcaccacagcagcaacagcaccgccatgaatcccacgcggtaccacaccgaatacagcgggtcgagctgggtgaacgcaagtttggcgacggccgtagccaaataaatcaccagtgcctcaccaatcacgataagcaccacgggaacacggttgaggataccgaccactgccttcttcacgaggtttacgctactcggagagtcgggacagcgcgcagcgacttggaaggcgttacggacagtgacgcaatgtggacgattccgtggaatcgcacccaccatgcgaaacagccgcacagtgcgcaaacccttggaattccggcgatattcggcattacgacaatgagcgccgcgccatgcgcgccacatagtgagcatgacctcgttcggcattcctacaatggtggcatgagcaccgcaccgagacttgaggccgccaaacgcgattggggccacgacgagaccggatgcaccgtgctgcatatcgacatggatgccttctatgcctcattggaggtggcgcgcaaccccgggctcaaaggcaagccggtgatcatcggcaccgggccacgcgcggtggtgtccgccgcaagctacgaagcccggagatacggcatcaattcggcgatgccggccgcgcgcgcccatcagttgtgtccgaacggcatttttctgccggtggatatggcgtattaccgcatgatgtcgcaccgaatcatgcatgaggtgtttttgaccgtcaccgaccggttcgagcaggtttcggtggacgagggctatatggatgtgtccgccgcactgctggagtgggggcggccgagcgcgatcggcgcgtggattcgcgctcaggtggccgagcgcttccacgtgacgtgttcagtgggtatcgcctgtaacaaactggtggccaaaatggcctcgaccaatgccaagccggacggcatgctgctgattccggcggcccgctcggctgagttcgtgcagatgatgccattgcgtggcattccgggcatcgggccgtctttggagaagcggcttaatgcttggggcgtgcattcggtggctgaattggctcagctggatgaggctgcattgactcgtgccactggctccccggctgcggcacgtggattatgggcggcctcgcacgggttggattcccgtgaaatcaccacggtgcgcgaggagaaatccattgggtccgaggaaaccttggccgaggatacacgcgatatgcgcgtggtgtgtgggctactgcgttcggcctgcgacgaagtagccagcacgctgcggcgcaaggggctggtggcgcgcacgctgacggtgaagttgcggttcgccgacctgagctatcagacccggtctttcacgatggagcggccgaccgatacggccggcgtgctgtacccggaatgcgtgcggcagctgaaagtcatgctggggctaccggcctcggcggagtctgccactcccctgcccaaaactattcgcttggccggtatgagcacgtcttcgctcagtgaggcggcggctacggccgtgcagccttcactggatgacatgcttgaagaggccgacaatgcccgcggccagacctcacaggcacgtttgcatgatgccgaggccgcactggacgctgtgcgccgcaaatttggcagcaaggccgcccagtttggggcgtgaacggctcaacgccacttgcgatctcattacgccgtgagacgttcgcaggcggagcggatggcctcgtcggtggcggtggcggagaaacgcaggtaggcgggagcgccgtagaattcgccggggctggggatgatgccgattttggcgagctcggccatatcggcccagcagtcgccggacttggccttgacccatacgtacagcgcgccggagggcatttgcgccgaatagccatacgccttcagcgcgtcaaccagcgcggataggcggcgacggtaacgaccccattgctcgtgcacggcggctgtgtccttcagacccgcagccatggcggcctgcactgggccagggataatctggccgatctgcttgcggtattcggccatttccttgaccagccggtaatcgccggcaatcagagccgtacggtagccggccatgttggactgcttggacagcgagtagagcaccaggatgccagctgccgaaccttcacacacatgtgaattcagggcacatggcgtggcggagagactgaatgcggtatcggaggcgggctcgttggattcggccaccggtgcggcaggcacagacgcagcagatgcagacgtggcaggcgcagaggacaaggctgtattgcggcgcaccgaacgccagtccatcaacgcatagcattcgtcggagagcaccacggcaccgatgcgacgggcagcagccacgatgtcggtcagccagtcagcggagatgacctcgccggaaggattacacggcgagttgatccagatggccttgacgttcggaatattcacccaggaatcgacgtcggtcacatcatcgactttgaccacggtggcgccggcaagttgggtaccgatttcgtaagtcgggtaggagacggccggttggacgaccacatcgccttcgccaaggtgcagcaggctggccatcagtgccacggcctccttggaacccacggtgggtacggcggcagcgttgatggacttcagatccacaccgcgcagttcgcggaaccatgtatcgatagcggccttaaggtcggcgctgccggcggtgaccgggtatccatgggcgttgggggcgtctgcgccggcaaccagcgcctgctggacactgctcggcaccgggtccacgggcgagcctacggacaggtcgatcatgccacccggcacggttttggcggtggctttgaagccggcgatacgagaccagtcgtatggcgacgaatatgcgtggaagcccatgagaacccctttcttggacggtatgttcctaagatacgacgaaccctcggccgtgatagaccgagggttcaatccgaactatgcgctgtgtgcggcgcttatccgcaaatcagcttactggttctgcggcggcagcgcggcgacctgttccgggtctttgccgattgggccattggcggaagcgccgcccaaatcgccgacttcagcgaagaagttgacagcggcatccttgtaccaagcccactcgtccggcagatcatcctcatagaagatggcctcggtggggcataccggttcgcatgcaccgcaatcgacgcactcgttggggttgatgtacagcgagcgggaaccctcgtaaatgcagtcgacggggcactcgtccacgcaagccttgtccttgacatccacgcaaggctgagcgattacatatggcatggaatcctccttaacaaatactgatacaagggtacgcgcccgttgggacgctcctcgctctcagccgttaacggccttatcggtttcggcggacagcgtttcggtcaggtcgcccttgccgaggcgcgcatgccagtagccgtagccgaagtagatggcgacgccgaccacgagccacaccacgaaacgaatccaggtgagcacggacaggttgagcatcaaccagaagttggccacggcgatgaggatcggaatccacgggtcgccgggcatcttgaaggcgcgcggcaggtcggggcgcttcttgcgcataatcgggatggagatggccaccagcgtgaaggcggacagggtgccgatgttgaccatgtcggagagcacgccgatgtcgaagaaggcggccacgagcgccaccaccgcgccgacgacgatctgcagagcggccggggtgccatgcttgccggtcttggacaggccgcgcggcagcagaccatcgcggctcatggcgaagacgatacgggtcaggccgagcaacagcaccatgaccacggtggccaggcccagcacgatgccgaagctgatgatcttggcggcccagtcggcacccaccagttcgaaggcggtggccagcgaggggctgtcttgcttggcgagatcggcataggagaccatgccggtggtcaccacggccacgagcatgtacatgacgatgatgagcagcatgcccacgccgatgccgagcggcacgttcttgtgcgggttcttggtctcctcggaggcggtggccaccacgtcgaagccgatgaacgcgaagaacacgagcgccgcgcccgaaaggatgccgggaacgccgtacacggatggggtcatgccggtggcgaactgccacagcggctgggtcatcacgccggtgacggcggaggaaccttccacggtggaggccggctggctcggcggaatgaacggggtgaagttggaggccttgacgtagaagaagccgacgatcaccacaaagaacacgatggcgatcttgagcacggtcatagcaccgtccacgcgggcaccgatcttggtgccgaatacgagcagcgtggtaaagaacgccacgatgatgatcggggcgatatcgatatggaaggagccgaacgccaggttggtgttggcgttccagcccatcaggcgcatgaaatcgttgaggtatacgccccaatatttggaaatcacggagccggccatcagcatttccagaatcagatcccagccgatgatccaggccatgatctcgccgaccgtggtgtaggtgaaggtgtaggcggagccggccaccggaatcatcgaagcgaattcggcgtagcacatcacggctgcgccgcacacgatgccggcgatcaggaagctgatgatcacggccgggccggcgtggaaggcggcggcctgcgcgcccaccgagaagatgccggcgcccacggctacggccacgcccatgattgacagatcccaccaagtcaggttgcgcttgagcttgcggccctcttcacccgtttcggcaatggtctgttcgacggatttcgtacggaacagttgcatagtgctcttctttttctctgttgtttgcgcaccgaatgcgcacaataccgacaatcgagtatagaagagcccgcgtgtcttgtctattaataagacttagagtccgcaatatatgggattaataccccactccatcgatcaatagcgcgattacagcacgccgacgcagaccggttcgggcaccaagtccactccgaacgcgctcttgaccgcctgctgaaccgcacgcgccaaagctgcgatatcggccgcgctcgctcccccacgattggtcaaggccagcgtgtgctgcgtggatagactggccggcgcgtacgcatcgaccttatatcccttatggcagccggcatggtcgatgagccaggcggcggacgtcttggtgccgggagtgccgtcaggcagagtcgcgtcgaacttcggcgcatcttcgggcagggccgccgcttggccggcggtcagaatcggattcataaagaacgagccgcagctgtggcgattgtagtcgggagcaggcaggccgtcatcgccaacgggaacgccggcggcctcattgagggaggccagacgctccagatcggtcaggatattggcctcgcgcttggcggtggccatgtcgggcaaggcgtagcgagtgggatcctcaagcatgcccttggcggcacgtactgcgagcacggctttgcggatgtcggcggtggccatacggtcgcccacttcgacgccaagcgctttggcaagctgtccgtaacctaccgtgccttcggccgagtgggtcagggcaaaggtgacggagagcaccacgtaacgtggcgtcgggaagaatcggtcggccggctggccgggaccggcgtacatgctggccttcagtgcggagtatcgatagccgaatcgaagatcggcgggtgtgaggtcgcgcgttgttttggtgtctcgatcccagacttccaccgattcgaccgaagtggcgacttcctgtccgtaggcaccgatgttctgcaccacggaagcgccgactgtgccgggaatgccggacagtccctcgacgccctcgagcccgagctctacggtgaaggccacgaaatcatcccaattggcaccggcctcggcattgacatgcacggtgcgatcctcgccctctaccggtgcagcctcgtccggcacagtgatgaggcgtcgggcgtctcgaaccaccacgccgtcaaaaggcttatcggaaacaagcaggttggagccgccaccgataacgaccaagggcaggcctttggaatcggcatcctccacggcttcgatgagccccacgcgcgtggtcggctcgatgaaatgggcgatggggccgcccacgcccatggtggtgatgtctgcaaagcttgtcatgacttcctatcttagtggcgcaggtgcgatatcggggcaatcatcggctgaaacggcagaacgcccgcgaggggttcgttcagacgcgggatttctgccatttctcacgcgatgcggatactgattccgcaccctaccactcggctctggagtcaatacgcaaaaacccggccgaatgggccgggttttgtaaagctgtgatgcttgcgatcaacgagtctcgcggtgcacggtctgcttgccgcagcgcgggcagaacttcttgagctcaagacggtcgggcgtattacgacggttcttagtcgtaatgtagttacgctccttgcactcggtgcaggccagcgtgatgcccggacggatgtcggcgctcttagccattgtcattcacctctgtgttcttaggtatagtgcgcgcccaccggttagcgggcgcgatttgtagcgaggaagaggctcgaactcttgaccttacgattatgagtcgtacgctctagccagctgagctaccccgccagagagccccgagtgagaattggactcacgacctcttccttaccaaggaagtgctctaccactgagctatcggggcgtggcggatagtggattcgaaccactgaagcacgaagcggctgatttacagtcagctccctttgaccgcttgggaaatccgccagtctgtttcccgccgcggtgtttgacctcaacaggcaacttggctatataaccacatattttccaagtacgcaaatcgacctctacgcgaaccttgttttaccgcggaattctgcggttttatcggcgtgtctcacagcgtggtttcagggtccgcttcggccctgcaaacagccccgaccaaggccgcaccccgcacttctaccaatcatttttcttatatggtgttccagaaccttgcaatggcgcggttttcgagtggcgtcgcctccttgcggcggcacagcgcatgccggcatactgggcgcatggcttctgatcttgtacatcacggacaatcattcgacgaccagccgctcggattcggcacgctggccattcacctcggcaacggggtcgacgccgaaaccggcgcgatccgtcgccccatcacgctggcgaacacctacgcgctgtcctacgacgcctcggccttggcgattgccaagcatctcgaatcgctggatgtggtgcgtttcgtggcgtaccccggtctggaatcgcacctgcaccacgaggtggcggccagccagctggcccgcccggactccgggttcggcggcgtgctgtcgttcggcctcgacaccgaccacgacgggcacaaccgattcgtttccaagctcaatgtgattacgtctgccgtctcgctcggccatgactaatcgctgatcgtgttcctcggtgaggatgacgagcgccagtacctgtacccgcctgagttccaccgcggcttcttccgtctggccgtgggtctggaggatacggacgatttgattcgcgacatcgatcacgcgctggtggaggccggattcgaggtgtgagaccgcaccgcgcgcatgatttcggcctcttccgccctgctgccgccgtcagtgagtcacaagatggctcggtgacgacgatggcagggctttttacgtcggcacagggacaatacctggcggtctgccgacgatgacggcacgtatcgtaggcagaccgccagtttttgggcc

SEQ ID NO: 2381 - DNA, 14610 bp, Unknown
  R50_10m  MAG No. k141_4769
gtgttgcagcgattgccgtagctggtcgtggcgcggcttagcgctcgcggaccttggccacgatctgccacatctcctcgcccacatcgatgccgcgcgggcagtggcgggagcaggcgcgcacggactggcaggcggccacgccgtcggcggtgtcgatggcgtccatacgctccatggccttggtgtcgcgcgaatcgttgacgaaacgggaggcccaaatcagcgaggccgggccgatgaaagcgtcgccgccggcgtacaccgggcaggcgccttcgcacacgccgcaggcgatgcagttgctcagcagctcgtatttggcgagttgttcggggttctgcaggtattcgaacacgtccaccttgccttcggcggtggtggcgagcacgccgtccgcccgaagatatggggtgagcttccttatttggttgagcatcgggtcgatgtcggcgatgaggtcgcgctgcggcgggaagccgggcagggatgccagttcgatgactcccagcgagccgtttgcggccgagtcctggtcggctgccgcgtttgcgccgttttccgcggaatcgtcggattcctcagcctcggtgccggtgtgtcggaacccttcgtcatcgacttcggggatggcgccgggctgcttggcccaatcgcggatggtggccgtgcacagcagggtgggggtgccgttgatggccacggcgtccgaaccgcacatgccgtgaccgcacgaatagcggaaggccagcgtcgggtcgacggtgcgtttgatggtcagcaggcagtcgagcacggtgtccgaggggcgcgcgggaatcgtgtattcctgcacccactgcttgccgcgcggacgacggcgtgccgccgaatccgagccgccgccgaatggggagcttttcttggcgaacgggctgccgccgcgtgcacgttcggcacgctcgggtcgcggcgtgaaacgatgcacttgcagggtaaccgtcgtgttgctcgcctcagccatgttctgcctccatgaaacagtgggatgtcaagtccaatatcagccaacctattgtgccacaagccctaggcggcttggtattaccaccagcggatcagtactcgcgcttcttgggtggatagtcggtgatgtgcaccggcttgaaacttgccggaccatcatcggcgaccatcgagtgagcaaggaaatgctcatcgtcgcgttcggggaaatcaagtcgttgcatggatccgcgggattcctgacgggattcggaagcgtgcagcatggcctcggccagttcgattagatgacggacttcccagatggcggtgacctcctgattgaaagcggcggtcttgtcatgggcccgcaaggtatcggcaaccggtgtgatgtcgttgttgatctgagtcaacgccgtatcgatggtctgagcggtgcaacgtacggccagagcctgctccatcactgatccgagttgggccatgagctgataaggattggcggtgggcccgccatcgtctgaatcgtccatcggtccggcgagcagttcgtcaagctctgccttgcgggaatcggcagcctgatcggcggcatcggtcagcatgtcatcggtcgaatcatcggccatgggggagtcaaccgggttctcgacgatgcgtgcggccatcgtctgaccagcacgtgtaccgaacaggcaggcgtcgagcagagaattgccgcccagacgattcgcaccatgtacggagacacaagagcattcgccagcggagaacagtccatcgactacctgcacggcaccgtcggcccaacggtacacctcgccattggtggtgatggggatgccgcccatcgtgtaatgcgcagtgggcttgataggcaccaggtccttggccggatcgaggttcgcgtactgctcgatggtttcgaccacctgcggtagcacttccttcatacgttcggggtcgatgccggtcatgtccagccagacgcagtccttcggaccatccgggtccttcgggtcggcgacgccgcggccggcgtcgatctccgccatgatggagcgggagaccacgtctcgcgcggccagatccctatgctccggggcgtagcgttccataaacggctcaccgtcggcgttcctcaggatgccgccctcggcgcgggccgcctcggacagcaggatgccggtgtgcgcgagcccggtggggtggaactgcacaaattcgatgtcctccagctgcaggccggcggccaaggccaatgccatgccgtcgccggtcaggtcccaggaattcgatgtggtatggaacagtcggcccgcgccaccggtggcaagaagcacgttgcgcgcgtggatggcctgaatcttgcccgaatgcgtgtcaaatgccacgatgccggccgcctgcttgccgtcgtcggtgagcaccaggtcggtcacataccattcctcggcgaactcgacgccggcggccacgcactgctgccacaaggtgtgcagaatctggtggccgatgcggtcggccgcataggcggcgcgcttgaccggggcaccgccgaactcgcgcgtgtggccgccgaaccggcgctgggcgatatgcccgtcatcggtacgggagaaggccacgccctgacgctccaggttgatcacggtctgcggcgcgtattcggcgagcagtttggccgcgtcctggtcgacgagccagtcgccgcccttgatggtgtcgtagtaatgccagtgccagtcatcggactccacattgcccaggctcgcggcgataccgccctcggccgaaccggtgtgcgaacgcagcggctgcagtttggagaccacgaggatcttcgggtccacgccttgttccttgagctcggtgattttgggggagcgcagcagtcccaacgccgccgacaggccggccgctccggcgccgacgatcaccgcatcatacatatcttccaaacgtttcggactcatgggttcgattctcgcacacccgccgaacagtcttcgagccgtgtcatgaaagccgattagccgacacggctgctcagcttgagtatgccggcatcccgctcgatcactcccttcagctccaatgcgccgagtagctcaagtatggtgccgatattgggaatctcgtcgggtaccgtctctcgcgccacacgcaatagtgcgtccggggtgacgatgagatgtcgtttacggcattcacgaatcaatgccactaatgtgcgctccatttccggcagcttggcgataatgatacgttgttgggcttccttctcgggatcgagcttcggcttgacacgaagatccggcatctgatgcgacgagggcggctcttcacccttgctcttgttggcaccggcctcggcagttgcgctcgccggcccatccttggattgaacgagtgtaggctgagtatgcttggtcctaagacgtttcgaatgacctgaatcttgtgacgactcctgtgacgccgatgattccgaggatgctggcgataacggagtcgttgccggcacttccatggcctcctcgttttcggacgagtcctgacctgtggatttcggtatgcctgggcatgccgccataacgggcttatgccgttcatggcatatatcctcagtggatgtggcggcacacagaatcatcgcccggtggtcgccgatcatcttattgcacccggcgttgcaaggctgattgatgtcaccgggaaccgcatacacttcgcgcagcaattcgcatgcccatcccgcggtgttgagcgctccggaacgcaaccgggcttgcgtcacaatcaatgtggaagacatggccgcgataatgcggttgcggagtagaaaacgacgggcttcgggaagcgtccctgggcacagttcactgatcagtgcaccaccctgcgcctcgatacgttcgaacagcgtgcggttacgcatcggtccgatatggttgagcccgccggcgaatacggcaacggttctgcccacattggcgggcattctgccgtgcagcgcattcaacgctccccaatgtgccgccgcatccgtgcccattgcgcctccggacacgaccagatgcccggcaacgactgcctgttcggctacggtgtgtgccacataccggccgtattcggtcacgtcccgtgaaccgacgatgccgaccggtttggcgcaactggtcaatgcgcgtggatcgcctttgatccacaaacacagcggtggcgcccaatcggagcgaatggacaggtcggccaactgcgagggccaacatggatggccggggccgataatccattgcgtgccatccatagtgaaccagtcggccagttggatgatgtcttgcgagggcaggtccatcatgcggttatgccagccggccagtgcattgcggaaggagcgcatcgcgttcgccgacgccttgcggccccatcgggtgaggccgtccacgaacatgcggtcaatacgtgacagcgccgggccgcagattccagatggctggcttggatgggattgcgccaacgcgtgccagagggattcggcgctttccgcgcctttgagcgtggcgtacatcatcacatccgccccatcaagacagaacgtgagcgcggcgcggtataacgtatccgtgggaggcatgggaatggtgcgcgaaacagcgaggcccgtatcggtgtgatccacactgcctgcggtgccgccagattgtcggatatcagtagcgttactcatgtcatcctcgttctcatttcgatgccctgatggacgtcctgctcggtgggggacacgcggccggccagatcggcgagcgtccaagacagacgcatggcgcgatcagccccgcgcaatgtgagttgatgattggacagggcccgattgaccaattccatcgctttcagcgacgtattggcgtgcagccattttcccgaagcttgcgcgttgcacacccatccgtactgtctgaaccggtccttggccacttgacgggcgcgaatcacacgagcttgtatcccggcactggactcgccgattggctcgctttgcacggcaatgcgcgagaccggtggcaccgccatctgaatatccacacgatccaatatcggtccggacaatcgcgagaaataacgtatacggtctttttcccggcaagcgcaacgttcgccggtgccgtaatagtatccgcacgggcaggggttggccgccatgatgagttggaatgaggccgggtaataggtgctgccttttgaacgggaaagcgccacatacccggattccaatggttcgcgcaacgtctgcagggcgcgtgcgctgaattccggtgcctcgtccaggaacagaatgcctcgatgcgcgcgcgtgatcgcgccgggaacggcgatgccgttgccaccacccaccaaggccgccgtgctggcggtgtggtgcggtgcctcgaacggcggcatgtcggtgatgccgtactgaggcagtatgccgcacagcgaccgtatcgacgccacctccagttgttccgcctcgttcaacgggcacatgatgccgggcatacgtgaggccagcatggttttgccgctgcctggcgggccggtcatgatgagattatgtccgcctgccgccgccacttgcagcgcccatttggcatgttcctgacccagaacctcgttcatatcgccacaatcgttgggatggcttgtgggcgattgatccatggtggtctcgtcggcaaccggtgtatcagtaatcgtataggtggcatcgccgcccatcagttcgatgagctcacccacatgcctcacacccactacatccagtccatccaccatcgaagcctcgtcaagattgcgatggggaacaatcattttgcgcacgccacgttcctcggcatgcagcatgatcgggagcagcccatgaatcggcagcaccgagccgtcaagattcacttcgccgagcacaatggtatcttccaagcaatcatgccctatggcacccgccgcgcataggacgctggccgcgatggccagatcatgcgacgaaccacgtttgggcatggccgcagggctcatgttcacggtcacgcgggtttgcggccaaccgaatccagtggcttgacacgccgatttcacgcgctcgcgggcttcggacaacgatgcatccggcaatccgatgatgctgaagtatggcaagccagggctgatgaaagcctgcacttggacgatgaaggccttaaggccgatcagtccgactgagagagtgctgccgatagccatgtctactcctttcgcaatgtgtttcgcaacgtggctgtttttgggggacgaattcagaaggcgttttcgatgtgatgcacgagtggtctgcccacccgaagcacgatggtgacgacatcgaaacggactgccgtatgcggcacacgattacgccggtcaagcagccaatcgcaggcggctttcctgagattgtgctgtttcgccggcgtgatggcctcttgcggatatccgtaatgcatggaccggcgtgatttcacttcgacgaacaccaccgtgtactcgggattgagcatcacgatgtccaattcgccgtaacgggtatgccaattgcggctcaaggtcgtccaaccgtgttcctccagccacgcggcggcatactgctcgccgagcgcaccgaactgtttgggcgtcagattgcggtcgcccatcgtggccgcaatccgttccgaaggcagcgttgcctgcggatcaggtgaagccagcatgggctggtgaaaggcaagaccggcgtcgatgccggacttcgtcgtcggctgggtaggtggtaaagcgttcatgattccactgtgcgggttacttatgtaagagcacaagcgcaaccggcaaatgtggatactatgacgcggtttggcgtgttgtggataacgtgtggatgaaaacccggttatccaccattagttcagaaggtttaccaaggctccccagccgacttacctgtgacgacagacaacccgccgagttgttcgctgaatacgtcagacccagtgagcggagaggggagccaaggtgcggtcacttcaccaaatcggtgagttcgccgaggttcagttcgaagctgacgccacgatcctcgaaatgcggctggttacgggtgctgaccatggcgtggcgcacgaactcaccggcgatttcggccgactcggccaggccgcggccggccatcaccgcgccgcacagggcagatgcgaaggcgtcacccgtgccgtgaatcatgtatggcagcttttcatgagccagctcgatcttgccggcaacaccggtggaagcgctggccacatagttgacgattttgccatcgccatggtcgatgcccttcagcaccacgttcttggcacccaacttcagcagagcaccaagcagctcgttaaccgtggcctcatcaatattctggccgggatagtcacgcttggtgagaatactcgcttcggtgaggttcggcatcaacacgtcggcaccatcggccagagcgcccattgcctcgcacagctccggtgtgtacgtggggtacatttcgccggcgtcgcccatcaccgggtcaaccagacgcagcgcgttcggatattcacggtagagacgctgaatgatcgccacctgatcgggggagccgaggaagcctgaatacacgccatccagttccacgtcttccttctgccaggcatccaagtaaccggagagaatatccgtggtgtcgtggaacgtgaacactgcatagcgcgtgtgcgccgagaacagggcggtcggcaccgggcacacatcgcagcctgcggccgagagaatcggaatcgcggcggtcagcgagcacttgccgtagccgcacatgtcgtgcacggcggccacgcgcggaatatagttcggatcacggtcatacagtgttacatcggtcatgtctgttcgaatcccttcaccatgttggcggaataattcattggcgatgtttgactgtagtcgttcgtcatgtaaaccatgtaaccgggcggcggaaaaaggaacagacgtcatcgccgagcgggcaaaccgtcttggtgacgggtggaacaagcaatcatcacggacacttgagccatgcgcgaaaggcatggtagcgatatcaccgtgaccgcagtcgaccgtgaaagcgcatgcgtgcggcccggcgtgtcgcgataatttcaacgactttttcgtgacttctgacagtctcccacgtcaatgatcccaaggctttataagcccttataggcaagcccgataacgttcggcttgcgccgcgcggcccaagcgtcgtaacttcataaccaacacctcgccaaccgcccgaacacggcaggcgggtggcaaggaaaaatcctcgcgacctagcacaaccaaggagaataccatggccgagaacaacaagaagtaccgttttgagaccctgcagctgcatgtgggccaggagcaggccgacccggccaccgactcccgtgcagtcccgatctacgccaccaccagctacgtcttccacaacttcgaccacgccgaggctcgcttcggtctcgctgacccgggcaacatctacggccgtttgaccaacaccacccagggtgtcttcgaggaccgcatcgccgcccttgaaggtggtaccgctggtctggccgtcgcttccggtgccgctgccgttgaatacgctgtgcgtaatattacccagtccggtgaccacatcgtcgccgccaagaacatctacggtggaaccttcaacctgctgcgccacaccctgccgcgtgacggcatcaccaccaccttcgtttccgccgagaacccgcaggagttcgaggacgccatccaggagaacaccaagctcgtctacttcgagaccttcggcaacccgaacgccgacctgccggacttcgaggccatctccgaaatcgcccacaagcatcacctgccggtgatcgtggacaacaccttcgccactccgtacctgttccgcccgctggagcacggcgccgacgtggtggtcgagtccgccaccaagttcatcggcggccacggcaccaccctcggcggtgtgatcgtcgaaggcggcaagttcaactgggccgaggtgccgggcaagttcccgaccctgaccgagccggacccctcctaccacggcctgaacttctacgaagctctcggcggtgccgccttcgtgacccgcgtccgcgccattctgctgcgcgacaccggcgccaccctgtctccattcgccgccttcctgctgctgcagggcaccgaaaccctgtccctgcgcgtcgagcgccacgtccagaacgcgctgaaggtcgtcgagtacctgcagaccgtgccggaagtcgagtccgtctcccacccgtccatcccgggccgtccggatcacgacctgtacgagaagtacttcccgaacggagcaggctccatcttcaccttcgatatcaagggcggaaaggatgcggctcgcgtcttcatcgacaatctgcacctgttctctctgcttgccaatgtggccgacgcaaagtccctcgtcatccacccggcttccaccacgcactcccaggagaccctggaagagctcgaggaccagggcattcaccagggcaccatccgcctgtccatcggcaccgagaacatcgaggacatcctcgacgatctgaagggcggcttcgaagcccttcgcgcttccggcttggccaagtgaggtcgacaggagggttgacggcccgatgagaaggggcgcgatgctaatggggtgcatcgcgaatcatcgagccgcatggggtgccttccgcctgatcgcttgacccaaggagtagaaagctcgcactgacgtcatgcagtgcgggctttcttgcgtctgtatgcctcacactgtttgcgcagaggcatgaatagtgtgagacctgagacgacataatcctcaaggatgagggccggcgcgtggcccctagcccaattcagtctggcgcacgatggggcgcgccgttatttcttcataagttggaatcatcatccgggcataaggcccggcccaatatggagaggcattatgaacgtgcagaacccgtccgcatcgcgcggcatcgctattcaggccgtcgacttggtcaagaactacggcaccggcagcaatatggttcacgccctgcgtggcgtgaacgtgagtttcgaacgcggcaaattcaccgccatcatgggcccgtccggctccggcaaatccacgcttatgcacacgctcgccggcctcgactccgccacatccgggcatattcttttcggcggggcagacctgacccgcatggacgacaagcagctcaccttgctacgtcgccacaagatcggcttcatcttccaaagcttcaacctgttgcccatgttcaccgcagagcagaacatcctcatgccgctgactttggccggtgataagcccgaccgtgcctggttcgacctgctcgtagaaaccttgggactcaagcagcgcctgaaccaccgaccgaacgagctgtccggtggccagcagcagcgcgtggccatcgcccgcgcgctgattaccaagccgaagctggtgttcgctgacgagccgaccggcaacctcgactccgtttccagcgccgaagtgctcggcttcctgaagcgttcggtcaacgagcttggccaaaccatcgtcatggtcacgcacgatgcggtggccgcctcctacgccgaccgtgccatcgtattcgccgacggacagatcgtggccgatgaatcgaatcctactgccgaaacgatgaacgagctgcttatggccgaacgcgaacgcgccacgcgcactgccgtcaccagcacacgcgccgacacgctcgcccgtcttgccggcgtagaggatgtgcccaacctgcccatcaccgacgctccattgcccccagccgggagaaccggcaccatacgccatgcccgcgccgccgcacagcacactcgctgagccggaaagcgagagacaggatacccccatgttttccatcactctgaaacttatgaagaaaagcgccaggatgctgattccggcaggcatcgccatcctgatcggcactgcgttcatcgccgctaccttcctgttcggcaacgcgatgaacgatgcgcttgccgcccagaataccgcccagctcggcggcgcgaactacgtgatcagcccggatagcggcaaggacctgaccgataaggaccaggactacatctacacgcgcacggttaacgacttccagcttgaccgcatccgcgccaccaaaggcgtcaaggacgcacgtgccggctacgcgggttccgtgaccgtaacccgtggcaacaagcatgccagcagctacgtcatcaccaccgccacaaagcgcacgctgctgccggtcaccatcacgcaaggagaccagccggcggacagcaacgagatcgccctgaccaagtccgtagccgaccagctcggcgtcaaggtaggggaccgtgtgaccgtcaactcgcaggcggcgcagtatgcgggcaagaccggcgattcggccggtaataccggtgacgctggtgatgagtcggcccagaacgccgatggcacgagctcgcacgacggtgattccgatgccgcgtccggcgcgtccgccccatccgacggcaccgacacggccgccgactccggcatgaccgtgcgcgtggtcggcctcaccgacgacccgaacggtgcctacgcctactacggtggcgcttccgtgctttccgacaacgtcatcaccgcaatggccggcagcaacgatttcggcaacctgcctgtctacctcgtctatctcgacatcgacgatgccagcgacacggccgcggcatccaccgtaaaacaggtcagcacactgctccctaagcatttcagcgtgcaatcccgtgccgcgctcgtcgaggaatccgtcaaaagcatgagctcgggcgaaaccagcatcaccaccatcttcctgctgagcttcggcatgctcgccatgctggtcgcggcactcgtcatcgccaacaccttccaagtgctcgtggcacagcgccgccgcacactcgccctgctgcgcaccatcggcgcgaacaaaagccagctgtatgtctccgtgctgtttgaagccggtgtgctgggactgatcgcctccgcactgggagtgggcctgggcatcggactcatggccgcactatgccagtcgggcctgatgaaagccaccggcatgaccatgcgactggtactatccggtccggtgttcacggtgcctatggcattcggcatcattatgacggtgattgcctcgctaggctccgcgcgttccgctaccgccgtcaccccgctggaagcgttgcgacccatcgaactgaccgacacgcgacgggccggtgtggtccgcgccgtgatttccatgctgctgattgtgggcggcgtggcactgtgcgcattctctgtatggcagatgtccgagaaaatcgccggacgtgattcaatggccgacaagcagtattcgctggtgctgctcgccgccatcatcggatgtgcattgatcttccttggactggtgctttccgccacgttctggctaccggtgctcatgcgcggcgtgggcgcgctggttgcactggccggtccgtccgccaaagtggcacatgcgaacattcagaagaacccgcgccgcgtggccgccaccggtgccgcactgcttatcggcgtgaccctggtctccaccatcgccaccggtgccgccagcgccaagcaaaccatgaacgaggcgctgaccacgcgctacagcgtcgacatgattgccgctggcgccgatatgactggcaaacaggccggcgaggcagccaaagtcaagggcgttcagagcagtatctacgcgccgacccgcatgatgaccatgaaggatgccgacggcaagagcctgagtgtgcttgtcgtgggcgtggatggcgtcgacgcgctgcgcaaggtggtgcgctccgatttgtccggtgtgaccattgatggcgattccgtactgatgcccaagtattccgccgctacaggcaaggatattccgctggacaagagcgttacgttcacggctggagcggccgaagcacaagccgatgccgccaatggtccgtccggtaatgatgcgaacggcagcgccgaaaacggcaatggacaatccggcggcacacagacgctgacgctcaaaccgcggaaggtggactatcgccgcattgcctccaactacgccgcggtcgccttcgtggacgccagccacttcaccaacggtggaatcaaggccgacgggcatatcatgcttatgcgtattgacgccgagggcgcgggtgttgcgctgaacgacgtattcaccaacgtgcagaatgtgttctccgccagtgctggcgttaccgtgaccggtccggtggccgaacgtacgcaatgggagaccatgatcaacggcatgatggcattgttggtcggtttgattgcggtggctgtgctcatcgccttggtcggcgtagcgaacacgctgagtctgtcggtgatcgaacgcacacgcgaatccgccaccttgcgtgccatcggcatgacgcgcggccaactgcggcgctcgctggcggtggaggcgttgctgctttcgctcgtctccggcgtggtgggagtggtattgggtaccctgttcggctggctcggatcctacatggtgtttagtttgtacggcgacaccgtgttcccgttcgaatgggccaccaacggtgtggtgctcggcgtcgccgcgctcgccgctctgctggccagcgtggcacccgcccgccgggccgtcaaaacgccaccagttgaagccttggccgaagcgtagagcaataagctccctcatcagagggagcttttttgttacaccagcccgttatcgtacgcgaagactacagcctgtacgcggtcacgggcgttgattttggcgaggatatgcgccacgtgggttttgacggtgggaagggagataaagagcttgtccgcgatctcctgattgctcagaccatgggcgatctccaccagcacctcgcgttcacggtcggtaagcagatccagttcgggatcggtgtatgctgggcgtgacgtattggaaccgtcggaagcggccccggcaggggaggggatgccggtcatcgagccggcaccgttgccggccgcaccgccagagacgccgacggcggaaccgtacacggcaccggagcgcgcgacatcgccggtcagcgaaccatgctgcgcgtaaccgtcctgcatcatcttttcgatgagtcgcttggtggcggaaggcgcgataatcgcattgccttggaatacagtacgaatcgaattgagcaacgtttccggttcggtgtccttgagcaggaagcccgaggcgccggcattgatggccgccatcacatactcgtccaaatcgaacgtcgtcagaatgattacgcgcgtcggccggtcgtcagccgattcggccgagacggtcgcgtcggcggccgggctggccgaatcggccgcgttgtccggcgcggcggagagtgaggtaatacggctcgtggcctcaatgccatccatgccgggcatgcgcacatccatca

SEQ ID NO: 2382 - DNA, 14270 bp, Unknown
  R50_10m  MAG No. k141_4784
agcgtgagcgtgcgacggcgtccagctacaggccaccccaccccatcggcgcttcgcgacggcgcttgagagctctatcaccgtaccgaacgcgaggcccgtctgactgtcattgccgccgtctggctcgatgacctcgccggcctcgactaccggattcgcctggcgctcaccccacccaaagtggcgatggacgcatacccctggggcgactcgtcgagctcactcggcaacagagccggacagcgggtaggcgcgcccggcaaaggcgaacgtcccttcaacgaagaaggagcgactttcccctcacggaccatcatgcgcccaccatggcagaacaatcaaaagccccgcccccgacaacgtcgggcggggcactcgtgggcttgatggggatcgaacccacgaccttctgttccggagacagacgctctatccactgagctacaaacccgagcaacttctttactgtacaccacatcacgctgcatgaggcacatacgtcgccaaaataacgagaaaatcgccatcatcggctctacaatgaggttatgtcggaacctacagatgacttcgaatacgaacgccgcttcttctgccgcgagctgccggcggaatacgacgacggcgacgccccgaccctcattattcagagctactacgtgcatgccgacaattacgccttgcgcgtgcggctggtctcgcacaaggtgcacgtcgacatgacgcccgacgtaaatccggtggccgtgctggacgaataccgcgaccggttctcggaagcgtatgtcaccgtcaaaggtccgtccgtgggtggcacgcgctacgaggtcgagcgcgagatcgacacgcgcatcgccgccgaactcatcaagcgcggcggctcggtaatcatcaagaaccggtattccgtgtggattgcggaagacggctggagcgtggacgtgttcggcgggccgaacgcgccgctcatcgtagccgaggccgaacgatccgggccggttaccaatctgacgattccgaaattctgcatcaccgaaatcaccgatcaggcgcgattcaataacgatggtctcgccaaccgtccgttctgcaagtgggcggatgatttcgaggaggaactggcgctggaggggccaaggttccagcagtatttcgggaagaatcggatggtttaggggaagcaatcaagtacgctcgcgcgctcctctcagtcatctacgcctgacagctcctctcaaagaggggagccaaaaccaatcagtacatgagggtggctaggcgacggcgggcgcgagccagacgcgggtcggtgggttcggggatggcgaagtattcgagcagacgcttgcgaaccggctcgatatcggccttatgcccggcggccaaaaagtccagcaaacggtcgaaagcgtcttgaatctggccaccgatcatgtcgatatcagccacagccaactgcgcttccacgtcgtccggcgctgcggcggcagcggcacgcacgtcacgtacatcagcggacccggagcgggccagcaacagcgccttcgcacgttcgcgggcggccagtgcatcggacgggtcggattcgagcacgcgctcgtattcggcggcggcaccggcgtaatcgccctcctcggccaaacgatgggcttcggcatgctccggcggcacctgctcagcacccacgccggcaccggtggcaccagcgctcttggcggcatcggaatcaggatcacccgagtacggcgcggtaccgttcacaccagactgcgcggcggcctgaatgatcttcggaatcacctcgtcggtaagttgcttgagctcgtcgtcacccggaaggccctgcaacagtggcatcggacggccggcaatcaacgcgaacagtgcgggcgcgccctgcacctgcaacgcttgggcaatcgaaggattggacgagatatcgatacgggagagctgaatctggccgttcagggcgttcaccgcgtcgcccaacgcacgggccatcgggaacaggcggtcatcggtcggtatccacaggagcagcaggatcgggaaggtcgcagaagtctgcaccattgcctggaaggtgttttcggtggtgtcgatcacgtacccaccagcggcaggagcgccacccgcctggccgggctcggccttgacctgatgcttcagcgcctccaaatcgacggcgcccgccaatgagactcccggattgaactgctgctctgccataatgcctcccgattccacgcgattcgcgtacaacaacaatcacatttgctgacattgattgtaatgccgattcccaccacgtagggattcttccactacgcggtgaaattcccaccacgtagcaaaacgcccaccacgatgtgactcaaaacggcaccattgtgcgaaaggtaaaacttaccgacatcgtggtggatgaatcatatcgtggtggggcgttaaccgcacggtgggcggcggcaacaactacagcgcttcgacctttaccggctgacggtcggcgcccacggcggtgatttgctcaccggagcttgccaacggaatgtacaaggccaccacgttcacatacgtgaccttcatggtgctggtgtacttgtcgctattgaacagcgccttctcgtcgtcggaagccggctgcgattcgcggccatcccccgccttgcgagtccattcgccgttaatacggccaaccaccaaatcaccggcaccgtctgcagcacgcatcacccacatctgttcaggcacaacggtgaatttctgctcctgcgtaccgttgttgcgttgcataccttcctgcaccttggccgtggtattggccagttcctggcgcagcaaatcgtctgcgaacttggaagcgtattggctcttggagccgttctgcagcacatcggcgtattgggtcaaggcatcggcgggagtggccaccagcttctcatcctttgcagtgcccatccgcgagccaatagtcggaatctcgaacttcggcagcttggccccctcaaacagtcgagccatggccatcagcttgtaattctgctgggcggattcctgatcgaagaccagcaaacgcttggactgctgatcttcggtggtggtcgtgatggtgaacaccgagcgaggccatccgtcgtccatgggaatcaccgtctgggcgatgtccttgggaatggtcgcgtatttggacataccgccgccgcgctggttgatcgtggtctggctgatgcgaatgtccagctggggcccgcccataacggccgcatatccatcgggattcttggcctgatcggcttcatcgatcgtcttgagaatcttcaggcgaatcttcttctcctgtgcctcggtcaaatccggcgcaaccttggtggaggtatcagcagccggcgtcggcagccggccttcacaggcggtcaacggcacgaccaacgccacgcaggcgagggcggccacacacagtttgttccatcgcttgttcatcagctttcctcctgtccgtcatcggccgagtcgtctccggtattgacctcttgggccaagcgggagaagtaggcctgcagttcgtcaggggtgattaccgaagtcgattcgttatcgccggcgctgaagccggtctcagcgccgctctcggcaccagtctgctggtcggcgaccaggttacgtgaacttgggtcgatgataaccggtgtttcggtggcttcagattgcgaggacgcacggcccgaacgccgatttgtggcgtggcggcgacgattacgtcgacttgcaccatccggcttcccggacactgcgatgctggcgggtgcctcttcctcaattacggcgcttgccgtgccttccaccatgcgcttgcggcgcttatgcggcggcatggcgaacacggaggcgcacaatacggccagcacggccagcaatccaccggacagatagaacggcatcgcaaagtccggcacttcggagcgcacccagtgcagctgcaccttggcgttggtggcattttcacccaaatccacaatggccaccgtcgaggcgccggtcttcttgctctccagcgaaacggacccggtgccgcatttcacggcagtccacatatcggaatccttgaacgccaccgcgtcatcggcactggcaggcgctccctgactcgtgctgcttcccttctgggtgctcagctcgctccatgacgccaatccggtgatacgggtataggacttctcggacgcgacccatccggcaacatccttggacggacccaacgccacgcacgcctcgtcctgagaggatcccgagtccacggttatcgtggcgttctgatccaacaaggtcagcacattcggatcagtgacggcataccgggagccgctcatggttgcggaagcggtgatttcagtggagggcttccatatcgtggcattcatgtaccccaacaccacagccgccacggccaatagaccgaagataggcgtcaccactccacgcatgatcttggcatgacgggatggacgcttggcgcccttatccggtcttgtagtctgttcttcagcactcataacttaaccattctacaatcttcacctgtttattacctaggagcgcagaaaatcaaggttcaccagtagggtggtgtgtcatgcgtaagtctgttaaatctatgttatcccctctcggcaaggccgttgctcttgcctgctcgctggcgatgtgcgtatcgctggctgcctgctccagttcgagctcggactcgaaatcctcttccgactcttctgacaagaaggggcaaattgccggcgtgaccgccaagggcaagctcggcgagaagccgaccatctcctttaatacgccgatgaccgtgtccgacggctcctatgtggtgctgcaaaagggcgatggcgacgtaatcgaggagggcgaccgcgtctgcgcccaaggcatcgcgctcaacgttaaagacggcaccgagctcatggacacctggaccaagaacacgccggattgctcgctgaaggtggattccaagaccctctcctcgacctactacaaccagatcaagggtgccaagatcaacaccacgatcggctttggcgtcaacgctcaggattcgtccggatactcttacattttggcgatgacgtttgtatccaagtccaaggacctgaagaaggccactggcgaggaagtcaaggatgtgccggccaatctgccgaaggtgacgcgagccaagaacggcaagccgtccattgacatgaacggtcagggttcggttgattcgctgatctcgcagacgctgatcaagggtaacggcgccaagctgaccgacaagaacaccgtggtggtcaagtacaccggttggcttacggatggcaagcagttcgattcgtcctgggatcgcgattccacaatcgacgccgatctgttcagcgattccagcggccagcatcaggttatcgagggctggcagaagggtctggtcggccagaccgtcggctctcaggttctgctggtgattccgccggatcaggcctatggagataaggagcaaggttcgattcccgccaactccacgttggtcttcgtaatcgatattctcgccgcgtactaaacaatctcgatggctctccccaagaggggagctggcagcgaaactgactgaggggaggcctcacggaatataccgtgaggcctcccctcagtctctctatgtacgttcgaaaactccccttcaagagggaagccaagaacaatcagaacagcctgagactgtcgtcctcggtgcctttcatatcgtcgtaatcgaggatgaggcaggtgaagccgcggtccttggccaagacctgggcttgcggcgtgatggtttgtgcggcgaagatgccatgcaccggggccagcagcggatcgcgattgagcagttcgcagtagcgagtcagctgctcgacgccatcaatgccgccgtgacgtttgatttccacagccacatgctcgccctcggcattcacggccatgatatccaccggaccaatggcggtagggtattcgcgacgcaccagcttggctcccttgccgatacgctcgatctgctcggccagatagcgttgcagatggtcttccacgccatccttgatgagacccggatcttcgcccagatcataggtttggtcggaatagatgtgttgcagcgtcacttcaagaatgtcagagcccttgtcggcgctgacacgtagcaccttttccggctcaccagcggcgacactttccggggaatgcgtcgcggaatcaccatccacagccccaccagcgacactttcccgggaatgttgcgcggatttggcggctgggtcgatctcacgaatcgtgcagggcgcggtcatccagttcagcggcttgtaggagcccaattcggagaaaatcaacaggctggaatcagccttgatcagcaatacacgcttggccaggggcagtgaggcgttgaggcggcccgaatactcggccgaacagtcggcaacaataactcgcataggccaccactgtagcgcaacacatggcatacatagcaaaaggggctctctggaaaaccagagagccccttgaggagttggttcagatcactcggcggtgccggagtactggacgtcgtggccgcgctcgaccgccacggtgagtttgttcgagtcgaaggagatgaatccgtcggtcacctcgaacatgtggcgatcgccatcgggctcaaccacggtgagcgtaccctgcttgatcaccgtgagcacaggctcatggtcgggcaggatgcccatgccgccctcagaggcgggaatggtcacgctcgtcgcctcgccgtgccacacagggtggtcagcggcgacgatgttgaccttcatcgtggttttttccgcagccatcacgcacccagttccttctgcatgttgtgccacttctcttcgaggtcgtcgatgccgccgatgccggagaacgcctgctccgggacgtcgtcgtacacgccgtcgcagatgcgggtgaaggcttcgatggtctcgtcggccggcacgtaggagccggggcgaccggtgaacttctcggcaacgtagaagttctggccgaggaactgctcgatcttacgagcgcggttcacggtggtcttgtcctcttcgccgagctcgtcgataccgatcaaggcgatgatgtcctgcagctccttgttacgctgcagaatcgccttgacgcggttggcgcagtcgtagtgagcctggcccacgtaacgcggatcgaggattcgcgaggtggagctcagcgggtccacagccgggtagatacccttggaggcaatgtcacgagacagctcggtggttgcatccaagtgggcgaaggtcgtggccggggccgggtcggtgtaatcatcggccggcacgtagatggcctgcagcgaggtgatcgagtgaccacgggtcgaggtgatgcgctcctggagggaacccatctcatcggccaggttcggctggtaacccacggcggaaggcatacgacccagcagggtggacacctcggaaccggcctgggtgaagcggaagatgttgtcgatgaacagcagcacgtcctggttctgcacgtcacggaagtactctgccatggtcagtgcggtcagcgggacacgcagacgggtacccggctgctcatccatctggccgaagaccagtgcggtcttctcaagcacgccggcctcggccatttcgccgatcagatcgttaccctcacgggtacgctcgccgacgccagcgaacacggacacaccaccgtggttctgggccacgcgctgaatcatttcctgaatcagcacggtcttgcccacacctgcaccaccgaacagaccgatcttgccgccctgcacgtacggggtcagcaggtcgatgaccttgatgcccgtttcgaacatctgggtcttggactccagctgatcgaaggccggcgggttgcggtggataggccaacgctcggagacggtgatggtctcatccggcttcttgttgaggatgttaccggacacgtcgaagacgtggcccttggtcacgtcgccgaccggcacggagatcggggctccggtgtcggagacggaggcaccacggaccaggccgtcggtgggcttcagagcgacgcaacggaccgtggaatcaccgaggtgctgttcgacctcgagggtgatctcggtctccttcgcctcgccttcttccttggcgccggtgttgacgatcgttactttcagggcgttgtagatgtcgggcagatgacccaccgggaattcaacgtcgataaccgagccctggacgcgggtgacgcgaccgttggtaggctcggccgcagtggtctggttgtcagccatatgcgttcctactcttccttcttggtcagcgcgtcagcgctgccgatgatttcggtaagttcctgggtgatcgaggcctggcgggaagcgttgagcttgcgcgtaaggtcgtcgatcaggtttcgtgcgttgtcggttgccgtgtgcatggcgttctggcggcttgcggtttccgacgcggccgcggtcagcaggcactcgtggatgcgggactgaatgtacttcggcagaatcgcgtccagtaccttttcgaggctgggctcgaaagtgtacagcggagcgacatccgcagtagccggtgcctcttcatcaggatcgggcaccttggtctcgtttttcacgatttcgaccggcagcatgcgcagcacgcgcaccttttgcaccaccatgttgatgaactcggtgtagacgatgtagagttcggaaactccacctttctcagccggcttcatgtaggcgtccatcaaagtgttggagatcgtttcagcaatttccacgccgggctggtcggtgtcgccttcccacgtcgccgcgatgtcacgattacggtacttgtagtacgtcgaaccgcgacgcccgtacacgaacagctccggctgcttgcctgccgcatcgaggcgggacagcagcgactccgtttcacggataatcgaagaggtgtacgggccggccataccacgatccgaggtgagggcgagaacagccacgcgcgggttcttctcgtccttcaccgcgatcggatgcgtgatatgggtgtgggccaccaacgcttgcacggcatcgaaaatcgcatcggtgtacggcttcgcgttcagggccacatcacgggccttggcgatatgcgaagacgcgatcatctcctgagcgttgaagatcttcgccaacgactcggtggagtggatgcgtgatttcaatgcgagttgcgagcccatggcttacttttctcccgccacgatcttttcctgatcaaccggcgcggccttgtcaacgtccggcttcttctcgaccagcggcttgccggcggaagagacgaacgtcgaacggaactcgtccacggccttatcgagggcagcctcggtgtcggcggtgaattcctcggtctcgcgaatggtcttgaggatatcggtgttgtggtcgatgtagtccagcagtccctgctcgaacggaaggacgtccttcaggtcgaggtcgtcgagcttgccgtgggtgccggtccatacggacacgacttcctgttccggcgagtacgggtggaactgcggctgcttcaacagctcggtcaggtgggcaccacgggtcagctgggccttggaagccgcatccagatcggaggcgaacatggcgaaggattccagcgaacggtactgtgccagggagatcttcagcgtaccggagaccttcttcagagccttggtctgtgcggcgccaccgactcgagagacggagataccgacgtccacggcggggcgctggttggcgttgaacagatcggactgcaggaagatctggccgtcagtgatggagatcacgttggtcgggatgtaggcggacacatcgttcgccttggtctcgacgatcggcagacccgtcatcgaaccgccgccgagatcatcggagaccttggcgcaacgttcgagcaggcgggagtgcaggtagaacacatcacccgggtaggcttcacgccccggcgggcggcgcagcagcagggaaatcgaacgataggcctctgcctgcttggacaagtcatcgaagacgatgagcacatgcttgccgttgtacatccagtgctggccgatggccgagccggtgtacggggcgatgtacttgaagccagcggaatcggctgccggggaggccacgatggtggtgtactccatggcgccggcgtcttccaggctctgcttcaccgaggcgatggtggagcccttctggccgatggccacgtagatgcagcggacctgcttcttcgggtcgccggattcccagttggccttctggttgatgatggtatcgatcgcgatggcggtcttaccggtctggcggtcgccgatgatgagctggcgctggccgcggccgatcggggtcatcgcgtcgatggccttgaggccggtggacagcggctcgtcgaccgggtggcggtgcatcacgtcgggggcctgggcttcgaggatacgacgaccctcaatgccctggatctcgccgaggccgtcgatcggcttgcccagcgggtccacgacacggccgagatagccgtcgccgacgggcacggagagcacttcgccggtgcgtcgcacttcctggccttcctcaattcctgcgaaatcgccgaggaccaccacgccgatctcacgggcgtcaaggttgaacgccaggccgagcgtgccgtcttcgaacgtcagcagctcattggccatgcaaccaggcaatcccgtcacgtgcgcaatgccgtcaccggccgtggcgacatagcccacttcctgggtgggggtgtcgctcggcttgtacgacgacacgaagtcgtcgagggccttgcgaatcgaggcgggatcgatggtcagttctgccatgatcactccttctattggttattgttcagtcaagtctttgcttgtgtgtggtgttggacggattggctcggccggtcaggccggagtcgcctccgtctgcaccttgcgatgcaggttctgcagctgtgcgaccacggtgttgtccgtgacttcgtcgcccacctgaatgcgcatgccacccagtacggtcggatcgaccaccgagttgatgtgcacctggcggcccaccttggcggagtagacctcgaccagtcgctcaatctgctccttcttcagcggggtggcggtggtcacggtgaccatcgactcgcccatgtggcgggagaacttgttgatcagccactggatggtctccaagtagcggcggcggcgcaggttgcaggtggcgtgttcggcgagcctcatggtgaccttgttcagggtcttgccggagaacacctcgcggaacagcttcacacgggcctcgctggtggcctggcagtcgtacagcttggagcggacgaccggcaggttcagcagtgcggaatgcagctcggacagctcgatggatacctgcagcgtggcgtcggtggcgtcagcgtagtacatcatggcgtccacgccgaagtcctccaccgcgttggcgatgtcgcgcgcacggctccaacggcgggagaccaagtcggtcatgatctccatggtcataggatgcgcgttgtcaccgagcagtcccttcaggacggccaccttgtcggcgaccgggcgggacgggtcggtcagtgcgcgttccagctgaatgctgtcatcgagcaccttggtgatcgtgaacagttcgttgccgatccgccacgcgtcctcacgggtgtcgcgcagtttcggggccagcgaatcacgcgactcgcggtctgcaatacgtgatgcctctcctcgcatggtcacctccctttctggttacggatggtcacggtcacttcttggcgcccaggtcgtcgatcatcgaatcgatcatcgaggactgcacgtcgctgtcttccagcttggcaccgaggatcttgccggccaaggcggtggcaagtgcgccgacctcgcccttgagcgagacgatggcctgctggtgctgagattcgatcgagcgctgtgcggatgcggtgatctgggccgcatcggactcggcgcgggaacgagcgtcggcgatgatgtgggacgcttccgcacgggcgtcgtcgcgaatcttggcggcgtccacacgggcggtgctcagctgggcctcatacttggccttggcctcgtcggcgtccttcttagcctgctccgccttggcgatgttgccttcaatcttggcggcgcgctcgtcgaagatcgcattgaacttcggcatgaagaacttgtagaagaacaccgcaacgatgacaagaatgatcagggaccacacaatgtcataggtctcgggaatgaacagatcaattccgccttctgcgagcgtcattatgaagtcctcctttcactggtggattcgttttgccttctgtattcgactgagaaaacgttcgatcagtggaacatcagggcggtaacgaagccgatcagtgccagcacctcgatcagagccaggccgatgaacatgatggtctgaatcttgccggacatctcaggctgacgagcggtggattccatggccttgccgaagaggatgcccagaccaatgccagggccaagagtaccgataccgtaaccgatgacggacaggttgccggcgacctctgcgagggtgatgatatccattgtgtttcctttctaacgtacttggcgacgttataaatcttatttcgttcggtcctgcctacctaggcgaggccgggttccgaaagagggggttgaacctcactcctccgggaagcttaggttgatgtacacggtggaaagaatggcgaagacgtaagcctgcaggaaggcgacgaacgcctcgaagcacgtcatggcaagaccgctgacgaaccacatcgcgccgactgggatgccttgcagcttgttggctgcatcgacgatccagtactgtgcgaatgccaggcaggtggcgaccatcaggtggccggaaatcatgttggcgaacagacggatggtcagggaggccggacggatgaccagcaactcaaggatgttaatcggggtcaacaggatgtagaccggccacggcacaccgggggtgaacagctcgtgacgcagataatggccaagaccttgcgaacgtgcggcggcgatccaatactggaccatggtccagatggcgaacaccagcggcatgaccacagtggcggtggccgccatgttcatacccgggatgatgccacacaggttgaagatgaaaatcgtgaagaagatggtggtgatcatcggcacgtagcgcttgccgcgaacctcgcccatcacgtcatagacgaccttgtcacgcacgaagtcaagaccgtattccaccacgccctgccaacggccggggatgagcttggcgcgctttgcggtcacgccgagcaccaccaacagcacgatggttgccacgatacgaatcaaaataatgcggttgatagcaaacggagttccctggaacagaatctccgggggaaggaagtcaccaaccgagggcagatgagcgcctgcctcgtcagccaacagcaatcctgcgccgagcgaaccgaccatatcacgcctcctgcttcttcaatatcaggtgtcagtttaaacccaagagatgtgcgaatgtgacgtactcgtaactttcgcgcccctcggatggagcatgccgggcgcggacggggagtcgacgctgggcattcgactccgaatgactgaagagtgattatttgcctgtgtctagacaaagtcaatattacaccggcgagtcttttccgaggcctactggcgcaaggctttcccgggcgtttcgccggcttcgcgcgctattggtcgcatatggcggatgtgtggcattatgttcatcaggttgtccgtatcgtggacggattgccgtccacggtgcgaacgctcagccctgaataaccccgtatccgtcatgaacaaacggcttgaagtcatcctcacgtggtccgcccggctcatgccgaatcgaacggtcggtacccagcttcttctcggccctcaaccgcggcacctcggtcaggtcgtacggcgtggtctgatacacccagttgagccagttgcgccacagcaggttggcgtgcgcgcgccaggcgaacagcggctccagcttcggatcgtcatgcgggaagtagttcttcgggaagggcacgttggtcatgcccttggccatatcgcgctcgtattcctcggcgagcgtg

SEQ ID NO: 2383 - DNA, 12462 bp, Unknown
  R50_10m  MAG No. k141_5208
catcgccgttgcgtttgtaatggcgatggtgctgacggtgctgttcgggtaccgtacgccgccgcgcgccacggaggcgcagatggtctcggcgggcgagaacgtacgctcgcaggatgcggtgagagggattggcgcgacatcgtcggatgcggagtctgcggaagattccccatcgcggcctgcctccgatcggactcctgactccaacgccatcctgtcgccggtcgccggccggttgatgaatctggaagcgactggcgatccggtgttcgcctcccgcgcgctgggggagggtgtaggcgtcgtgccggagacggccggcgagacggccgtgctggcaccggtcagtggcacgctgaaaaccgtggcccggaccggccatgccttcggcattaaaaccgatgacggcatcgaagtgctggttcatgtcggcattgacaccgtcaatatggatggcgagggattcgtcgtggccgtgggcaaaggcgagcggatcgcggcgggagagccactggccaccgtggatttcggcaaagtcgcggcggccgggcacagcgttgtggtggtggtgacggtggtcaacgccgctgaactgaccgtggtcacgccgttgatcggcgacggtagcagcgacgacaacggcggcgactgcaaaaccgtatcagccggcagcccgatcatcgatgtggaacaatgacgttgcgaaaggatgccatggaaatactgcgagtgttcaacaacaacgtcgtgctcgccaaaggcggcgacggcggtgaggtgattctcaccggccgcggactggggttccaggccaagccggggcagacggtcgacgagtcgaaagttgtgcgcaccttcgtgccatcggacgggcgcgaccctgaccatctggcgcagatgctggcggacattccgcccgaaatcatccgcgtggtcgtcgaatccatgcaggagaccggactgggggagcgcgagaccggcagcaccacgctggtcatggccctgtcggaccacgtggcgaatgcggtggagcgggtgcggcgcggcatcgacatcacctacccgctgctcggcgaggtgagcaacctgtacccgcaggaatacgcgcaggggcgtgcgatgctcgcatcgctcaatgcacggctcgacgtcacgctgccggacggcgaggccaccgcgcttgccatgcatctggtcaacgccggcttcgccaccggcgacctgtcctatacgtacacgatgacgggcgtgatccagcaactgcttgacatcatcgaccacagctacggcatcacgttggaccgcagttccgtgaacgtgggccggttcatcacccacctgcgctacctgttcgtacgcatccaccagcaccagcaactgacggacgagccggcaccggtgatgaaggtgattcgtgagtcctaccccgctgcgctgcgatgcgcgcgaaccatcgcctccctgctcgaactgcgcctcgacacggatatcagcgacgacgaaatcgcttatttggcgatgcatgtcgcccgagtcaccggccacgcatcgtagtaacggattagcggattggcgaatcagcgaatcggctcgagtgtaccggtcatttcggcgaaattcgaggtggcatttgaagcagcggcctgcgcggtcttttccagcgcggaggcgtcgggcacgcgcacgatcagcgcgcggtgatccaccgagaaacggatgtggcgggtttccggcagcatgtcaccgtccacctgcgctttggccggcttttccaatgtgatttcggcactgacaccctggacctgttcgatggtcgagttcgtggacagcgggttctgttcgggcttgccgatgatcgtctggtgcaccacgtcgccgaacaggttggcccagccgaggatgccgccggtggtgtcgatgatttcgaagtccagcagaccatcgtcataggatgccgccggcatcagcgagaacatgggaatctggccgcagttgccggccatcaccgtgcggaaatcgagattcttgatggtgtgggtcgagccgtcggcgctggtgactgtcagcgtgccgcggaacttcggcgcgaacaggttcttcacgccgcccacgaagtaggcgagccagctgatgttcgccttgagctcggggttggtgtcgtcgatcatggccgcatcgaagccgatgccggcgatgatgaggaaggcgtggccgtggtcgtcctccgggtggtcgagcagggtgagacggcccatgtccaccaggcgggagccgtgggaggtggccacggtcagcgcggcgtcgatatcgtccacgggaacgcccatattgcgggcaaacaggttgccggtgccgatggggatgatgcccagcgcatggccggtgccggagacggcgctcgccaccgtgcgcaccgtgccgtcgccgccgaccgcgatcaccacgtcggcgccgtcctccagcgcctcaagcgcgcagaccctgccgtccttgtcaagctgggtgtcgtagaagcggatgcgattgagccccttggcctcgcagaacctctggatatgcagccggcgggcttcggcctgcggtttggacggattcacgatgaaggcgtactgcacctcgtcgtcccggcgcttctccagcgtctgagccagcttgcggcggcgctgcgcgcgcagggcgatgacgatgacggcgatgagcaccaccacaatggcgattgcggcgatgatcagaaacacggtgagggcaggctgaggcatggctcctattgttatcggtggggaggtcgtttgcggccatggtgcgccgtacgtgaacatttcctgcacgcaacagccccgtggggcgcgattatggttcaatcgcgtctcatctgacgaaattggccgggtggacccgtccgcggactttcccgggcttccctgtgatttccgcgtgactcccgcgcattcggccattgtcggtgtctgcttacgcggctagtctggtgcccatgcttgatattcaattcatccgtgaacacaccgatatcgtcaaggaatcccagcgcaagcgcggcgagtccgtggaactcgtcgacgaagtgctctcctccgacaccgcacgtcgtgaggcgctgaaggccttcgaagaggctcgcgcccagcagaaggaaatcggcaagaaggtcgcctccgccccggcggacgagaaggccaagctcatcgccgagaccaaggaactgtcccagaaggtctccgaatacaagtccaaggccgattccgccgccgaggaatacaccaccgccatgtggaagctctccaacatcgtggagcccgaagctcccgaaggcggcgaggacgactacgtggtcgtcaagaaggttggccagattcgcgacttcgcggccgaaggcttcgagcccaaggaccacctgaccctcggcaccggcgtggccggcatcgacatgcgccgcggcgtcaaggtcggcggctcccgcttctacttcctgcgtggccaggtggcccgtatgcagatcgccatgctcaccatggccgtggaccaggccgaggagcacggcttcacgctggccatcaccccgacgctggtgcgccccgaggtcatgcgcggcaccggcttcctgaactcccacgccgacgagatctaccgtctgcgcgagcccgacgaccagtacctggtcggcacttccgaagtggcgctcgccggcatgcacgagaacgagatcctcgacctcggcaacggcccgctgcgctactgcggttggtcctcctgctaccgccgcgaggccggcgccgcaggcaaggacacttccggcatcatccgcgtccaccagttcgacaaggtggagatgttcgtctacgccaagcaggaggactcctacaaggagcacgagcacctgctggccatggagcaggagatgctcgccaaggtcgaagtgccctaccgcatcatcgacaccgcagccggcgacctcggctcctccgccgcccgcaagttcgactgcgaggcctgggtcccgacccagggccgctaccgcgagctcacctccacctcgaactgcaccgagtaccaggctcgccgtctgaacatccgcgagcgtatggaagatggcggcacccgtccggtctccacgctcaacggcacgctggccaccacccgttggctggtcgccatcatggagaaccaccagcagaaggacggctccatcgagattccgcaggccatgcgcgcctacatgggcggcaaggaagtcatcgagcccactaagtgggaggcctgagtctcatcgtgctttagctccctttaatgggggagctgtcagcgtagctgactgagggagagatcgctaatagccagcaggcgaatccaagaccgaccgcactgccgaatatcaacatccctcccttctgtataatgaatacttgcgcgtgtgaacgcgcatcaggacaggtgtctgagcggcctaaagagacggtcttgaaaaccgttgaggggcaaccctccgcgagttcgaatctcgccctgtccgcgaaccgaggcctgggcaacatgcccaggccctttttctttttctggaacctgtcttcttgatcgccaccggggtgctgatatattggtttgtaatgccgtaacatgcggtgtccccgttgatatgacgggccaatcggcgtgagccgataagaaaaggcccgacgtttgcggcatcgggcctttgcgttgattaccggcttgcgcttttaatcaacaaggttgcaagatgaatcatatcacgatgcacggtagtctgaccgtgaacgggcgcaccgtgatcgtccatgtgggcgatggcgaggcgaacgccacggttgacggcacgcacttcaacgtgcgtagcctgtggcagctctaccagttgctgagactgctcgtgtagcgtctcattaaggcgcggtgcccccctagtcgggtatcgcgccggcaacctgaaaaccgataatgttggcaagtgcttgcaatttgtggtggacgattgcaagctaacgtcttggattgttgccgctatccaatatctcattaggtctaccggtggaccaaaagtacgttgctttgtaaggggagttaatgaaatgaacaaacccgcacaatcgagcatcgaatcggtttaatgccactcacctcaacgggacgcgcggtaattgttagctaagttgacaataaaagagcaaaggcctaaattagcaatcagtcatcacgctgaggtgatgatttcactaggaaggagtagagatatggtatcgcacaacaagcgcatcgtggctgctcttgccgcggtagcagcaatgggtattggtttggccggttgcggcggcagcgacactgccggcgacacgaagtccggcagcgatggcggtgtggtcaacatcacctatatgcatcgtctgcccgattccgaaggcatgaccttggtcaacgacattgtggccaagtggaacaaggagcacccgaacattcaggtcaaggccaccaagttcgatggcaatgccgccgacatgatcaagaagctcgagaccgacgtcaaggctggcaatgcgccggatctggctcaggtcggttactccgaggttcctgaggtcttcaccaagggccttctgcaggatgtcaccgatgaggccgccaagtacaaggacgatttcgcttccggcccgttcgcactgatgcaggtggacggcaagacctacggtctgccgcaggacaccggcccgctgacttacttctacaacgccgctgaatttgagaagctcggcatcaccgtgccgaagaccgctgacgagctcattgagaccgccaagaagaccgctgcccaaggcaagtacatcatgaccttccaacctgatgaggccatgatgatgatgtccggccaggccggcgcttccggtccgtggtacaaggtcgacggcaactcctgggttgtcaacacccagactaagggctccaaggccgtggccgatgtctaccagcagctgatcgacaacaaggccgccctcaccaacccgcgttgggatgcatcgtttgataactccatccagtccggtcagctgatcggcaccgtggccgccgcttgggaagccccactgttcatcgattccgccggtggcactggtgctggtgagtggaaggtcacccagctcggtgactggttcggcaatggcaccaagaccggcgccgatggtggttccggtgtggccgtgctcaagggttccaagcacccggccgaagccatggagttccttgactggttcaacacccaggttgatgaccttgtctcccagggccttgtcgtggccgccaccaccgcggatgccaagaccccgcagaagtggtccgactacttcagcggacaggatgtcatggctgagttcaagaccgcgaacgacaacatgggtgacttcacctacatgcctggcttctccgcagtcggcgctgcaatgaaacagaccgccgccaaggctgccgatggttctgccaaggtttcggatgtgttcgacaccgctcagaagacctcggtggatacgctgaagaacctcggtctgtccgtcaaggagtgacctcactaggtcttgtcaacgggccggcttgaaatagccggccgtccaagacctccgatgcctcgcatcaccatagcgaaaggccggggcacatactccggccttccgtattgtttgggggtattgctgcaggggcgctgtggcccttgtcatttgttttactgttctttgcgaagacaggttttgtattatgactgcatccactactcaggcgaagggcaaagcacctaggcgtgccgccgccaagccgaagcggtccggcgctcagaagcgcgagaaccgcaccggctgggcgttcatggcaccgttcgccgtcctgttcactttcgtgttcatcttgcccatcatctgggccatctattccagcttcttccgtcaggtcaccgagggcggtggcgcatacggcggtggcgagctggtcaataaattcgtaggattccagaacttccagtatgctattacttccggcaacttctggtccggcgtcggcagggtgctgctctacaccctgattcaggtgccgatcatgatcatcgccgcactggcgttggccatcgtcatcgactcgttcgtggtcaagcatgtcaccggtttccgtctgggctacttcctgccctacgccatccccggcgtcgtggcctcgattatctgggtctacctgtacaacggccaaatctcgccgatcgtcaagggacttgccgccatcggcgtcaatgtggacttcttcaacaagaacatcgtgctcggctcgatggccaacatcaccacatggaccttcaccggctacaacatgctgattttccttgccgcactgcaggccatcccgcatgacctctatgaggccgcccgtatcgacggcgccaatggttggcagattgccacgaagatcaagctgccgaacgtgcgtggcgcggccctgctggccatgctgctttccatcgtcggcaccattcagctgttcaacgaaccgcagatcatgtctacggctgatccgggtatttccaagtcgtatacaccgatgatgatggccatgaacacttctcagggcaccattaccccgtctggtgacggtccggcctcggccatcgccattgtcatggctctgatcgcaggtgtgcttgccgtgctgtacaccttggccgaaaggaaggtgaacgagtaatgagctccgcaaccgttgaagaacgcgcccgcaaaaaggccgagcgcaagctcgaaaagcagcgtcaggctgcgcaacacgatttgcctcgctccatgcgaccgtccgcggccgtgaagaccctcaccgtggtgctgctggtactggtgttgatctacttcctgttcccgatttactgggccatcatcgcgtccaccaagacgccggcccagatgaccggtagcaacggcatgtggtttgctgtgccgcttgaccagctgcccaatgccatcgccactaactattccaagctgcttggctggactcgtggcaacttctggcgctgggtgctgaactccctgatctactcgggcgtctcggcattgatcggcaccatcgtgtctgtgatggctggctacgccaccgcaaaattcaacttccgcggcaagaacgcggccatcggcatcattatggcctgcatgctcatgccgtccgccctgctgaccatcccgatgtactcgatcttccacacgttgcacctgaccaacactatgctctcgatcatcatcccgtgctgcgtttcgccgttcggcttcttcctgggccgcacgtacgcacagagttcggtgccggacgaactgcttgaagccgcccgcatcgacggcgcgagcgaggcgaggatcttcttcaccatcgtgctgaggctcctggccccggccatggtgacgattttcctgttcctgttcgtggccacgtggaacaacttcctgctgccgttgatgatggtgtcttccgacaccttgaagcccgtgaccctcggtctgtacggcatggtctcgctggccacgttcaccgatcgcggcgccctgatgatgggtgcgttgctcggcgtgctgcccgtgatcgtgctgttcctcggcctccagcgctactggcagtccggcctcgccgccggtgccgtcaagggctaaccaatccgctgcccggcatgtcgtgtcactccttccggtgccgggcaacgtccctcccatattcagtgacacgattccaatcgtccggcgtcaccgtaagcgtcaaggatctacgcagtcagggtcccagggcccgcgatgacgccggtcattttgtatgcgacgaattcgtcgctttgtagttttttgatgaccaaccccacaaaggagcactcatgaccagcaccggccgcttcacgctgcccagtgaagagaattttgccgaaaagaccaaggaactcgccgaattgtggggtgcggacgccatccgcaactccgacggcacgcatctggacgaggcagtgctcgctcttggcaagaaaatctacagcgcctacttcccgacccgcgcccacaacgagtggatcaccctgcacatggacgagaccccgcaggtctacctgctgaccgcccgtatcctggccgagtccaacgcggtggatgtgccgctgatggatggtttcttcgaggaacagctcaagcctaaccgtgacgccgaccctcataagtactgggaagtcgtggaccgcaccacgggcgaggtcgtggacccgtccggctggacgctcgacccgggcgaggacaccgtgcacgtgaccgctgccgtgccgatgcacgaatacacggtgagtttcctggcctacatcatctgggacccggtcgagatgtacaaccacctgaccaatgattggggagacaaggaacacgagattccgttcgacatctaccatccggccacccgcaagttcgtgttcgatacgttcgagcagtggctgaaggacagcccgcaggtggatgtggtgcgtttcaccacgttcttctaccagttcacgctcctgttcgatgccaagcgtcgcgaaaaggtggtcgactggttcggttgcgcctgcaccgtgagcccgcgcgcattggacgatttcgagaaggagtacggttaccgtctgcgtccggaggatttcgtggatggcggtgcctacaactccgcgtggcgcgtgccccgcaaggcgcaacgcgactggattgacttcctctccggattcgtgcgcgagaacgtcaagcggcttgccgacatgtcgcacgcggcaggcaaggaagccatgatgttccttggcgaccagtggatcggtaccgaaccgtataaggacgggttcgaaaagctgggtttggatgcggtcgtcggctccatcggagacggcaccaccacccgcatgatcgcggacattccgggcgtcaaatacacggaaggacgcttcctgccgtacttcttccccgacacgttctacgagggcaacgacccgagcatcgaaggcctcgacaactggcgtaaggcccgccgcgcgatcctgcgttcgccgatcggccgtatgggctacggtggctacctctccttggccgccaagttcccgaagttcgtggacacggtgacccatatcgccgacgaattccgcgacatccacgaccgcaccggtggggtggccgccgaaggcgagctcaacgtggcgattctgaattcctggggcaagatgcgttcctggatggcgttcaccgtggcacacgccctgcccaacaagcagacctactcctactacggcattctggaatccctgtccggcatgcgcgtgaacgtgcggttcatcagcttcgacgacgtactcgcgcatggcatcgatagtgatatcgacgtaatcatcaacggcggcccggtcgacaccgcattcaccggcggcgacgtgtggaccaacccgaagctcgtggaaaccgtgcgctcctgggtgcgtggtggcggcgcgttcgtgggcgtgggcgagccgagctcggcaccgcgcttccaagcgggccggttcttccagctggccgacgtgattggcgtggacgaggagcgctatcagaccctctccgtggacaagtacttcccaccggtggtgccggaccacttcatcaccgccgatgtgccggtcgacccggcggcccgcgaggcttgggaacaggccggctaccgcatcccactgagcggttgcggcggtggccagtccatcaagccgttgggcggcatcgacttcggcgaacccgtgctcaacacgtatccggtcaatgaaaacgtgaccctgctgcgcgcggacggcgggcaggtgcagctcgcgaccaatgattatggcgaaggccgcggtgtgtacatctccggtctgccctattcggcggccaacgcccgactgctggaacgcgtgctgttctacgcctcccacaacgaagacaagtatgcggcttggagctcgtccaacccggagtgcgaggtggcgcacttccccgagcaagggttgtactgcgtaatcaacaacaccgatcagccgcagaagaccacggtgactctggccgacggcaccaccgaggacttcgacctgcccgacagcggcatcgcatggcgtgaagcctgattcccgcgttttggagaacggacccatcatgaccgaaagcaatgaagttttattcggcatcgcctcgcattttgcgctggaaggtgccgtgaccggcatcgaaccttacggagacggccatatcaacaccacctatctggtgaccacggacggcccccgctacatcctccaacagatgaacaccagcatcttccccgatacggtgaatctgatgcgcaatgtcgaactggtcacctccactctcaaggctcagggcaaagagacgctggacattgtgcccaccacctccggcgccacctgggccgagatcgatggcggcgcatggcgcgtctacaagttcatcgaacacaccgtgtcgtacaacctcgtgccgaacccggacgtgttccgcgaggccggcagcgcattcggcgacttccagaacttcctgtccgaattcgacgccagccagctgaccgaaaccatcgcccgcttccacgacaccccgcatcgtttcgaggacttcaaggccgccctcgccgcggacaagctcggccgcgccgccgcatgccagccggaaatcgacttctatctgagccacgccgaccagtatgccgtcgtgatggatgggctcagggacggttcgattccgttgcgcgtgacccacaacgacaccaagctcaacaacatcctcatggacgccaccaccggcaaggcgcgtgcggtcatcgatctcgacaccatcatgcccggctccatgctgttcgacttcggcgattccatacgctttggtgcgtccactgctctggaagacgaaaaggacctcagcaaggtgcatttcagcaccgagctgttccgtgcctacacggaaggattcgtgggcgaactacgtggcagcatcaccgcgcgcgaggccgaactgctgccgttcagcggcaacctgctcaccatggaatgcggcatgcgctttctcgccgactacttggaaggcgatatctactttgccaccaagtaccccgagcacaatctggtgcgcacccgcacccagatcaaactcgtgcaggagatggagcagaaggccagtgaaacccacgccatcgtagccgacatcatggaggctgccaagtgagccgtcagtcgaaccatacccgaaccagcatgatgggggccgagcaatgagcgatcagctgaccgaggtatacgccagcatcgacgccctagtcgattacgccttggatcatctcgacctcgatccacgcaacgcagactggacccgcaaccaaatcttcgccctcttccatctggattcctac

SEQ ID NO: 2384 - DNA, 18792 bp, Unknown
  R50_10m  MAG No. k141_5544
gattgacgttcatatagcccgcattgctgccgatactgtcgaacttcttctgtccggactcgatgccagcaaacaccgcatatttcggatcgatgccgaaactctcggcgtgagcggccgaatccttaagcatgttgccgctgaaccagtagttcaggaagatggaatcagagatcttgcccttgtccgtatcctgcacatacggcgaattgctgccgttgaacatgtcttggtagcctacgccgccacccgggtatgtggctgagtcgtaccactggatgtaaatgccctgatcgacgatctgcttcatgaagtcctggtaggctggaacatcgtcggcgacatcgccaacttcaaaagcgcggcccacctggccgcctacgccggcatcgctccggccaccggccagtccggcaccagcatcaagggcgagagaccctccagacggggcaacaaacgcctcaggaacgcgctgtggcagtccttgttcgtcgcgtccgccaaacacccgccgtccatcgcctactacaagcgcaaacgcgaacagggcaagcaccacaacgccgctgtcatctgcctcgcgcgccgacgctgcgacgtaatctacagcatgctcaaaaacggcgtcctctaccaggaaccagccctcgtagcctgaatcgggccacacgggaaaggacgccggacgccaccggcagggcgaagcgcgcccacgacagccaaccggaatcccgacacgtcaactccccaaggagttgacaaaaacataggaacacccccatggcattgtgccggtggcgctggccggtgcggccaacgccgccagcgtggtcatcgacaataccgcggccagaccgctgcacagccatttcctgtgttgagcccgggcagaagtacacccagcgggatcgcctagtgacaatctcatctataatctcctttgacttcttccggcttacgccggagatcaaccgtctgcgtactacttcgtccctaccgatgtgggccatgggatacggcgcttcgcatatcgcgccgtatcccaaatactgtttttcggttcattcgaaccggtgttatccgcggcggcggactgcgaatacgctgataccggcgagcgtcataatcacggcgaccgatagcacgacggtgccatcggaaccggtgcttgccagacgtccggttgcagactgtggcttgttgtgtgatgcgtcaccggaactaggtttgtccgtttcgcctgtgcctggctgttgcggcttgggcttgccgcccgttgcatctgcgattgcggtgttgagcgatgccgtccaggagacaacgtcagctccggtatacagcttgctggtcaggccagtgaccgccgcgtttctggccgtggtcagcgttgtccgcacatcggtatcggttgcgccgtcagctagcaatgtatccgccttggctatggcaccggtaagtgccgtggtgtcgatggaggtcagggaaagttcgagcgtcggatcatatgtgttgctgtatccgtcgttccaatccgcgccgagcaccgccttgttcacctcatacaggttggtggccgctgccacggtttggcgcgtttcggctggaacatccttggtataggacatacggtcaaggaagtggttggcagcctgcttggcgttttccagactcatgccttggctttgtgcgatggccgtcttcgtccaaatcagattcgacggtttgatgtgtgccaaatcatcgtcggaataggtgcgtccgtcgcggtcgagcgcgtagacgaacatgcctccgagattgtggtcgtacgagtatgaggccacatcatagaaatgactgtccaggtatggttcggtcgcgtcgttccaccggttattcatgtcaccctcttcggggaaggtcaggccgggaacgaacttggtcgagtcgataaactgttcgtaggtggcagcggccttggccgtccggttcgaatcggaaccgtactgctggtaggcaacatagtcgaagcaatcagaaacgttcttaaacggagcagtgtagctgccattggtgtcgtaaaggaacatcgtgccttccgggttatccgacttcggcccgatgcgcttggcgagggctgtgatgacctgatcggaaatcgccacctgcgcggcatccgggaaagtttccatatcgatgtcaagaccgtcgaggccaaccgaggtcatgtacgtttcgatgacatgatcggcgtacgcgtcataatccgattcggtcgcgctatcgacgtttttgccctgctgagcaatccacgtcttgaaaccgtcgaccataacaccgctgtaatccaaacctcgtacgagtttgatgcctcgggcatgcagatacggcgcgtaatcgctcttgagcttgtcatagaacggctgggccgccgcttcctggccactgggaacgtagctgaacacattgacgacatcgatgccgtatggaatgtcgtacatggagatccaattgtcatccggtaaatcggtgttcacgcctttcatggtcacgtcacgccatgcgcggtaatacaccatgaaatgcttgttgccgttaccctcctgcgacgccgcaacgggggaatccccttcctgggcgttcgcaaccgttcccatggccagcgaacatccgagcatcagtgctgtggcgactacgcccgccgcgacggcggcgagtctgcgtccgatggacgagcgcccttcactaccttgtgagcaacacatatataatctcctttgttgtttcctctatcgggtgacaacccgcagacttgcaggttgcgaggatggatgccttgcggtttcaggctccatccgggggtgtgatgcggttccagtgcttcgcaccccacattcatacaggccccctaatattcccccggcagcgtcgccgtgaccgtatgcgtcgaatctccatccagcgtgcaggtcacctgaacttgcccgtcaccgacatcccgcagacgatcacacggcacgtggaacgcgatatcgcgacgctctcccgcgttcaagtccatgtataccgaatcgacaagcattgccaaacgtgggatgcggcggccgccgctgacatgcgcgaacagattcacggcacccgcggccccgtgatcgtcagcatgtgccgtcacctgcaccagcacttcacctggatgcgattgcgtatcggcgtgcatctcgctgaacgtcaccgccgccagcgaaccggttccatagccgaagccgcgcaatatcggttccgccgcatccttgtagacatgcgcggcactttggcggtcattgtatcgaacgggaatggctgcgggatatgcgggtaaggtcacaggaaggcggccagacatgtcggctccgtcaaccaatacgtcggctacggcctgcggcccatattggccggcatatccggcccagatcgtcacggcggagcgttccagcacatcggtcagtacatgcgcgcgaccgcacaccgccaccgaaacaattggagcggtggtcaatgccgcgacttcacctagcatctcatcctgacgccagggcaggcggatgtcagacaagtccacgccttcgccgcaggtggcaccgtattcggttacggccttcgccgcgccattgtcgtcgaattcactgtcatagctgcgttcgctggtgctgccgcatacgaataccacggtcgacgcacgcgcccattgatcggccggcgcatcgctcggcttggcggccaagagaacccggtcctccccgagacgtgccaccaattgccggtagacgcttgactgttcatcggcgggcagaggggcggtgtaatcgcccaggaagcagccgaaatcgtcggcgaacgggccggcgacaatcacagggccggcttgagcatcagctatgacgctgcggatatcgtcgagcgtggcggcagactggccatcattgatcagcgttatcgcctcgcgggccatgcgcttggcctgctcacgcccatccgcagtggcctgcgcgatggcgtcggcgctcggcatggcaattgcggcggtatcggcaccgtcttcgggcaagagaccgaacatggctttgagttccagcacccggcgcaaggccgtgtcgacagcggccactacctgttcgtcatccgcatattcttcgaggcgggtgaatccttcatcccacagggagacgtccacgccggcgagcagtgcggcacgccctgccgcgggaatggagccggccatgtcttcgagccgatccacggccaggccatcggccatcacgatgccgtcgaaaccgagctggtcgcgcagataatccttgagcagccacgggttggcgcagcaaggtacagaatcgatatcgttgtaggctgccataaagcccaaggcaccggcgcgcacaccggcggccaccggcggcagatgaatttcatgaagatcgtgcgggcccagtacggcggactgtccgttgcggccgcccacggcctcgccttgcgccgccagatgcttgagcaccacggccactcccccgtggccgaccttgctgcgatgctcaccctgcatgccggtaacgatggcctcgcacatgcgggcagccatcagcggatcctcgccgaagcattcctcgcaacggccccagcgtgggtcacgggcgatgtccaaaccggataccaatgcgatatgaatgccgctggcggccagttctgcggcaaccgcagcttccgcttcctgcaccccctgcgggtcaaacgtagcgcccaaacccagattggtgggcagcaccgtgccgcccagcgcctgatgcccgtgaggcgcctcttcgctaagtaatacgccgatgccgtgcgcgccacgttccagcacagtttgctgcaccacggcaatcgcctcagtccgctcctcagggcgtatgccgttaccccaatgttgaccagaccatgggtcggctcgcaatagaccgtacagggtgccgagtccaccccatcggtcaatctcctgcttgagctcgtccgaggccaccagccgtcccgcagcattgcgttccacggacttccaaccgagcagacgctggttcaactggccaactttctgcgtgaagctcatcgaatcaatgagtcggtccactgcggcgcagttgatgctcattgagcgctcccccttctcgtatattgtcttctcgttcttctcgctcttcggcgagtaccggatcttatgttttgccctgcgcactgcaattgtgcgcactgcaattgaaaatatccggttgtggaacaaggagtagatgattccacaaccggatatcggtttaatcagccgtttcgaacgatgggtccgaaaccgcagtgtagtaacgggcggcataggggtgttcgtcagcgtgcaattccagaatgccacgctgcgcgagcgcctcttgattggccgccacctgcgaggtgatgatggtcgggcgctggcccgccacctgcagcttcatccacaggtcgcacaccgagcctcccgggccgagcgcactgcggttcaccgggtttccggcctcatccacatcaatcaccacggcgacggtcttcggctgagccggcaatgcggaacggtactgtgcggcgagttccccgaacgtacggccgatcggcttcagctggccttgctcgtcgaacaagcccagagagtgctcgaagaacgggaagtcttccatgctggcgggcacatcgtgcgagcaccaccacgtcacaccccacaggttccggcaatccatggcacgttcaacggtcttgcggcagaattccggcgtgtagccggtttccagcacattctccggcgcaccgacttcctggagccacaccgggcgctcggaatccttgccgaacgccttggccagctcggccaggtacagtgcgtacgacgagcactcctcactggtggcgccgtatccttgcgcgatgccgttgaacacccaggagtgaatcactgtcatatcacccttggtggcggactgcaccggagtgaacgggtgcccatcgatgaaccaggtgccatcgttgacgctgtacagcgcgttgtgcccttcaccggcggcggtcggaagcagcgcgtccagccatgcgtcgatctgccggtccgtggcgctcatcttcgtgggatgcggcctgtcagacagctgattgacctcgttgcccaaggtcagacccttgaacgcgggttccttggacagctcatcggtcatggtcttgaccagttcacgctcggccgcaacggcgtccgcatcggtgaacatgttgcccgcatgccaggtgaccagccatgaaggcaggaagtcgaagctggacagatgcccttggaacacgtccacataggcatccaaaccgtgctcgccggcgatgtgcaccatgcggcgcacatccgccacgcccttcttgttgatccaggtgcgattaggttgcagatacggccagatcgggaagatgcgcacatggtccatacccagttcgctgatctgcttgagatcattgtcgatgccgtcccagtccgggtcgagccatgcgtggaaccagccatgcgacggcgtgtagttgactccgaatttcattggagtacctcctttttccagtccgctcagcccttgagtccaccctgttccaagccacggaagaagtagcgctggaagcagcagaagaagacgatgatcgggataagcgagacgagcgcaccggcggcgatcagtcgcggatcttggatgaacatgcccttgagtcggttcatgccgagggtcaaggtgtacttgctttcatcggagatcgcgatcaacggccacaggaagtcgttccaggcaccgacgaatgcgaagatgccgacaacggtcatcgtgcctttgacctgcggtacacagatgtggaagaaccgctgccataggttggcaccgtccaccatggccgcctcttcgagttccattggaatggatttgaaggcgttggtcatgagcaggatgttgatggcgccgcacaggccaggcagtgcgactgccagcagtgtgttctgcaggtggatggagcgaatgatcaggaactgggagatcatcacgccttcgatcgggatgaccatggtgcccatgaacatggtgaacaccagtccgcggccacgccacttcaggcgtcccagtgcgtagccggccatcgtggagaagaccacgttgccgaagatggagatcaggcagaccaccagcgtgttgagcatgtagtggaataccgggacctgcttgaacacggaaatgtagttgtccagcgtcggggtcttcggcatcaggtagggaggcacggcgtagacgttgtcgcccttgcccttgaacgacagggacagttcccagacgaacgggccgacgagcagcaggaacatcagaatcagaatcagatactggacgactttgccgacggtgaccttatgcgtgttggtattcatcagtcctcacctcgcttttgtacgatctgctgcacgatgagcatgacgccgacgatgacgagcacgacgatggagatggcgctcgcgtaaccagtgcgggcctggataccggtgccttcgcgcttgataagcatcgacatcgtcatatccatgccgccggggcctgcggagccgttggtcaacacgtagatttcgttgaagactcggaatgcggcgatggtggacagcatcatgatgagcatcatcgtggagcgcacgccgggcattgtcacgtagatgaactggcggacagggccagcgccgtcgagggaggcggcttcgtaaagggattcatcgatgttggcgagggcggtcaggtagatgaccatgtagtagccgaggcccagccagattgtcacgaacatcgagctgaagagcacgccccatcgatcggtgaggaatggaaccggcttggagatgatcttcaatgccttgagcacggagttgaccagaccggcggaatccagcaggttggtccagatcatacccaccacaacggcggacataaccaccggcatgtagaaggcggtgcggaagaagcccatgatgcgggagttgcccttgaccagataggccaggatcaacgggaggatcaccatgaacggcactacgcagatcacgtagagtgtggagttcagcagtgccgtgaggaagtactcgtcatggaacagtttgatgaagttttcgagtccgacgaaggttcccggacggagcagtgtggagttggtgaaagcaagcctgaaagtgttgagtgccgcaaggacgatgaatacaaacacaatcgcgaacgctggcagaacaaacaggtagggggcaatgatggtgccgaagctacgattctgcttcttgccgtggttgaggttcatcggttcaggccggtcggaggccgtgcgggcctccgacctgtcagcggcgagtgccgcgttgctcactgtgcgagcttctcgtttgcgaactcgacggacttgtcaagggcttccttggcggtctgcttgccctgcatagcgagggcgatctgctgctggaagttcttggagccgttgttgtcggtgaactcggacggacgagagccgtagccgtccttgacctggtcgagcgtgatcttcagagccttgccctcaagggtgctttcgtcgatgctcttgtagtagtcgtcatccagaccccccttggcggacgggaacacggaggccttcttgtcgaactcgatctggttcttctcgttggtcacgaatcgggcgaagtcaatggcaacgtcggggtgcttcgagttggcgctgatgccgagcatctcgtaggccacggaagcggacttgccgtcgttgctgatacgcgggccgactgcgaggttcttgtaaaggtccggagcgttctgcttgaagccgtcagcggagtaggcggagccggccatggagaccaggttgccacgctggaagagatcggcggcctggctccaggaggagtcgagggcctccggcgggatgccgcccttcttgtacagctcaacgaagcggctgatctgcttgacaccggcctcatcattgaaggtgtacttgctgtggtcatcgttcatgaaggacttgacgcctgcggtcatcagatcttcggtgttgtaacccatcgtggtgcccaggtagacatccttgcagttctgcacgatggtgtcgccggcggcgaagtactcatcccatgtggtcggaatcttgttcggatcaaggccgcacttctgcatcagctcggtgttccagtaggtcgggccatcgttgacataccacggcaggccgtaggcacccttctcgatgccattgccctgcatggtcacggacttccatgcgccttcgtagtagtccttttccgcatccggagcctgcttggagacatcgagcagcgcgccggccttggcaagaccgtacaggatggagttgccgccgtcgacgatgtccggcagttcgccggccgcagcctggctggacagcttgtcttcgtaaccatcggacggggcgtcaagccacttgacggtgacgtccgggtggtccttctcataggccttgatcagcgcctcgaaatacggggtgtacttgtcgttcttgaggttccaggtctggaaggagatctccttcttgccgccgtcatcccccgcagttccgctaccacaggcagccaccgatacgagcatcgcaccggcaccggcgatggcgaggatcttcttcatagaaaacatgatgttttcctttccttttgattcctttttcatcccgccctgctgtggacggagaaacctaatcgttgtgctccagcacagtcacccgtcgcggtgattgacgtggtatcacaacctttattcagttctcatcgctgagactaaaccgttttagcttccggccagtcgcgaacctgttaactaaatcggtttagtaaaaacataacacaatcgaaacatgcacgcaacgaattcatcgtcgcgtgtcgcattgatatttgcccaacgggatcgctctccctcttctcatacaataatgggccgcgcccaaccgtatggcagagccggtctgttccggttccgttacggttgggcgcgacccaaaatatcgagcctaggcccaatatcccttatcggcgaatacgcagcgtggcgagctggaatggcgccaacgaaacgatcgcaccgtcggcaggcattggttcgtcaccggcgagcgcgcgcggcagttcggcatccagctccggctcctccatgagattcacctcctgcacgctggccttggcatcggagagagcggcgtcaaggcgcagtgtggccgtggcattgccgccggcggcctcgtacaggcgcacgatcagatcgctggaaccgtcatcggcgagcttgatccagtccaatacgatgacgccggtggcgtcggcgagcgagaccagcggcgccatatcaggcaactcccctattacggggctgttaagtcgcgccgcttcgtccagcaccgcattcatatcggcgtcagcgaccagagaccacgcgaaggagtgtgcgccttggtcggtgcgtgggtcggggtacagcggtgcggacagcagcgagagccgcaccatggtgccgcggccggtgccatgtgccgcatcggcgtggatggggctgacgtcggagccgtaggtggaggcgttgaccacagcggcggcatagtcggcgtcggcgatccgcacgaagcggtgcgtgcagctttcgaatttggcatcatcgctgcgcgtgttcttgttgatggggcgttcgaccagaccgtattggcattcgtattgcgcgttcagcgcttgcacggtgaccggcatatccactttgaggaactgttcgacggcatgccagtccacatcggcggtgaagtccagtgtggcggagcccggccttaaggcaatgcccgtacgaatttcaacgcccttcgcgcgagtgacagcatgcacgacggccccaccgttggcggtttcgtccacgcttgcaatcgatgcctcgctgagcgcgttggcggtgaggaacgcatcgcgttgaatatcccaggcgtcccagtggaagggttcgtctttgagcatttcgtagcggcccagtcgggtgccggcgggcaccagttcacgattggttcgctgatcgacgattgacgaaacggtgccgtcggcttcaatgcgcacgtgcagttggccgttgtcgagcacaatcgtatcgccgtcatgggtaacggcgacccgagccatggatgcggttcccgcttcggctcggctcgaagccgggcgtaccacccacgtctcacaggcttggcgggaatatggggcgattacggcgtcggttatggttgcgtcatcgggttccacggctgcgatcgcgcgcccggcttcaagggcgatctcgttcagccgagcgatgtcacgcgcgtattcggtccgcgcctgacggtgtacccatgcgatggccgaaccgggcagaatgtcgtggaactggttcaggagcagcgttttccaaatacggtccagctcttcgcgcggatagacatagtccgggttcttgatgcgggccgcggcgcacaggtattcggtgacgcgcagcatcgactcctcctggcggcagccgcgcttcatgtcctgctgggcggtgagggtagcgcggtgcagttcaaggtacagttcgcccttgaacaccggggtctccccttgcgcatcgtcgacgatatccttacgcacgcggtcgaacagttggtcgggagtaccgaattcgatcttcggcgcgccggcgagatcatggtcgcggcggatgcgcgcggtcatctcacgggtggggccgccaccgccatcgccgaagccgtacagcagaatcgcgttacgggagaggtccttgtccaggaagttgcgctgcgaatacatcagctcgtgcatgctcatccacgagcagtaggtatccgagggcgggaagtgcgtgagaatacgcgtgccatcgatgccctcccacatgaacgagtggtgcgggaacttggtggtgtcgttccacgagatcttctgcgtgaggaaccagtcgaatcctgcacggcgggcgatctgcggccaagagccggtgtagccgaaactgtccggtagccagatgccgcgcggcgcgacgccgagatgctccttgaaatatcggcggccgaacgtgatctgccgcaccaatgattcgccggaaggaatcatgttgtcggattccacccacatgccgccgaccgggatgaagcggccctcttcgatgcgccgcttcattcgtgcgaacaggtcgggatgctcctcttccagccatgcgtactgttgggcggaactcatcgcatacgtgaagtccgggtcttcgtccatcaaagccagcacgttggatacggtacgggccaccttgcggcgggtctcgcgcaccggccacagccatgcggagtcgatatgcgcgtggccgatggcgatgtgtttgattgcgctggaggcggccggttcggcgagtacgccggcgagcgccgcacgggctgccgacacggtttccaagtcgcgttcatcgtagatgttcagggagcgttgcagtgctttggcgagctgccagtagcgtgggtcgtcgtccttgagctcacgaatcagcgaggagacggtttccagatccatgtagtaggcgaacacgtcttcgttgaagatggtgacgtccatacgactcagtgtgtatgggaagtcacaggtgccggtggcctcttcgccgagttcggtgggtgagaacggggtggggccttcgacgaatgggttggcggcggcttcgatatagacggtgaagtcgccatgttcatcgagttctacggtgctgctgccgtccgcgtagacgagtggaatccagtggttgcgtgggttcgcggatttgatggcggtgccgtcggcacgatagacaagtccctcggattggaatccggggccgcggtgatcgagccagccgaggtctaccatgagttcgacttttcgtcctttgaccgccgccatgtcgatatggccgttcacctcgaaccatgtggtgccccatgtggtgccccagactccgggaacgcggaaaggttcgaagggcacttggccgttgcgcactttggctagaaattcgctggagggcaccggttcgccgggattgtggaacgaacgcaaggtgcatgcggcgagtgtggtgtggatatgcggtttgacgcgctgctgcatgacgcggtcgcagcgctccaactgctgattgggcagaagaaacatggagagttctcctttgctgtgtctgatggaaatgatgggtgtggtgacaattgggaaaaccgtaatacgacatacttctgcctcctcatggttcgaggaggcagaagcatcagacgggaattcagcgcgtgatgcgcagggtggcgagctggaacgggccaaagtgcagcgtggcaccttcggcgttctgtctaccgtcttgcagcgcgaccggcaggtcggcggccagatcgtcgccttccagcacattggtctcatgcaccgaagcgcctgcgagcgccgggcagacgtgcagcgtggcatcggccctgccgccggccgcctcataggcgcgcacaatcaggtcgccggagccatcgtcggccagctttatccagtccaacaccacggtgccgtttgctgactcgatcgaggcgagcggcgctaagtcgggcatgtcatgaagcgtcggtgcgttgagtgcgcaagcggcgtcaagcgcacggcccaccgtggcgttggccaccacggaccagtcgaactcatgcgcaccgatatcggtgcgcgggtcggggaaggtcggcgcggagagcagcgacagtcggaacatggtgcccgagtcacgaccttcggcggcgttcccggagatcggcgcggcatcggacccgtacaccgatccgttgatgacggccgccgcgtaaccggcgtcgccgataagggcgaagcggttcgtgctgctctcatacttggcttcgtcggatgcggtgtttttgacgattgggcggcggaccagaccatactggcagtcgtatgttgcttggtcggccacgatacccagcggcagatcgactttgaggaagcgttcacgttcgtgccagtcgatatcggcatggaaatcgagcgtgtgtgaaccggggcgcagcgtgatggtggtggtgatgacggtgtcatcgtcggcggtacgcacgcggactcgtgccgcaccgttttcggtatcgaccgattcgattgatccggtcatggcattcgccatgagcagggattcgcgttcgatctcccaggcatcccaaacggcgggttcgtccctcaacagttcgtattggcccaatcgggtgccggccggaaccagttcacggccatgctcctcgtcaagcagtgacgagattgtaccgtcggcctcgatggtgacggacagtacgccgttggccagcagtacacggccgttgtccaatgtctgggtcagtacggaaagcgcgttggtcggttcgttgatgcggctggcacgccaagacgcgccgtcattacggaactggctgatgcgggcttcggcgagcaggtcggcctgcgggttggccttgcgcagcacggcgcacatgccttgggcgatttcagcgagacgcttcaggtcgcggcgatagtcctcgcgggcttcgcggtgcacccatgcgatggccgagccgggcaggatgtcgtggaactggttcagcagcagcgtcttccatatgcggtccagctcctcgcgcgggtagacgtactccggatcggacaacacggcggctgcgcccaggtattcgaccgtgcgcaacagcgattcctcttggcggcagccgcgtttcatgtcctgctgcgaggtcaaggtgccacggtgcagttcgagatacagctcgcccttccagacgggcatttctgggccggcgttctctgcaagctgctgatgcgccttgtcgaagaagtcattcggctcttcgatgctcaccttggagacgccttcgaggttctcgtagcggtgcaggtgctccatcatgttgcgcgtggggccgccaccgccatcaccgaaaccgaagagcagaagcgagcggtcggagagatccttgtcctggaagttcttctcggcgtagtcgagttcctgaaccttgcaccaagcagcataggtatccgccggcgggaagtgggtgaagatgcgcgagccgtcgatgccttcccacatgaacgagtggtgcgggaacttggtggtatcgttccacgagatcttctgcgtgaggaaccattcgtacccggcacggcgggcgatctgtggccatgcgccggtgtagccgaagctgtccggcagccatacgcccttgggctccacaccgagatgttccttgaagtatttgcggccatatgcaatctggcgaatcagcgattcgccggcgggcagcatgccatcggcttccacccacatgccgccgaccgggatgaaccggccttcttcaatgcgccgcttcatgcgcttgaagatgtccggatgatcctcttccagccaggcgtactgctgggcggagctcatcgcgtatttgaagtcggggtcggcgtccatcagcgccaatgcgttggatacggtgcgggccaccttgcggcgggtctcgcgcaccggccacagccatgcggagtcgatatgcgcgtggccgatggcgctgacgttcatggccgaggcattggccggcttggccagtacgccggcgagtgctgcgcgcgcggcttccacggattcggggttgcgctcgtcgtaggcgttcagcgaacgctgcaatgctttggcgagttgccagtagcgcggcgactgtttgtcggcgaattccatcagggagctcaccacgtcgagatcgacggagtagttctcgtagcgttcatcgaattcggccagatcggcggacttgaatacgtacggctcgtccggcttgccggtggcatggtcgcccagttcggtctcaatgaacggaggcacgccgagcagcagcgggttgctggcggcttcgaggtacagggtgaagctgccgtcttcggcgaccggcacttgcgcgttgccctcggcatctatgaacggcacccaatagttgagcgggtgtacggctttgatggcggtgccgtcggcacggtagacgaggccctcgatatggccgccgcaggagtgcgggtaccagccgaggtcgaggatgagctccagcggcttgcctttcgggtagccggccggcacggtaccggtcaggcggaaccagactgtgccccatgtggtgccccattcaccgccgagcgtaaacggcttgaagtcgatgtcacctcgattgagcttctcgaagaactcgtcagtgggcatcggctctccgggaatgtcaaaggactccaccgcaagctgtgcgatcgatgggtggatatgagggtccacgcgctggcgcactatgcgcttgcaccgctccagttgctgttcaggtttcaggaacatctgctgttcactccccttatctctgccgcttgtgcggccacatcattgtgctgcccgttcatgggaaacatatcgacatgcgccctcgcccgcagaagactaaagcgctttagtaacatattggagggaacgggatatgatgtcaaattactatcgcaattcagcgtgttccgtcaggcatgtcatgctcggtgtcgatgacgatggtcaccggcccgtcattgaccagtccgacccgcatatgcgcaccgaaacgaccttccttcaccggcactcccccggagcgcaacgcctcgtcgaacttgatccacatgaaatcggcatgctcgggcttgccggccttgatgaagctcgggcgattgcccttgtgcacgtcggcgaacagcgtgaactgcgagatggagagaatctcgccgccgatgtcctggatcgaacggttcatcttgccctgcgcatcctcgaacaccctgagattcagaatcttatgggccagccaggcgatctgcttgccgccgtccccatcggtgacgcccaccagaatcatgaatcccgggccaatctgctgcggctcgaacgtgggatccagcgtgcccaattcattgaccacgtccacggacgcttcggacactcgttgcaatacgactttcatggttccctacagtacaacgtgtgcagtcatcaccaccgaaccatgccaatactgcggcagccagcaggtcgaggcaccatggacgctctgccaaggttgaccgcaggccgcgcacccgcaggataatcggcgtctgccccgaatgcggacgcgaagtgatggccgcgaagggcaaggcgctgcgcctgtgcaaatgcggcgaccccgtcaacgtggccgagctgcgcgagcaaagccaagccgaggccgaatcaatccacctgaccaaaaccccggcaggcatgagccaatggctcaagggaaactacgggtacgaggtcagccgcaagcggatcagcaactggctcaaccggggcaaactccccagctcgagacccgtcgatgacggctactgggagttcaacatacgggagattcttgcgttggctatgggctccagcggccgttcggcttgacatgatgtagtctgtaggatacagtagaggtatggaaatcaagcaatccgccgaataccgcaagtggttcaagaaactcagggaccacaaagcgaaggccgccatccaagcccggctcgatgtctgcaagctcgcaggcaggccattcggcgacatcaaacccgtgggaggcccggtcagcgagatgcggttccacaccggggccggataccgcgtctacttcgccatgcagggcaacgtgctcatgctgctgctcgcaggcggcgacaaaagcacccagcagaccgacatcagacaagcccacgacatcctcaacgactacaaggaacaacgacaatgagcaccgaattcaccgactacgacaccagcgaatacctcgaaaacgaacaggacatcatcgcctacctcaacgccatagccgaatacgacgaccccgcactcatgcaggccgcgctcggcaacgtcgccaaggcccggggcatgacccagatcgccaaggacgcgggcgtggggcgcgaaagcctctacaagagcctcagcaaggacggcaaccccagcttccagaccatcgccaaggtaatccacgccctcggcggacgcctcaccatccaagccgcctgaaaaaacaaaacacaagcgggagtagggtgaatccaccccgtggcatactccgtatcaggattagtgtgaaagcctctgaatcaaccggttcaggggctttactcatatccacccaatggtcatgtgccatggcaatcaaccggcatgaccgcctatgcgcgtagctcagctggtagagcggcggtctccaaaaccgcaggtcgtcggatcgaagccaaccgcgcaatccccagccgcgtctacgacatcctcaaatggttgggcctcatcgtcctgcccgcactcgtcctgttcgtcagcacggtcggccccgcatggggctggactcgcgtggacgcgatagtgaccacgctcaacgcgctcggcatcctcgccggcgcgctcatcggcgtcagcgccatcaaacagcgccgccacctcgccgcatgaccaccccgcacagttcggccccgtccggcatcgcagacgactcaacccgagtcggcctacttgccggtcggggccgtcttcgcgttgtggcagagggcttcgcgggctctatttttgctcacattttgcccacattttcccgcgaaac

SEQ ID NO: 2385 - DNA, 15766 bp, Unknown
  R50_10m  MAG No. k141_5853
agatttgcggcggccatggcccaggagagacgcccggtcccattccgaacccggaagctaaggcctggcacggcgatggtactgcacccgacagggtgtgggagagtagcacgccgccgcaccacacgtacaggaagccccgatacccctcaaaggtaccggggcttcccgcatatcaggacacttgcgcgtgggggggggtatctcgcgtccttgggccccggcaggagtatcccgtcggggcccagtgcgttttgggcggcaacccgctgaatacccggtaagatgtctgaggtatcaacaaacaggtcaggaggtgacgcgcatggtggcgccaagccgtgatgaccgtagcgtagatgcattggtgaaatccaaggcagtacttgatgtattggcggaactgggaccaagcaccgcaaaaaccataagcgaacgtactggtgaacccgtaagctcaacgtatcgtttgctggataatctcgtcgcagtcggttgggtggaacggggcatcaatcgtggcgagtatcggcttggcatcgattgtgtacgtatcggcggccaaatcgaaagcagactggacattcagcagatcgctcgccgtaccttccgcgcccatcacggccagttcggcatctggggtctgttcgttcggaggcgattgcgcacggtgtgtatcgagacacgcacccgtgaggcattgcaaagctatgcacagctggtgggcaatagcttgcctctgagcatgagcgctccctctcatgtactgacggcctggcttcccccggctcgctacgagcagctgttggaacactatgcctataccaacgagctcggcggcacattctccacgatgcgtgccacagcaatgggacaggctcgtcatatacgcgaatgcggcttcacctatgacgtcggccagaccatggccggctccgtgactatcagcgtaccggtattcaatcacgccggagagattcaagcggcaatcgccctgagtggcctttcccgctccttggaacctgagctggcctgtctggtagatgggcaaccggcaacggcatcggctcaagacatggtgcgattggtgcagactgccggccgtgaggtgtcgcgaggccttggatacagtggtgatcatcttggcctgaacagttgaatatgatgagtcagggataagtcaggggaaggaacgtcgacgatggcggaagacaaacgtgaaccgacccgcgctttagacaaggcgagtcgcgtgatggacgcattggcggcggagaatggcctgtcgccggcagatatcgccgacgcctgtgatatcccgcgatcctccgtataccgcgtgctggatggactggtcgatgtggggtgggccgtaacggatacggatggcaactactcattatcgctggactggctgcgattggctgatgccgctcgcacgtctcgtaccgaatggcagcctgcgattgcggtcatgcatgccatcaccgcgcaaaccggcatgacctcattcctcagtgtggtctccggcactgaattggtatgcgtggaatgtgcgcaaggtcatgccatcgattcgctgatcctgcgcccgggccgcgtgctgcctctgcatgctggcgcggccggccgcgtggccttggcgtatttcgaggatgccgatgtcgaacgctatcttgcaggagcgccgtttccggcatataacgagaacacgctggtcagtgtggaacagttgcgcgaggatattcgcttgactcgcgaacgtggatatgcactgtcggatgaggatgtgacgttgggtgtcggtgccgtcggtgtaccgattgtggacaacgagtccggtcgcgtgatcgccagcctgtccgccggtggattcgtggacgaagtgttagccactcaagaatccttggccgcgttactgcgcgatggcgtacgcgaaattcaggcagcctgattcggcccgctaggctgtcgggctggacggttatgtccggtcagctatggcctttgccggctacggttctgctggttatgcttctgcccgactacgctgcggtccgttacgcttcggccacacgacccaacgcgatggcggtgatcagcacgtacgcctcgcgcgggtcggtggcatcccagccgatggattcggcggcgcgcttcaaacggtagcggatcgtattgggatgtacgttgagctccttggccgtggtctcgagcgaaccgccgaacttcaggaatgtggagacggtgagcagcgtcggatcatccgggcctgctgctgtcaggcttccgtagaccacgcggaccagttcgtcacgggcgtccgcgtcgccgatcaacgcacgttcgggcagggcgtcgtcggtgcgtaacgggcgcggcaatggctgcacggtggcggccagggccggcgcggcctgaagacagtagagcgtggcctgaatcgaacgcatcgcgccatcggcaccggtgcgctgtggacccaaggcgattggccgatcggcggcgaacgacggggcgatggtattgcagatgatttccggcgtggccgcaccgaccggacgaatcaacgccactacggcggtgctgttgccgatcgggcgcttggcggtcagacacacaccgccgaaatcggccacgattttctcgatttccttggccgtacgtgcggcggaccgggcagggtatccggcgatggtgtaacaatcgaagtcatgctcgaaaccgaggatggtgaacagggactccactcgttcgtcggccagatgattgaacaggcactcgaacagcacggtgcgtacgcggttggtcgcggtgatgccgggtgcggccgaatcggatgaatcgggcgcacccggcataccggatgcaccggacgaatcggcaacgtcggcagcaagaagttcgagaaaatctgacatagtcactagtgtagcgtcgctgattggcgttgcctttcagccaaagactctcgccaatacgtcagcaccacgaatccgaatacaaacgcaaccggcaacatgtgccgctcgaaattattggccggcgcggtaatcatcacgcccatcagcagtagcagcggaatatgggtcatgagggtgagccaacgtcggcgaatcacctcggccgcgccgatcagcaatgtcatcaccacgtagaaattgccgtgcgtaggccagccgagcacgggaatactgccccatacgcgagtgaagccggcgatgtgctcacgccagtcatggttgtaatccttgatccatgtggagtttttctgcacgtaatcgctggccacgtaataatccatcgatacgtacggctgatcgttcacattgaagtatccgaagcatttggccagcaacgcatccagcgcgatgatcggattgtccttgacgatttcgaaccatgccttgttgaaattggtcatatcctcgggcgtcaccgtgcgccacttgtagctgaccttcttggcctgaataccggaggatttcaccgggtcggcatcctgctgggagtaagcgtcggccatctgatcgagattgaagacgggcgcgaggttctttttggcttcgtctgaaataccgtccggattgcgctgagccacgcgggcgatcatttgcagctgtacgccgcggctttcgattggatcgccgccgatgatcgcaccagaggagatggcgaaggagatgccgccgtgaatcagtacggtggggatgagcagcgccacgacgtaagtcgcccagcgtttgcggtcggcgatcagagccagcacgatttgtagggcgatgatgtaccacgcatatttcgcggaaatcagcatcaccgacgtggccaggatggaggcgatgaagctgtggcacggcaagtggacgggcgtggcgatggcaggggtctgaggatgtttgcgggtgccggcggggtgccaggtctggacgagttcataccagacgctgaaccaccagacgaacgagaacgcgaacagcggcgatttggtgatggagatagtggaaaacacggccagcgggcagaccatgaagaacagcagaatcaggaatctggccaatcctccggcctgtgggggaacggcggaatccgttgccgtttttcctatccaaggccggttcaggaatcgattggcggcggcagcgcagcagaacacggcgaacagcgtctgcagggcagccaacgtcacgatgccggcatcgtttgagccggtcagatgcctcgcaaacgtgactatcgcgccatagaacacagtgagtaccacattgtgctggtcggtcagatacgtgggatcggacggccacatgtagtgcgcggtggggtagatgtccatcggcacgaaggagaagaagccgatatagggctgtttcaggccggtccactggttccaggcccagctgaattcgcggatctgtgagcggaggtccgcgccgaatgcggccagcagagtggtcggcacccagagccagccgacaaaaaacaccagcataagcttccagaaccggttcgtgccgcgtgtgatccagcggtccagaacagtgacggtggacgtgacgatagcgcgaacggtacgacgggtcttggctggttggctggcctgctgatcggcggcgggccgtgatgtttcgctattctgctgatggtggcgtaggcgctcgccgatggtcttcggcagtatgcgctggcctgctgcgaatcgcgccatcagcgtgatgattccgagatatatcaggaacgacacgacgaatattgcggtattggcccagttccaatgggcgagggtgccgttctcctcgtcccggtacagcgggccgaccgccgagcacagtgcaagccacaggcaggccagcacggccagtgtccagcgcgcggcagcgcccacgcgcgcaagatgcgggtgggactggcgactggatacggcggcaagcttcgcggtggctggtgacgtcatgacaatatatggtagccgcacaggtcaacggttgatattcgatgtctgccgggcattgccattgttcgcaagccaatacgacgaccgggtgcatgcgtgggttcggcgaatgcggaatttccgaagttgtgaacgttaacatgggctatgtgggtgaaaatagttgattttgcgcgcttttccatggaataacgcgggcatatcgcgccaaaatcgaggtaacgtagtgcccatgatgagtgcgttgaaagctgcaacgccgcagctacccagaactacagccgtcgcagatcatgtggtcgccgtggacgaaaccgattcgaccaacgcgctggccgcgcagatgatcggcgacgggtcgttgacgctgcccgaccaccaggatggcgaactggcggtggccgtggtggccgccgaccggcagaccgccggccgtggccgcaatggtcacaagtggatcagtcagcccggccgttgctcgacgatgtcctatgccgtgcgcattccgcgcgcgatcgccaccgacgaatccgtcaatggctggctgcagatgatcgccggactggtcacgctggacgccctgaacggcatgatcgaggaatacggtgccgcgccgaaccagccggactgcttgctggaactcaaatggccgaacgacgtgttctgccacgggctcaagctgggcgggctgctctcggaactggtgattccgccgtcgtccggtactgatgctgatgccgatgacgacgtcgtcatcgtgttcggcgtaggcctgaatctggcgctgggtgcctgttggctgcccacgccgcagtcgacttcgctgcagctgcatgtcacgggcttgccgtcgtttggcgagatgcgcgatgcggtggccgaacgtcaggtcgagggcttccgtgaacgactggcgaagttcatcgccgacccgaagggccaggccgagtcgttgcgcaaggaaatgaaggcggtgtgctgggcgcgcggccgtcaggtcgaggcgcatttcacggacggcaccacgctgaccggcgaagccatcggcctcaacgaagacgcctcactgatcctgagaacacaagacggcacggaccatacggtccgcaccgccgatgtgggagtgctgtaatagccggccagtagctagctagtagctcaggtcagcgaccgagcttggacaggccggcggcggccagagaggccaccacggccttgatggcgtcgtcgacaacgaagcccatggaggccagggccacggcggcgagcggcgcaccggtcagcgcggactggatgacgaagccgaaggcgtacaccaccacgacgccgccgaccagcgcggccagcaggtagcggcccgcggtgcgcgcggcggccgcgaaggacgaagtgtcggacttgccgcgcagcagggcgatgaccaccacacccggcaggaagccgaagaggaagccggcgctcgggccgaccagggccagcgtggaggtgccgccggcgaacaccggcaggccgaccgcaccggccgccagataggtggcgacggcggcaccggcctgacgccacggcagcatgagaccggcgagcatcaccacgaacgtctgcagcgtgatcggcaccggcgtgcccggaatcggaatctcgccggcggccgcggacagccacatcagcacggcgaacagcaccggcttccaggatgcggcgacgatacgacgggcgagcggcgtggtggccgctgcggatgcggtggtgtgtgaagtctgcatatcaataacccctatgttgtgtgatatcgccgtgaacggcgggcggtatgcgatggatgaggggaggttccggcgggccgtgcggtatccccgacagcccgaaccgtccatatggtggacggtcccaaatgaatccggccctgtgcgggcgaatcgtgcggcgatggaccgatgccggtccggtcgccttccgttcgcccgcagatgagccttcccccgaacttacggttgccatcgtagaggtgttcgatttcgtgcggtttcgtaccaacttacaaaattgtcgatttcgatttgtcataagttgacgaacgcaaccgtaacgtcaacttcttgaaccggcgcgcaaggatgtgcaatcggcggatttgcaacgtttttgatagccggcgccaacggttgcgttgccggaacctacgcgcgcgtttgttcgtagcctacaaaagggcgtgaaagcttttgtgcgaacgcggcttgccctctcctctatatggagagcacaatttgacactatggctcatactgtcaaaaaactgctgattgcgaaccgaggtgagatcgctctgcgcgtggtgcgcacggccaaggagatgggtatctccaccgtggccgtctactccgaacaagaccgcaatagccgctatgtggacatggccgacgaggcatacctgctctccggcgacacctacaaggacacgtacctcaacgaggatctgctgatcgacatcctgcacaaaaccggtgcggacgccgtgcaccccggctacggattcctttccgaagtgccgagcttcgcgcagaaggtcgaggatgccggtgccatctgggtgggtccgcaccacaccgcgctggtggatttgggcgacaagatcaccgcccgccgagtggccttgcgcgccaaagtgccgccggtgcctggcctgtccgaaccggtgaccgacgtgcgaacgctgctcgacttcgcacacacccacggctacccgatcatgatgaagcgcactgatggcggtggcggccacggcatcaccgtggtgcatgacgacgaggagctgcgccgcttctacatgaaccacgacgcgctgcaaggcggcgatctgaaggaatacttcatcgagaagttcgtggacaaggcacgccacgtcgagacccagtccgggcgcgactcgcacggcaacttcaccgtgtactccacccgtgactgctcgctgcagcgccgcaaccagaaactcgtggaagaggcgcccgcgcccttcctgtccgaggaaatcgtcagcacgctggaggaatactcccgccgcctgttcaccacggtcggctacgtgggcctgggcacctgcgaattcatggtgaccccgaacggcaaagtgtacttcctggaagtcaacccgcgtctgcaggtggagcacaccgtctccgaagaggtcagcggcctcgacctggtgcgcgaacagctcaatatcgccgccggtggcgagctcacccgcgcccccgaaccgcgcggccacagcttcgaactgcgcatcaccagcgaagacccggccaccaacctgacccccggctccggcaccttggagaagatccagtggccggccggccccggcgtgcgcatcgataccggtgtggaacagggcgacaccatctccccgaagttcgattcgatgatgggcaaggtcatcgtcaccgcccagaaccgtctcgatgccgtggcccgtgtgcgccgcgtgctcgacgagctcgtgatcgaaggcgtgcccacgccgattccgctgttcaaggagatcttccgcaacgacgacttcaccgccgagcatggccatccgttcgccgtgtccaccaagtggctggagcgcacgtacctgaaccgcacaccggcttccgccgcctccggccagccggcctccttggccaccgccccgggtgccgctgccccggccgcgcccgacaagtccaagtcggagacgttcgtcatcgagatgaacaaccgccgcgtcaagctcaccgtgccactcgacatcgtggagaacatcaccggctcggcccgcgcccgcggtgccaagcgccccacccagccgttgcgcggcgcaggcttgcacaacgtggcctccggtgccgccacggccaacgacggtgccaaatccggcgtcatcgcctccccgatgcaggccgtggtcacgcgcatcaacgtgtccgaaggccagcaagtggccaagggcgaccttctggtggtgctcgaatccatgaagatggagaactacgtgtacgcgccggccgccggcgaagtgaagaagattttcgttggcccggccgatggcgtggaggccggcgacacgctggtcacgctggacgtgaacgccggcaaggccaaggccgccgacgccaagaaggagggcggcaatgactgacatcatggattcgccggccgtgaaggccgcggctgcggcctcggccgccaacgccgcccagccctcggcccaccagccgctgcgcaccgccgtggtcaaggccgccgaactggcccgcgccgccgaagagcgcgcccgcgacaagcagcacgctaaaggcaagaaaaccgcgcgcgaacgcctcgacctgctcttcgacaccggcacgttcgaggagatcggccgcttccagggcggcaacatcgccggcggcaacgccggtgcagctgtcatcaccggcttcggccaggtctacggccgcaaagtggccgtctacgcccaggacttctccgtcaagggcggcaccctcggcaccgccgaaggcgagaagatctgccgactgatggacatggccatcgacctcaaagtgccgatcgtggccatcgtggactccggcggcgcccgcatacaggagggcgtggccgctctgacccagtacggccgcatcttccgcaagacttgcgaggccagcggcttcgtgccccagctgagcctgattctcggcccctgcgccggcggtgccgtctactgcccggctctgacggacctcatcatcatgacccgtgagaactcgaacatgttcgtcaccgggccggacgtggtcaaggcctcgaccggcgagaccatctccatggccgaccttggcggcggcgaagtgcacaaccgggtgtccggcgtggcccactacctcggcgaggacgaatccgacgccatcgactatgcgcgcaccgtgctcgcctacctgccgtccaacagcgaaagcaagccgccggtctacgcctacgccgtcacccgcgccgaacgcgagaccgccaagcgactcgccaccatcgtgcccgccaacgaacgtcagccctacgacatgctcgaagtgattcgttgcatcgtcgattacggcgaattcgtgcaggtgcaggaactgttcggcgcctccgcgctcgtcggcttcgcctgcatcgacggcaagccggtcggcatcgtggcgaaccagccgaacgtgctcgccggcatcctggacgtcgactcgtccgagaaggtcgcccgattcgtacgcctgtgcgacgcgttcaacctgcccgtggtcaccctcgtggatgtgcccggctacaagcccggctccgaccaggaacacgccggcatcatccgccgcggcgccaaggtgatctacgcctacgccaacgcgcaagtgccgatggtgaccgtggtgttgcgcaaggcgttcggcggcgcgtacatcgtgatgggctccaaagccatcggcgcggacctgaacttcgcgtggccctcctcccagatcgcggtgctcggcgcggccggcgcggtgaacatcatccaccgccacgacctggccaaggccaaagcctccgggcaggacgtcgatgcgctgcgggccaagtacatcaaggagtacgagaccagcaccgtcaacgcgaacctgtcgctggaaatcgggcagatcgacggcatgatcgaccccgaacagacccgtgaggtgatcgtcgaatcgctggccacgctcgccaccaagcggcgcgtcaagcgcaccaccaaacaccacggcaaccagcccctctgatttctgaagacatcaaccaaacacaagtaaggaaagcaatgaccaccttcttcctcaatcgcctggccaccgagccccatgcgctcgccttcgccggccagtccaccccgtggccggtagccctggcagaccagaccaccgatcccagccttgacgaggccctgcgcggccacatcgccgcagccaaccgactgctcaccccggtcgccgccgacctgctgaccaccaccggacgtccggtcgacctgttcggcttcactccgaacccggcccgcctcggcgccgcagccgacgccaccgcgtccgtggaaggcgtggcactgacccagctcggcgccctgctcgacctcgaacaccttggctacagtgtggcccaggccaagccgctcgccgtgctcggccactcccagggcgtgctcgccgtgcacatggcccgcgccatcgaggccgccggctccatcgaggccgccggcaagaccctcgacgagattctggccgtcgccgccctgatcggcgccgccggaacccgccgtgtgcgcgaactgggcctgaaccccaagtatggcgaagccagtccgatgctctccgtcaagggcgccacccgcgaacaggttgaggctctggtcaagcgcgtgaacaacgcccgaggcccgatctccatcgccgtcaccaactccgacaaccaccacgtgctttccggctacccggaagacctggcagccttcgccctcgaagccgagcgcgagcacaagcaccaggccaagctgcgcgagcagaagctccacggcggcaccgtgttcaacccgaccctcgaataccttgaagtcaccctgcccttccactctccgctcatggccgacgccgtcgagcagaccgtggcctgggccggcgcctgcggctttgaccaggatcgcacccgcgcactcgctgcggaagtgctgctcaaccatgtggactggaatgcccgcgtcaaggcgctgttcaacgccgccgacccggccaagctgtggattgtggacctcggccccggcaacacgctcggcaagctgatcggcaacgtggtgcagggcaccggcatcggcgtggtcgaagccaccacgctgtccgaacgctccacgctctccacgctggaaagcgagcctgagcgcacccagaactggaaggcgttcgccccgcgcgtcatcaacaccccggccggcgccaagctggtcaccaagttctccaagctcaccggcaagccgccggtactgctgcccggcatgacccccaccaccgtggaaccggaaatcgtggccgccgcggccaacgccggctactgggccgagctcgccggcggcggccaggtgaccgccgaagtgttcgaccgccacatcgccgccctcgaagacgagctggaggaaggccgcacggtcgaattcaacgcgatgttcatggaccgttacctgtggaacctgcagttcggctcctcccgcatcgtgcccaagaagcgtgcttccggcgcgccgatcgacggcgtggtcgtctccgccggcatccccgagctggacgaagccgtggccctgatcgagtcgctgcaggcggacggtctgccgtacgtgagtttcaagcccggcaccgtggaccagattcgccaggtcgtgcgcatcgccaaggccgtgtcccccaccaccatcatggttcaggtcgagggcggtgaagccggcggccaccacagctgggaagcgctggacgacctgcttgccgccacctacgccgaagtgcgcgcctgtgacaacctcgtgctggtcgccggcggcggcatcggcacccccgaacgcgcggccgactacatttccggccagtgggcccacgcctacggcctgcccgacatgccggtcgacggcgtgcttatcggtaccgccgcgatgaccgccaaggaggctcacaccagccccgaagtcaagcagctgctcgtcaagacgcccggtattccggccgacgccaagtccgacgacgtgttcgccccgcaggccgcccactgggtgccgtccggcaagtccgtcggtggcatgtcctccggcctgagccacctgcacgccgacatttacgagctcgagaacgactccgccgaatgcggccgtctgctcgtgcgcgtcatgaagcaccccgaagagctcgactcccgccgcaaggaaatcatcgaagccctgaacaagaccgccaagccttacttcggcgacctggcctccatgacctaccttgagtgggcgcagcgcttcgccgaactcgccttcccgtgggtcgacccgacttacgccgaccgcttccagcacctgctgcagcgcatcgaagcccgtgtgaacgacacggactccggcgaattcacctccaagttgttcgccgctgatggcgtttctgctgaagaggcagctgccgctggcctgctgacccacgacgacattctcgccgacccggcccccgcgctcgaaaagctcgcactggcctacccgcagaccgccgaactcaaggtggtcccgaccgacgtggcttggttcccggtgctcgtgcgcgaataccccaagcccatgccgttcgtacccgtcatcgacaacgacctgctgcgttggtggggtcaggaccagctctggcagtccgaagaccagcgctactccgccgattccgtgcgtgccatccccggcccgatctccgttgccggcatcaccaccatcgacgagccgatcgccgacatcctcggccgcttcgaaaccgccgccatcaagcgcgtgcaggacgaacagcaagccgccgatgccgctgagaacgacgatttcgccgcacttggcgaggccaccagcgccgaagacttcatccgcaagtccccgaacatctcctgggtcggccacatcaccgacaacccggcctacggcaccgccctgggcgaccagtactacgaaatccgcgcgtttgacgccgcggccggcaagtacgatctggacatccacctcgacacctactgggacaacgatccggacggcggcacctccaagcacgccgtgcgcgatatcgtcatcccgctcatcgtggaaggcaccgagcccggccgtgtgccggtcgtggaccgcgaacgcctgattccggacgtctacgcgatgctcgccgccaccgcaggcatcggcaacaccgccatcaccggcgacaagctcaccgagatgccgcagcttgacgacaagacctctgacgagcgtccgttcggtaccgcaaccgcaacctacaccctatccgccaacctcggcttcgaccacgaagcggccactggcgccgctctgccgaccaccctgcagcccagccgcatcgcccccgatgcgctggtcggccctgcctggccggcaatctacacggcgctcggctccgtgtacgtcaagggctacccggtgattgaaggcctgctcaacgccgtccacctcgaccacctcatcgaacttgaggtgaacgaggaggacctgctcaagcacaccggcgaaaccatcaccctgaagtcttgggccgaggattacttcgagtccgcctccggccgcgtggtcaccatccacgtgacccacaccgccgccgacggcacgccgcttgcccgcgaaaccgagcgtttcgcgatccgtggccgcgtctactccgatgctttgcccgcagacgcccccgagtatggtggtgccctcctgaataaggaagcggatggctccgtcgccggacagtccactggactgtccgcctcctcgcgcggcctgcaagtagtgcagaccactccgcgccgtctgctgcgccgcgtgaaggtcgtcgccccacacgacatgaccgccttcgcccgcacttccggcgacttcaacccgatccacacctccactcgtggcgctcgcatctccggcctggccgccccgctcgtgcacggcatgtggctgtccgccaccgcccagcacgccgtgcaggcgaccgacgagaagggtgcccactacgagattgccggctggacctacaacatgtacggcatggtccagcttgacgacaccgtcgaaatctccgtcgagcgcgtcggcaaagtgcgccacggcggcatgaccctcgaagtcacctgccgtatcgacggccagctcgtctcccgcggcaccgcactggtccgcgcaccgcgcgccgccttcgtctaccccggccagggcatccagaagcagggcatggttctggacgagcgtgccaagtccgccgccgcccgcgacgtgtgggagcgcgccgacaagctcacccgctccaagctcggcttctcgatcctgggcctcgtgcgtgacaacccgaaggaactcaccgccaacggcgtgacctaccgtcaccccgaaggcctgctcaacctgacgcagttcacgcaggtggcgctcgcgacggttgcttttgctcagaccgcccgtctgcgcgaagccggcgccgacatctggcccgcctacttcgccggccactcgctcggcgaatacaacgcgttgtccgcgttcgccgacgtgattccgctggaaaccgtgctggagctcgtgttccaccgtggttccaccatgcaccacctcatcgagcgtgacgcacagggtcgctccaactaccgcatgggtgccctgcgcccgaaccagttcggtgtggacgacgcgcacgtcaaggaatatgtggaatccgtggccaaggcgtccggcgaattcctggagattgtgaactacaacctcgccggccagcagtacgccatcgccggtacgatcgccggactcaaagccctgaaggccgattccgcccgccgcgtggccgcattcggtggcaagcccgcgttcatgctggtgcccggcatcgatgtgccgttccactccacgctactgcgcaagggcgtgccggaattccgcgacaagctcgacgcgctgcttcctgcttacatcgactaccgtggccgtctggtggaccgctacatcccgaacctggtggccaccccgttcgagatgaccaaggaattcgccgccaagatcctcgaagccgtgccgtc

SEQ ID NO: 2386 - DNA, 3157 bp, Unknown
  R50_10m  MAG No. k141_5866
cagagatttctccgcctgttgggctttgagccgggcttcggtgcgtttggcggattcctggtcgacgagtcgggccgcttcatcgcgtttggctttggcctcggccacttgctcagccattccgccgtcttgggcggccaactgtttgacctgtgccaatgctttgtctcgacgggcggccagagacaggtccgattgagagatggaagagccgccgaccgccgccacgccgtgtgtgaaggtctcgccgttcttggtgacggcccgcatggcttcgccggatgccacgatgtgctgtgcttcgtcggcggtgccggccatggctacatcagccagcaggagacgcacggtgtgcacgacagcttcggcctgtgccgggttctttgcatccgggttcgcggtgacgagtgctgccagcgcgttgcctgattgcggggcggccgccgtgttctcggcgctactctcctccgactccgtgcctggctctgtggcgggatcgccggcaatgctcgcggtcagcaccacggctttgccgagcttatcttcccgagcgcgttcgagggcgtgcaacatgttgcctgcctcgggtaccacgatggcgctggcatactggtcgagcgcgtgggccacggcttcttcccagccttcggccacatggatgaagtcggtgagtcggccaagcgaggccacgtccgtgtcgcgttccaatgatccggaggcattgcggctgcctagcgtgtcggcaagcgcatcggccttggatttgagcgagatgatcttggactgtatctcgcgctgcttatcggcgagttcgttcagtcgttcgcggcattcggcgagcgttgcacgcgcggcgtccaatgcggcaccgtcatcgtcggcaatggagtccgcttcgctgcgcaatgcgtccagctgttgctgggcatcgtcgcgctgggaagtcagcaagtcgcgttgggaggcataatccttggcgcggctggtcgccagttgcacggcggattcctcgcgggcgatgagttcgcgcagtcgggcgatctgcgcatcgcgctcctgtgcggttttgcgcagttccgtcaaggtctggcggactgaggcaagcttcttctcgtcgtcggcgcgttcctcggtggccttgtcgagtgcgatgcgtgcatcggccacggccttggtttgtgccgcggcctgagactccagttcctcggctcgtttgacgagcatgccgggatcctcaccgaagttggtgacgatctggccggtgagtgaccggctgcgctcttcggccaactgggcgagcgcgttcagtcgttcacgggtctgtgagaattcatgccagtattggttggccttggcgatggccggactggattcagagctcaacgcctcgacctgttcgatgcgtactttgacttgggcgagttcacgctgggcgacggccagctggttgcgcacatcgccaagctcttgacgtaccgtgtcgcggcggttcatcgagcgttgggcgtcttcggcatacaggcgtgcttgggcgtcgcgtacggatatctgaatcgcgtcggcgcgccgggagatgcgtgcctggcgtccgagggggccgagctggcggtgaatctcccccagcaaatcgtcaagtcgactcaggttcgtttcggtattggccaacttgcgcaacgcgcgttccttgcgcttgcggtgcttcaggatgccggcggcctcttcgatgaacgcacggtgaccggacgggtcggccttcagaatcgcatccaatcgtccctgacccacaatcacgtgcatctgctggccaagaccggtatcggagaggagttcctgaatgtcgagcagacggcattgcgagccgttgatcgcgtattcggagcctccgttgcggaagatggtgcgggatatggtgacttccgtgtaatcgatatcgagcgtgtgatcggaattatcgatggtcaggctcacctgtgcacggcccaatggcgggcgggaggacgtgcctgcgaaaatcacgtcctccatcgaagtgccgcgaaggtttttggcaccttgctcacccatcacccaggtcagggcgtcgacgatgttcgacttgcccgaaccgttggggccgacgaccgccgtgatgccgggctcgaagcgcagcgtggtggcggaggcgaaggatttgaatccgcggagggtgagttccttgagatacatggcgtgagactgttttccgtgtgtccgggtatccgatgtgccttggatgcgggttaccggacgtcggcggaatcgtcggtgacggcgcctgtgtcggcgctgaccgtgccggtgccggcgttaccggcgtcactggcctgttccttgccgaggccgaggacgtcgaacacgtcgaagtcgtccgggctcaccgaatcctcgaggttgtcggcggcctcatcctcggccttgtctgccggccgatccgaatcgtccgggtcgaccgccggctgatggacggccatggcctgcctcatcgaggggctggcatgctcctcaagcatcaggcgtgcgtcgccggcggtgacgaagctgccgcagataagcacgccgtggccgtagcccacgcccagctcgtcctcggcatcgaccatgttgacggcagtctgaatcgcgtcgggcaggttcgcttccttgatcacacggtcacggccgaacacgtccacggcaatcttctcgagctcatcggccggcatcacacgctcgcgccacgagttctcggtgaccaccacggagctcaggatcggctccagaacacccagatattcctcgacctgcttgtcgcgcatcatggcgaccacgccgaccagttgcttgaagtcgtagctttcctctatggccttgcgtagggcttcggcggcattcacgttgtgtccgccatccagaatgatggtcggtgaggtgcggatctgttcgatgcgtccgggaatcttgaccgagctcaacgcctcgcccaccaagtcgccgtccagcgggccattgaccggaatcaccacttcggcggcgacgagcgcggcaagtgcgttatgggcctgatgctcgccgaacttggcgatcggcacgccctcgtaagtgccgttgggcgtggtcagggtggcgacttggccgccgactgcggccatacggtcggacg

SEQ ID NO: 2387 - DNA, 13425 bp, Unknown
  R50_10m  MAG No. k141_5912
atcaccgctcgttgctcgcttcgctgggtctgccgacgtcgtggaatggcagctcgttcgacgacgtgctcgcattgatgcatcgcgacaagaaagcccgtggcaacgaactgcgtttcgtggtcctcgacgagattggtcacgtcgtacacctcgacaacccgcccgccgaagccgtagaagaagcattccgtcgtatccagcagtaattgaacggccgtaggccgtgccgttcgccatcctctcagaaaaagtacttggctcccctctaacggaggtgccccggagtcggatctaccttcttcctccctctgatgagggaggtgccccgaaggggcggagggagagaagcacaaacaaaaggagtcccaatgaccaaagtcattgttgtcaatggccctaacctcggacgtctcggcgtccgccagcccgacgtctacggtcgtcaagacctcgacaccctgcgcaagctctgcgccgaatggggcaaggacctcggcctcgaagtcgaggtgcgccagaccgacgacgaagccgaaatggtgcactggatgcaccaagccgccgacgagaaaaccccggtggtcatgaatcccgccgccttcacgcactattcgtatgctctcgccgacgccgcgcacatggtcattgatgagaacctgccgcttatggaagtccatatttccaacccgtccgcccgcgacgagttccgcaagcgttccgtaatcagccctgtggccaccggcaccatcaccggcatgggtttctacggctacaagctcgcgctcgatgctgtggcgcacttgctgagcgaatagaaccaagccctccagccaatcccgggtatcagtcgacgttgagcccgggattcctgttccgacgaatcggacccgaatcctcgtccgggcgcgccttatggacccgaagtacgccgtgtattcgaccatatgctggccaaggcagaacgagatgggctgcctacgcacgactacaccggccacgtcatgaacacgccgggtcatacacggatgatagagtggaattccatggttagaagaacacatggtaattctcaagaacacgtcaccaagcatattttcgtcactggcggcgttgtttcctctctcggcaagggcctgaccgcatcttcgctcggtcgtttgctgcgcagccgcggcatccatgttctgcagcaaaagctcgatccgtacatcaacgtcgacccgggcaccatgaacccgttccagcatggtgaggtctacgtgaccgaagacggtgctgaaaccgatctcgacatcggccactacgagcgtttcctcgacgtcttcctgagccagaaggccaacgtcaccaccggtcagatctatcaggaagtgctgcgcaaggagcgcgccggcgaatacctcggccagtgcgtgcaggtcatccctcacatcaccaacgaaatcaagtctcgtatgcgcgcccaggcttccgatgacgtggatgtgatcatcaccgaaatcggtggtaccgtcggcgacatcgagtcccagcccttccttgaggccgcccgcgaagtgcgtcgcgatctcggcccggacaactgcatgttcgtgcacgtttccctggtgccgtacatttccgccgcccacgagctcaagaccaagcccacccagcactccgtgatgatgctgcgtcaactcggcatctccccggacgccctcgtgttgcgttccgaccgcccgctcaaccagtccatcaaagacaagatctccctgatgtgcgacgtcgatgccgaaggtgtggtcaactgcgtggatgcgccgagcatctaagatgtgccgaagattctgttcgaagagggccttgatgcttacgtggtgcgtgagctcggcctgccgttccacgatgtcgattgggatgaatgggcagacctgcttgagcgcgtccaccaccccaagcacgaggtcaacatcgccatcgtcggcaagtacatcgatctgccggacgcctacctgtctgtcaccgaggccatcaaggccggcggctttgccaactgggccaaggtcaacgtcaagtgggttgcggccgaccgttgcgaaaccaccgaaggcgcggccgccgctctcgacaacgtcgacggcatcgtgatccccggcggctttggcattcgcggcatcgacggcaagatcggcgccctgaagttcgcccgtgaaaccaagctgcccgcccttggcctgtgccttggtctgcagtccatggtcatcgaatactcccgccacgtactgggcattgaagacgcgaactcttccgagttcgagcccgattgcgccaacccggtgatcgccaccatggaagagcagaaggacatcgtggccggcaagggcgacatgggccacaccatgcgtcttggctcctacccggccgagctggaggaaggctcgctggtcgccgaactgtacggcaccacgcatgtcaccgagcgtcaccgccaccgttacgaagtcaacgtggcctacaaggatcgtctgcgtgaaggcggcctgcgcatctccggccagagcccggacggcgagctcaccgagttcgtggaactgccgcaggacgtgcacccgttctatgtggccacccaggctcacccggagttcaagtctcgcccgaccaagccgcacccgctgttcgccggtctggtcaaggccgcgctcggccatcaggcggcccgctgaccgtggatcccgcgcggtcggtccgcgcacgatgaaggcgtgacggcacggcatctcaggatgcttcgccgccacgccttcgccgtttggcgccatccgtgatgccgcatggcccgatggcgcccgcatgtaatcaagcccacagccaatatgcgtcagggcagctagtgtttgcacttgggttctgctaggttttcataggattaagtgtgatacaaggaaggcaggatggtgaccgaaaacacagcaccaaacgccgccgctgacgtggagatgagccagtatgtggctgatcgtacccgcgtcaacgaggacaagatcaagaaggatgacgagatcatcagccagttcggcgactacaactatggttggcatgattctgatgccgccggcgaagccgcaaaacgaggcattgatgagaacgtcgtacgcgcgatcagcgccgacaaaggcgagccgcagtggatgctcgacatgcgtctgcgtggattcaaggcgttcctcgaaaagcccatgcccgattggggtgtggatctctccggcttcaacgccgacgacttcaagtactacgtcaagccgatcgagaagcaggcgaagtcgtgggaggagctgccggacgacatccgcaacacctacgatcgccttggcatcccggaggcggagaagaaccgcctcgtctccggcgtggctgcccagtacgagtccgaggtaatctacaactccattcgtgaggacctgaagaagcagggtgtgatcttcgtcgacacggacaccgctgtgcgcgaataccctgaactcgtcaagaagtacttcggcaccgtcgtgcccccggaggacaacaagttcggcgccctcaacaccgcggcatggtccggcggctcgttcgtatacgtgccgaagggcgtgcacgtggacatcccgttgcaggcatacttccgcatcaacaccccggccatgggtcagttcgaacgtacgctgatcatcgcggacgaaggctcctacgtgcactacgtggaaggctgcaccgccccgatctggtccgaggactcgctgcacgccgccatcgtcgagatcatcgtcgagaagcacgcccgcgtgcgctacaccaccgtgcagaactggtcgaacaacgtctacaacctcgtcacccagcgtgcctacgtgcgtgagggcggcacgatggagtgggtggacggcaacatcggttccaaggccaccatgaagtacccggcctgcatcctcgccgaaccgtacgccaaggcatccaccatgtccctcggcttcgccggcaagggccagtaccaggacacgggcgcgaagatgattcacctcgccccgcacaccagctccaccatcgtcgccaagtccatctcgcgcggcggcggccgctccgcctaccgcggtctggtcaaaatcgtcaagggcgcgtacggttcgtccaactcgaccgtgtgcgatgccctgctggtcgacgacttctcccgctccgatacctacccgcacgtcgacgttcgcgaagacgacgtttcgatggcccacgaagccaccgtttccaagatttccgaagaccagctcttctacctgatgagccgaggactcacggaggaagaggcacgaggcatgatcgtgcgcggcttcgtcgaaccgatcagccgcgagctgccgatggaatacgcgcttgaactcaacagacttgtggaacttcagatggaaggatcggtgggctgattccgatgaccgacaacacaacacccgtcaaggaaatcaagattccggtcgccgaccccaacgacccgtacgcgattccggccgccatgccgtcctccgtggaccatgccgtgcgttcgttcaacgcaggcgactacccggagcccagccgcaagcaggacgaatggcgctacacgcctatcgagcgcatcaacgagttcttcaccgtgttcaagccttccggcgaaacgcagatcgaagtctccatgattgacggctcgccgttggccgaaggcgtgaagctcagccagatcaagctcggtgagggcctgtccggcactgtgtccaagcccaacgaccgcgtctccgcagtcgaatgggaatccggccacaccgcaaccattctggaactgtcaggtgagatcgcccagcccgtgctcgtcaaggtgcacggcgcgggggaggacctcgacgctttccatctggtgatcgccgccgccgacaaggctcatgcggacgtcgtcgtggaacacgacggtgacgcacgactggccgaaggcgtggaaatcaccaccggcaaggactcgcacgtctccaccacgttcgttcaggaatgggccaaaaccgccaagcatgtggccaaccaccgcatccacgtcggcaaaggcgcatccctgcgccactccgtcgtgaccttgggcggcgacatcgtccgcatccgcatggatcaggacttcggcggcgaacaaggcgacctcaacatgctcggcatctacttcgtggaccccggcgaacacatcgaacaccgcacgatggtggtacacaaccaccccgactgcaagtcccgcgtggtctacaagggcgcgcttgacggcaagggcgcgcactccacttgggtgggcaacgcgctcatccagcccaccgcccccggcaccgactcctacgagctcaaccgcaacctggtcctgaccccgggtgccatcgccgattccgagccgaacctcgaaatcgaaaacggcaacatcatcggtgccggtcacgcctcttcggtgggccgcttcgacgacgaggaactgttctacctcgaatcccgcggcatccccgaaaccgacgcccgcaagctcgtggtgcgcggcttcttcggcgaactcgtcgaggagatcggcattcctgccatctccgaacatctgatgaccgtgattgaccgccgactggcccgtggcgaaaacgacgccatggcacaggtcctcgaagacaagtaagaacagcatttttaggagcacaacaatgtcaacactcgaaatcaaggacctgcacgtccacgtcgaaaccaaggaaggcatcaagccgatcctgaagggtgccaccctgaccgtccactccggcgaaacccacgccatcatgggccccaacggttccggcaagtccactctcgcctacacgttggccggccaccccaagtacgtggtcgactccggcgaggccctcctcgacggcaaggacatcctcaagatgactccggacgagcgcgccaaggccggcctgttcctggccatgcaatacccggtcgaagtaccgggcgtgtccatgaccaacttcttgcgcaccgccaagaccgaaatcgacggcgaggctcccggtattcgccagtgggccaaggacctgtccgcagccatgaagcgcctcaagatggacccgaagttcgcctcccgttccgtgaacgaaggcttctccggcggtgaaaagaagcgcgccgaagtgctgcagctcgaactgctgaagccgaagtttgccatccttgacgaaaccgactccggcttggacgtggacgccctgcgcatcgtgtccgaaggcgtgaaccgtgccaaggaagccaaccagttcggcatcctcatggtcacgcactacacccgtatcttgaagtacatcaagccggacatcgtgcacgtgttcgccgacggccacttcgtcaagaccggcggccctgagctggccgacgaactcgaagagaacggctacgaccagtacctgcccgagggtgctgattccgagtccgcgctggcctgagtccgtgaccgtgggagtctgacatgccctatcctcgacacgctccgggccgctcaggccaagtctttacggtcgcgaacaggccatgtccgactcccactcgtttcgtacaattgttacgtaagtaggggaacataatggttgattttaaggagattcggggcgagttcccgattctgaatcaggagattcacgggcacccgctcgtgtacctggattctgcggccacctcgcagaagccgaatgcggtgatcgacgccgaggcgaacttctaccgtacgatcaacgccggcgtgcaccgcggtgcccacgagctggcggcccgtagtaccatggctttcgaagaggcccgtgccaaggtcgccaagctggtcggcgcgaatgcagcggaaggcgaagaagagatcgtcgtcaccggtggtgccacggccggactgaacctgctcgccaccgcattcggcaatgcgtcgctgggccgtgggggagaagccgccaagcgttttgccctgaagccgggcgatgagatcgtcgtctcgcgtgcggaacatcattcagtgctgctgccattccaggagctggcctaccgtaccggtgccaccttcaagtggatcgacctgaccgaggacggccgtgtgcgtacggacaacctcgacgaagtcatcaccgaacgcaccaaggtcgtggccgtcacccacgtgggcaacaccacgggtgccatcaccaacatcgcccctatcatcaagcgtgcgcatgaagtaggttcgatcttcatcttggacgcttgccagtccgtaccgcacctcaaagtcgatttccatgcgcttgatgtggacttcgctgcctggagcgcgcacaagatgtacggtcctaccggcgtcggtttcctgtacggtaagcgcgaactgctcgaagccctgccgccggccaacttcggcggctccatggtcgaactcgcctacatggaccacgaggcccaatacatggcccctccggcccgcttcgaggccggcacccagccggtcgcccaagtggtggccgcaggcgtcgccgccgaatggatgatgaacatcgggctcgagaacatcgaggcccatgagaagaccatcgccgccgaactgctgaagctcggcgacatcgatggcattcgcatcctcggaccgcgcgaaaacgtggaccgcatcggtaccgtggcgttcgacgtggccggcgtgcacccgcacgatgtgggccagttcatcgacgcccagggcatcgcgattcgcgtggggcaccactgcgcccagccggtgcaccgccacttcggcctatacgcatccaaccgtgcctcctccggtgtctacaattcggtcgaagatgcccaagcattggtcgaagcggccaagggcatccgtaagttctttggagtggagtaaaacagaacaccatgaacgaattcggtatgagcggggatgacctcgaacagatgtaccaagaggtcatcctcgaggcgtcgaaacatccgcatggcaaggaatcctttgcgcccaacgcggcggtcgaacagtccgcggacgcggcggccaatgtcaccgtgcaagccagccacgaatactgcacgcccggtgaatcgcaccagttcaacccgacctgcggcgacgaggcgaccatccatgtcgaagtctccgatgacgaaccgcacaccatcaagcgattggtgtgggacggccacggctgctccatttcgcaggccagcctgtcggtgatggtcgatctggtgaacggcaaaaccgtggacgaggccatggatctggaacagacattccacaagctgatggaatcgcgcggtgccggtctggacgacgagaacctggaagaaaagctcggcgacgccgtggtattccaaggcgtgtcgaaataccctatgcgcatcaaatgcgctctgctaggctgggaagggctgaaggactccatcgccaaagccctcgctgcaaagaactgaggaaatatgtccaacgataatttggttcccgaaccacagccgtccgttttcgatgccgtcaacggcgtcctgcaggacgaggaggccgctcgccgcgtgatggccaatccggccttggccaagggcttcccgaacggacgcccgatcgagcactctgctgcgtccggcgatgacacctgtgcgtgtggcggtcaccatggcaaatgcggttgccgggatgacgaacagtccgatggcagcgagattccgatcaaggcgattgacgatatcggccgcgccactgccgaagacgtgcgcgaggcactgcatcaggtgattgatccggagcttggcatcgacgtgatcgatttgggtctggtctacggcattgagatcgatgagctaggccgcgccattattacgatgacgctgaccacgccggcctgcccgctgaccgaccttatcgaggacgaatgcgcatccacgctggccggtctggtcgaggagttccgcatcgactggacgtgggacccgcgctggaccatggagcgcatcacgcccgaaggccgcgaccagctcgccgcccttggcttcaacttcgacaacatgccaaagtactgatagcgcttagtaagctccctctgatgagggagctctatacgagaaaagccccgcatgatgcggggcttttccaagtctggactggtcaatcagtcatcgacgatggtgttcttcgggacaaccgtaatgccgtccggcgtgacggtgaagccacgggccagatcgtgctcggtatcgatgccgacagtggagttttcggtcaggaccacgttcttgtcgagaatcgccttgtacacgcgggcgcggcggttgatgattacaccgtcgaacagtacggaatcgacgatctgtgcccacgagtggatacgcacattgggggagagcacggagtggtgcacttcaccgccggagacgatcacaccgggggagacgatcgaatcggtggcgtggcccagacggtcgcggccggcgtgcacgaacttggccggcggcaggttgccggacatcgtgtaaatcggccaatcctggttgtacaggttgaactcgggcacataggcgatcagatccatgtgcgcatcgtagaactgcttaatcgtaccgacgtcgcgccagtaagcgtgatcagtgaccgtggaacccggaatctcgttcgagttgaagtcgtagacgccggcctcgttgcgggaagcgaagtacggggcgatgtcgccgcccatgtcatgcttggtgtcggcagccttctcatcgagagccagagcctcgaacagggccttggtgttggcaacgtagttacccatggaagccagaatctggttcggattgtccggcagaccggtggtggtggccggcttctcctggaagttcctgatcatgttcgggtgatcgggatcgacctcaattacaccgaactggttcgattcctcgatgggctggcggataccggccacggtgaactcggcgccggactcgatgtgctgctgtaccatctgctcgaagtccatgcggtagacgtgatcggcgcccacgatcaccacgatgtccggctggacgtcctcgatgatgttgatggtctggtagatggcgtcggcggagccgaggtaccagtgcttgccgagacgctgctgcgcgggcacaggggagacgtacgagccaagcagcggggagaaacgccagacctgggagatgtggcggtcaagcgagtgagacttgtactgggtgagcaccacgacctgacggtacccggagttcaccagattgctcaacgggaaatcgatcagacgatacacaccaccgaagggaacggcgggcttcgcgcgatcgcgggttaacggcatcaggcgggtcccctcaccacctgcaagcacaatcgacagaatcttgggattcttggccatcgtaactgtcctctctgttactgagcgtctttcgacaccgcactgctgggccggatgcttccttgcattcggtttacatagttaataattgcagaaaaattcgaacatgcaaggctttcgcccccccgcgtgccgtgaacttgcgatgaacagtttcgtagatttgtttaaggatccggccttttcggagcgcgtgcgattccttagcgtgtcgcgtagaacgccactgcgctggatgccgccacgttcagactatccacgccgtggctcatcggaatcttcacggtcaaatcggcgcgggcaatcgtatggtgggacaggccgtcgccctcggtgccgaagatcagcgcgagcttgtcgatatgcgtcggatcttcggcaggcgcgtgcagacggcgtgtcagctcgtccaacgaaatcgaacgatcctccaatgccatggccacggtggtgaagcccagcgacttcaactcgtcgatgccctggaacggccagtaatgcttgttttcggtaccgtcgtcgttgaacccggtgatacgggtccacggaatctggaatacggtgcccatcgacacacgagcggctcgtcggtacagcggatcaccgcaggagggtgtggccagcacggcatccacatcgagcgcggctgccgaacgcatcagtgcgcccacattggtgtggtccacgatgttttccattactgccacgcggcgggcgctcctgcagacctcggctacggagggcagcggccagcgtcgcatcgcgcatagggcgccgcgatgcagacgatagccggtcagtcgcttgagctgctcgggtgaggccacgtagacgggaatgtccgtgccccagcgcccgtcgatgaagtcgaaggtgtctttcatgccctccagccaaggttcctcgaccagcagtgacagcggttcgcggtcagcggccagcgcgcggtcgatgactttgggggactcggcgatgaacacgcccttggctggttccaagcgattgcgcaactgcatttcggtgaggctcacatacgcttcgacgcgcgggtcgtcaacggtgtccagcgtgatgaactgcattggtggcctttcgtgtgtgcagataacgaaaaaccccttgcaatgcaaggggtttatctgtgcccgagacgggacttgaacccgtacgcccgtataaaataggcactagcacctcaagctagcgcgtctaccattccgccacccgggcaggtgtcgtttggacaacgagtaaatagcttagcatgaaattacagggatgcaattcgcgcgtgtgcccggcgtgtcgcgtgtagccttgaagtcatgactgatgccctttttcttttcgacccgcaggtcgacgatgtcccggtgaacagcgacgaacttcacgccggctggaagctaaccctgcccgcgcacatcaagcgccatgctgtgcaggctatgcgactcaaggcgggggacagcctgcaactttccgacggcaacggcttgagaatccaggcagtgatggccgatcctgaagccggacttgctgaagttgtggaagtggggcgcgaacccgagccgctcacccgtttggcgctgattcaggcattggcgaaaaccggccatgatgagcaggccatcgatatggctacgcagattggcgtcgaccaagtggtgccatggcaggcggaccgatccattgccaagtggaaggtcggccgtacggacaagaagtggaattcggtactggatgccgccaccgagcagtcgcggcgcgcttttaagccgcaactggaggcgtgcgcgtccagcaaggaggtcgtggccatctgccgcagggcctgcgtgcatggcgatgtggtgattgtgctgcatcaggatgctaccgatacgtggtccggcgtggaggagaaggttacgcagttggtggaacgcacgctccaggacggccggccgcggactgtcagtgtggtggtcgggcctgagggcggcatcagtgagcaggaggtagcagatttcgtcaaggccggagcggtgagctgcgtactggggcacaatattctgagagccgcgacggccggtcctgtagcgttgtcgctgttgtctcgggtgttgggacgttacgagtaacgcccacgcgctaagctggtgcgtagcaacatcaaaccaaggagcatgatgagcgaatccgacgattgcctgttctgcaagatcatcgcagggcagattcccagcagcaaggtctacgaggacgagacgacctacgcattcaacgacatcaaccccaaggccaaggtccacgtgctcgtggtgcccaagaagcactacgccaacgtcgccgaacttgccgccgacgacccgaccgagctggcccacatcgtctccatcgcgcagaacatcgccgacaaggaatttcacggcgcctaccgactggtgttcaacaccggtctcgacgccggccagaccgtcttccacgtgcacgcgcacgtgatgactggcgaaaagctcgacgagtagtaggggaatatccgcttcgtggcaacgactacacgtaccatcaccatcccgccccaacttgaccccgtcgccgtgctcggcccggttgacgaggtcattcgcgaggtggagcgcgcctttccggacctgacgattatcgtgcgcggcaaccgcgtggcgatcgtctcccgctccaagcagaccgaagcccaggccgcacaggccgaggatttggtcaacaccatcatccaagccgcctacaccgcgcctatggacgccgacaccgtgcgtcgcatgctcgaccagaacgtgctcaagaaccacgtgcgcctcgaacatcccggtcacggcccggtgcgtgacaaactggcgcaatcgacctcaaacgaacgcgcccatgcacgttctgccggctcccacgacccgacgtaccgcaagcccacggttcccggcgtcatcacctttgccgccggcgtgccggtccgtgcgaaaaccgccggacaagtggcctacgtgaacgccatcgaatcgcacaccatcac

SEQ ID NO: 2388 - DNA, 2563 bp, Unknown
  R50_10m  MAG No. k141_5928
ccggtcgcttgttcgatggcggctggcacgtcatcgatcgcgtagttgaaccacatggattcgatggcagcatgaggggtgttgatgaagcagggacgcacatggctctcccccgccattccatggccgagcatgatgccttgggccctcatacgggcttcataccgggcttgttcgatggcgtcggtcaccgggtggtgacgcaaatcgctggttacgtacacgtccgcaccggtggcacgcacctcgttgaacagggagtcaccggagccaggcagaatggccacatactgaacaaaagtgtccgaatcgccgcatacctggatgccgagcgcggtggtcatgccatgatcggacacttcgtcgaatacacgctgagcgaaatccttcagggcaacaggcttcggcaaacgacccacacgccccaagccgaccggatgagaggcgttggcatcgtcaatcggcacgagtggtttctggtcgatgagtccgaagtagtcggccgccgcctgccccacgccgcgatacgcagcgtcggcattggtgtgccctacccacagcccgcagccgtgctggtagagcctgcggacgatgtcgccccggaaaccgagtccgctcgtctcgtgtacggaacggaagaacaacgggtgatgggtgatgagcaggtccgcgccggtggcgatggccttgtcaatgatggcggaggtcgggtcggcggcgaacacgatgcggtgcacgtcgtggctcagatcgccgacgatgagacccggctcatcccattcctcggcgtagcgcaatgggtacagggtctcgagaacgtcgatgacttgcttgagattcggcatatgtcccattgtagtgggctattgcggcaagggactcattctgcaattgcggacaagccatgctcgtgctcttcattgctcgactatcggctcgctttcgcctacaaacaatccactggactgtttgctcaacggctcagcctcctcacccgaggggagctagaaattgtcagtgtgcggcgagctgccagtcggaaccgataccgcacgatacgtccagcggcacggcaaggtcgacggcgtgttccatggcgttgcgtaccagttcggtgacctggtcgccttctcccggcgcgatttccactaccagttcatcgtgaatctgcagaatgatacggctcttgacgtgggcctctgccaaggtctgctcggcgcgaatcatcgcgatcttcatgatgtcggcggcagatccctgaatcggtgcgttgagtgccgcacgttcggcggcctcacgcgcaacacgattggtcgaatgcagggccgggaagtagcgacgccgtccgaaaatggtttccgtataccccttctctcgggcattggccaccagcgattcaaggtaatcgtgcaccttgccgaaggtatcgaaataccggtttttcaacgcttccgcttcacgtggcgcgatcttgagctgctgggcgagaccatacgtgctcagaccataggccaatccgtagctcatggcttttacgtggctgcgctggtcgccggtgatctggtcgaccggcagcttgtagaccatcgaggccacgtatttgtggaagtcggctccggagcggaacgcttcgatcagcgcctcatcaccggacagatcggccatgatgcgcagctcgacctgtgagtaatcgcagctcatcagggcctcgtacccctcccccggcacgaacacgccgcgaatctcacggccggcggcgttccgattggggatgttctgcaggttcgggtccacggagctcaatcgaccggtggcggcaacggtttgctcgaaagtggtgtggatgcgctcatctgatgtgttggtggcatcgatcagcgtttggacgatctgcttgagcttgttgatctcgcgatggcgcagcaacgctccgaggaaaccgttggcccgctcattgtccactgatttgacatacagatcctgcaatgcggccgcattcgtggtgtatgagccggacttggtgcgtttggtgggcttcaaacccatatcttcgaacagcaccttctgcaactgcttgggactttgcaggttgatttcggtgccggcatactcccaagccatttcctgcgcctgacgagcctcggcggcaaactggtcacgcatggaaacgagtcgaacgctatcgactttggctcctgtgtgctccatgccgtgcagcacgcgggaaacaggaagttcaatcgcgcgcatcagccagcattgttcacgctcgtcgataatcggcccgagcgtgacggcgaggctgcggataatggccaaatcgcgcagacgatgttcgttcggatcttcttcgacctgatcgtcatcgaagtccaacgtgccttgcgaaggctgttcggtttcggtgaagtggatgtcgaggaagtgctcggccgcctgcttgaggctatcggcgtggaaatccggttgggccagatacccggcaagcttggtgtcgaacatcggcaggtccatgtcaagatctaccgcgcccagaagatgcagcaactctttatacccatgc

SEQ ID NO: 2389 - DNA, 3270 bp, Unknown
  R50_10m  MAG No. k141_6117
agagcaacggtatatcggcattggcgatctgccctttggacgcgcgtggcagcaacgccgcataggcaccggcctgtgcggcatgcagtacatcgggttcctgctcatgcgtgcagatgaacagcgagccgggaatcacggtgtccacggcatcgctgagtgaggtaatggtgacattggtggcgaagggtggatcgacttcaaaaccgtaccgttcgaccagcattcccagggtcacccgctgggcgatggattcgctcactgcactcatgggctatcgcctttctcccctgatccttaccacgtgactggaatagcatttttgcgtggactggagacaggcacctcgtatttctgcataaggaactcacaaatctgtgcggaaacagggccggccgtcagaccgccgaacacaccattcggatccttcatcaccacggtgaccgcatagcgcgggttgtccgcgggaatcaccacggaataatcggagataatggacgagagcgtaccatccgagccctgcacctctgcggtactggacttggcggccatgcggtaaccatcgaccttgacgaacttgttgtagccttccgccactgattccatcgcattcatcatgtccgatgcgaccttttcatccaccacgcgggtggcttcgcccttcttggtctcagtggtcttgccattggcatcggtggttgatttgatgatcgactgctgctgcttgacacccttgttcgcgatggtggccaccacgttgttgagctgcagggcgttgacggcgtagccctgaccaaacaggatggtgttgcgcgtacgcagatcccacgccgaagggttggtgagcagaccgctcgattcaccgggcaggttcagtccggtcggttgtccgatgccgaatttggtcaggtactcgtagcgttgctcatccggatagttctccccggccataatcatgccgacgttcgatgagttctgcagaatgccggcgagcgtccagcgctcagtgccatggtcgaatgagtccttgtaggtctggccctcctgtgtgatgtggtccgggaccgacaattgatcgctcatcttatgcagtcccatctgcagatagccggacatggagataaccttgcccaccgaaccaggctcgaaggtttcggacacggcccgagacgggctcatcttcgccgcatcggtaccagcctgtacttcatcgctatcggccagtgcgagaatctccccgctctggacatcctgcaccacggcgatcgcccacgctgcaccatacttggattcggcctccttcaagacctttttgacataccattgcacatcacggtcaatggtcagggtgacatcgtcgccatttttggccgccaccgattcggtcatggtgccgggaatctcttcgccgccattaccacgctggtaggtttcatggccatcggttccggtaagcgtcttgttctcgacctgctcgatgccggcgacgccatcgccgttgtcgttcacgccgccaagcagcgcgcccatgagatcgccatccgcatacagtcgttcactgctcagctcaccccagacaataccgcccaggtgcaacgcctcgatgctgcgcttgacctgcggagtcacatctttcttcagaatcacatactgcccggtaccggacagatcagcgcccagttccatggcgttcatatccaggactttggccagcagtcggcccacggccgccgctccggtagcgcccacgggtttgccgtcaatttcgtggcagtaatcacgggtgttgtcattgcaagtaatcggctcgaactcctgtgcagcctccggattggcgacgatagtataacgctccacgctttgagcgagcacggagccgttggcgtcgaggatacgcccacgcttggcgctcaacgtcacggtcagggtgcggttagccgtggccgcttgtgcggtttgacggccgccgatgagctgggtggaggccagctgaatcacgcatgccgacgccaccaacgccaatgcggcgccgatggcgatgcatttgaacgcgaaggtcttgaccttggcgaactctacgatgcgacgaatggtgttcactgggttccgcctttgttggactggtatccgcttaagtcgatggacactgatcccggctgcgggaccatgcccatgtcgctggccttgtcgggcaggttcgcgactaattgatcgagtttggcctgatcgtcttcgatatcttgggtaagtctgttgatattggtttcgatctgtgccgcctcaaacgagttctgcaccatctgggtacgcagcatcagcgcgccgaacaaggtgccgacgaggaagatcactgcgatggccacgtgcaccagcggtgcgcttcttgttctggtccattcgatgacccgtccgacgacattgccccgctcgtctccacgcgggttggagaccacccgcagctcaggtcgggaggaggactgatgcttggtgtgcggtcggttcgaggccggagccgcgttcgatcgaatgctacgtgcagttgccatatgctgttatcccctccttgtacgaattcgtgccgtgtttttggctctgcccggagacgcggagccttgtatcttgacgtcattcaggccctgcgcggtttgcgtaaagcgtttcctccatcgtgacggaatctcacggctgacttccaccgcccgcaaccgcaccgaagccgatctcgggttggctgcgatttcatgttcgtcggccttgacggcacctcgcgtgagatccgtgaaaaacggttgggcatccggcggtatgacaggcagaccagccggaacatccactcgcagcccttgtgccatgaacgatttgacggttttgtcttcgagcgaatgataggactccaccaccagtcgtcccccgacatgcagtcggttcgcggcttgcggcaatgtggaggcgagcttgtccaattcgccgttgacttcaatgcgcaacgcctggaagacgcgtttggcgggattgcccgccgggcggtgggcttgcggcaccacttcatcgaccagacggttgagctgtgcggtggtggtaaacggctccttgtctcgacgtgccacgatggcgcgggcgatctgacgcgagaaacgctcttcaccgtattccttgaatatacggaccagttccgccgcatcataggtggcaagaatccgttcggccgtcaacggctggctgacgtccatgcgcatatccagcggcgcatcatgcgaataggagaagcca

SEQ ID NO: 2390 - DNA, 11998 bp, Unknown
  R50_10m  MAG No. k141_6167
gctcctccaccgagcactccgcctaccagaccacccacaacccgtgggataccgagcgcgtgcccggcggttccggtggtggctccgcctccgcggtcgccgcattcgaagccccgctcgccctcggcaccgacaccggcggttcgatccgtcagcccggcgccctgaccggcaccgtgggcgtcaaacccacctacggcggcgtctcccgtttcggggccatcgccatggcctcctcgctcgaccagatcggcccggtctcccgcaccgtgctcgactccgcactgctgcaggagatcatcggtggccacgacaagcgtgactccacctccatccccgaaggcccgcgtccgatggtcgccgccgcccgcgaaggcgccaagcgcgatctgaagggtatgaaggtcggcctcatcaaggaactcggcggcgacggcttccagcccggcgtcgaggcccgcttcaacgaggccgtcgacaagctcaaggagatgggtgccgaggtcgttgaggtctcggttccgcacatcggctactcgctgggcgcctactacatcatcatgccgtccgaggtcagctccaacctggcccgttacgatggcatgcgctacggcctgcgcgtgatgccgccgaccggcgtgcctcagaccgccgccaacatgatggcctacacccgtgaggccggcttcggcgacgaggtcaagcgccgtatcatcctcggtacctacgccctgtccgccggctactacgacgcctggtacggttcggcccagaaggtccgcacgctgatcatccgggacttccacaacgccttcgagaaggccgacgtactcgtggcccccaccagcccgtccaccgccttcaagttcggcgagaagatggacgacccgctggccatgtacatgaacgacatcgccaccattccggccaacctcgccggcgtgcctgccatgtccatcccggccggcctgtccgacgacggcctgcccgtcggcttccagttcatcgccccgcagcagcgcgacgaagtcatgtacaagccggctgcggccctcgaagccgcgctggaagacagctggaacggcccgatctggaacgacctcaagaccccgtggcttgacggtctaggcaagtgagcatcggaaggaaagaaacaacatcatggctgaaaaactgatgaagtacgccgatgccaccaagaagtacgatgtggtcttcggtctggaaacccatgtggagctgtccacgaacaccaagctgttctgcccggcccacatcgagttcggcggcgagccgaacaccgagctgaccccggtgagcctcggcctgccaggctccctgccggtgatcaacaagaccgccgtcgattacgccatcaaactgggtctcgccctgcactgcgaaatcgccgagtggagccagttcgcccgcaagaactacttctacccggacatgccgcgtgactaccagatctcgcagtacgacaagcccaccaacggcaatggctacctggacgtcgaactggaagacggcaccgtgttccgtgtgccgatcgagcgcgcccacatcgaggacgacgccggcaagaacacccacgtgggtggcgccgacggccgtatcgagggcgccgatcattcgctggtcgactacaaccgcgccggcgtgccgctgatcgagatcgtcaccaagccgatcgagggcgcgggcgatcgcgctcccgaaatcgccggtgcctacatgcgcgccatccgcgacatcgtgcgcgcgctgaacatctcccacgcccgcatggagcagggcaacatgcgcgccgacgtgaacgtctcgctgcgtccgagcccggacgccccctacggcacccgttccgaaaccaagaacgtgaactcgttccgcggcatcgagaagaccatccagtacgagatccgccgtcaggccgcccgtctggacgacggcaaggagattctgcaggagacccgccactgggatgaggctacgcagaccaccgccggcggccgtctgaagtccgatgccgacgactaccgctacttcccggaccccgacctcgtcatgctccacatcaccaaggagcacatcgaggagatgaaggcccagatgccggaaatgccgcgtgagcgccgcaaccgcctcaagtctgagtggggcctgagtgatctgcagatgcgcgacatcctcaacgccgacgccctcgacctgattgaggaaaccgtcaaggccggtgccaaggccgccggtgcccgcaagtggtggctgggcgagctttcccgcgaagccaacgccaagggtatgtccctcgaagagctgccgatcaccccggccgatgtggccgaggtcgagaagctcatcgcctccggcaagctcaacgacaagctcgccaagcagaccgtcgaaggcgtgcttaagggcgaaggcactccggatgaagtcgtcaagaagcacgactacaagatcgtcgaagacaacggtgccatcgaggcggccgtcgacgcggcgttcgaatccaacccggatgtcgtcgagaagctcaagagcggcaacatgaagccgatgggcgtgatcatcggtgccgtgatgaaggccacgcgcggtcaggccgacgccaaggccgtcaccaaggtcgtcatgggcaagatcaagggctgattagattcactggctcccgctggtgggagctgtcgaacggagtgagactgagggtggtcgccatgtacggatgaccaccctcagtccgcttcgcggacagctcccgccagcgggagcacttatttgtagggaaatcctccagttcaaattcgttggacagctcccgccagcgggagcctttattgattctgtaagaaagtcgtctcagagcatttccagcgttcacccagtcgagtaagatatgttcggcactggaccgtgagccgaaacaagccgaaccgggggatgtataccgatgaccgcaaccaacgagacgctgagcatggctaccgaagcgcaactgaagcgcgatctgccacagagcatcgtcattccgccaatccgtggcgaaatggtgcacctgcgccccgccaccgtcgaggacctggctcgtttggatgaacttgatgccttctatggcgcatccaagatcaccggcaaggatgcggtcaccgaacgcgccatcgtacacacatgggtccgccgctcccaagcctgggaagccggtcaggcacccgccgaatccggcgtgggcgacccggaatcccgccgcaccatcgcatgggccgtattgactgacgccgaccatgacgatgacggtcagctcgatgcggccagcaccgataatgtcatcggcatgattttcctcatcgacatcgacggctggtccaagtccgcccgcatccagatcatcttgggccgtgagtaccgtggccgcggctactcccgtgacgccatgccgcgtgtgatgacttacggctttgcgcccgaaccggccggcctgggcatgcaccgcatctgggtgagcgtgccggaaaagaacagccgttcgatttcggtctatcagtcgctcggcttcgtgccgtccggcacctcgcgcgacgcgttgtgggatgtcgaaaacaacaaataccaggaccttatcgtcatggacacgttggtcgacgagtacgatccgattcgttcgcttgacgcttttggcatgcacttgattgaggacaacccgggtgtcaaggaagcgctgtccgcgcgtgagcattccatcgccatccagcagaacaagccggaacccgagccggcacagcgtggtgaggcagccgccgtcacgacgagtgacgtgcagtcccaggcccagacgccggcggccgcacagccagtcgagccacaggccgggcaccacgacgatacgcagaagaacacgcgccacagtctcgaagaggaaagcaactggccgtacggccaggcggaacgcaagccctcaaaggaagcatggtggcgtacgctgggccgcggccgcaaacgcgatacggaaagtgagtgagtaaacaagcatgagtgccgaggatctcgacaattacgaaaccgacgccgaactcgcgctgtatagggaatatcgtgacgtcatcaagctgttcacctatgtggtggagactgagcgtcgcttctacttggcgaataaggtcgatttcaacgtgcgttccgctggtcaggacgtgtatttcgatgtgcagctgactgacgcatgggtatgggatgtctaccgttccagccgtttcgtcaagtctgtgcgcatcgtgaccttcaaggacgtgaacgtcgaggaagtccagaaaaccgatatcgacattcccgacgatattcactgacaggcaatcgtctgatacagcctgtattgacaatgcgcggcattccgtcatcttacggcggggcgtcgcgcattgttcatacaacgcatagcaaaagttcagattcgtaaccttgccatcgtgtgtcttgtttgcttgcggttgatagaagatgatgctgcttgcacttgcaggaatctcgctgaatctatggaaggttcgtcgctgacgaattagcccaagaccaaaccgattcgccgcgctgtgcgtgacgcagcgttgccgaatacccctacctcacgattggatgcgtcgcctttctgctgatggaagacggcgcatcggtcgtatatcgggagaattctgtaagcattcgctcatctttcggtgtgcgattccggggcttctagtaaactgtctctgattttgcgtttataaggagcataatgaccgacaagcaatccgtagtgattatcggcggcggtccggctggacttaccgccgcatgggaactcgtcaaggatggcggcgcggaaaactatgacgtgaccgtgctggaggggacccgcgaattcggcggtatctcgcgcaccgtgaagcacaacggcaaccgcatggatatcggcggccaccgtttcttctccaaagacgaacgcatcatggattggtggaagaccgttctgccgttgcagggcgcaccctcctatgatgacaagaagctcggccgcgaccacgacatggagccgggcggccccgatccggagacggaggacaaggtgatgctcaagcgccaccgcgtgtcccgtatcttctggaaccgccacttcttcgattacccgatttcgctgagccccaacacgttgaaggccatgggcttcaagctcaccatggtggccggcttcagctacctgaagtccatgttccacaagctgccggaagacaacctggagaacttctacatcaatcgtttcggccgcaagctgtattcgatgttcttcgagggctacacggagaagctgtggggccgccacccctcccagatctccgccgactggggcgcccagcgcgtcaagggcctgtccatcatgggcgtgctcaagaacgccttccagaagcttagccccaggaagcgctccaacgcggaggtcgagacctcgctgatcgaggagttctggtatccgaagtacggtcccggccagctgtgggagaccgtcgagtccaattgcgaggccgccggcgtcaaggtgctgaccgacgccagggtggtcgaggtccgccagaccgatggcgccgtgtcttccgtggtgtacgaggattccgagggcaaccgcaccgagctttccggcgaccagttcatctcctcgatgccggtcaaggacctggtcaacgccatcgacgcggccggcgacgatcccgaggccgctgattccaagcccgccccggccgatatgaccgaggtggccaacggcctgccgtaccgcgacttcgtgaccgtgggcctgctggtcaagcacctgaagctcaagaacaccaccaacatccccaccctcggcaatccgccgatcgtgccggactgctggatctacgtgcaggacccgggctacaaggtcggccgtctgcagatcttcaacaactggagtccgtatctggtcaagaacgtggacgacaccgtgtgggtcggcctcgagtacttctgcgaggagggcgactcgttctggaacatgagcgaggaggacgtcaccaagttcgcgatctccgagctcacccgcatgcgtgtgatcaacggcccggacgaggtcatcgactcccatcgtgagcgcgtcaagaaggcgtaccccgcctacttcgacacctacgagcacatggacgagctcatcgagtacctcgacggcttcggcaacctctactgcgtgggccgcaacggccagcaccgctacaacaacatggaccactccatggccaccgccatggaggccgtcggcaacatcaagaccggcaagacgtccaagaagaacgtgtggtccgtcaacaccgaaaagtcctaccacgaagaaaagtgaataaaccttgttgagctccctcgtcacagagggagcttttttggttttcggcgggccgttttgcgttggtcgagttggcgttgtacagtaaacgaagttcgtgaaaactcagagacgcagcgaacattcatgagcggtgcaaccgcaataatcactcttaacgcctggataggcatgggtctgttcggtatggaaagggcaaccagtggcaaatagccagaatcttgaggatatgaagctgcctgagctcaaagagctcgctaaacagatgggcctgcgcggcacgtcgaccatgcgcaagcccgagctgctcgccaccctgcaggcggcgcgcaatggtggagagccgccggccggtgtgaccgtgcgcgctcccaaggccgccaaaaccgccaaggtcgtcaaggctccgcagtccgatgccgctgaggccaataccacagacaatgctgacgtggccacccagtcgccggctccggccgccacggaaccgcagctcgatttgccgcttcccgtggccgacgatgccaagaaggacgagaccgaaccgcgacgcacccgtcgtaaggccgccgatgatgccgcatccgaaccgcgtgcggcccgccatcgtcgcgatgacgaccagtccgatttcgctcgccgcaagccgcgcaagaaggccgatgaggccggcgatctgctggccacgctcgatttgggagatgcagcgcctaccgagcgtcgccgcgagcgccatgaggacgtggaagttccgctgattcgccgagtccgtgatgatgaggacgagcagcctcgccgccgtcgtcgcactgcggaaaacagcgaagaaaccgtgcgtgacctcgacgatatcctggccacgctgcccacgcagaagcacgaggaaacgtccgaagacggcgagcagaacgacgatcacgagtttgtgcgtcgtaaccgccgcgaccgtagcgatcgcaacgatcgcgataaccgtaatgatcgcaacgatcgccgtaaccgccgcatgcgtggccgtgatcgcgacaacgccgatgatgatcgtcgctatgatgatcgcgataatcgtagcgatcgcaatgaccgtgatagccgccgtgaagagccgcaggaggatctggtgccggtggccggcatcgtcgacgtgctcgactcctacgcttttgtgcgcacttccggctacctgcccggcccgaacgacgtgtacgtttccatgggccaggtcaagaagtacggcctgcgcaagggcgatgccgtccatggttcgattcgcgccccgcgcgaaggcgatcgtcgcaaccaacgccagaagttcgtgccactgcaggccatcgattccatcaacggccaaagcgttgaagaagcgctcaaccgtccgcagttctccaagctcacgccgctgtacccgcaggagcgtttgaagcaggaaaccgccccgaacaagctcaccggccgtatcatggacatcgtttccccgatcggcaagggccagcgtggtctgattgtctccccgccgaaggccggtaagaccatcaccctgcagaacatcgccaactccatcgccgccaacaaccccgaggtccaccttatggtggtgctcgtggacgagcgccccgaagaggtcaccgatatggagcgcacggtccagggcgaggtcatctcctccaccttcgaccgtccggcctccgatcacaccacggttgccgaactggccatcgaacgcgccaagcgtcttgtggagctcggccaggacgtggtcgtactgctcgattccatgacccgactggctcgcgcttacaacatcgccgcccccgcctccggccgcatcctgtccggtggtgtggacgcgcaggccctctacccgccgaagaagttcttcggcgcggcccgcaacatcgaaaacggcggctccctgaccatcatctcctctgcgctggtggaaaccggctccaagatggacgaggtgattttcgaggagttcaagggcaccggcaacatggaactgcgcctgtcccgcgagctggcggacaagcgactgttcccggccatcgacatcaacgcttccggcacccgccgcgaggagctcatcaccaatccgcaggaactgccggtcatctaccgtctgcgtcgtctgctgggaggcatggagcccgagcaggcctaccagacgctggtgccgcgcctcaagaagaccgccaccaaccgcgacttcctcgccgccatcgtgcagcaggccaacaccggcaacgcggtcaacggcaactgaccagaccgctgaacaatagtgtaagggctgcaccccgattgatacggggcgcagcccttgccgtatatgatgcaaatacatcaactatcacattgcagttgtagtattgccgtcaacgttcacatgcacgctgacgatatatgagatgaaagatgtatcaatgggttcgattgttttgggagtgggcaatggtgcggccatgttcggcgatgcggatgccagccatatcccctacggcgactatgacatctgagatatctgactttgcgcatcgtgcaaagccgcaatcgggagtatcctcgaatctatgagcgaaacgagcagcggctggcaaaggaccaccatcgactccgcccaggcggcggcccacccggaaaccgcacaagcggtggcgcgcatcaaagcgctgcgccaaaccatcgataacatcgattcggcggccatcgcattactggccgagcggttcaaggccacctcgcaggtcggcgtgctcaaagccaacgccggattcgcgcccgaagacaccaagcgtgaggactatcagatcgaacgcctccaccgcatcgccatcgatgccgggcttgatccggaaattgccgaaatgtaccgtgaattcgtggttaccgaagccaagaagcgccaccagcgcatcgccgatgccggtggcgacccgggcgtactcgacgtattcgcctgattcgcccgcagcgaatgggcacctttcggatattcgtctatagggcaagttgccggcagcgactacattaatacgggaatggaatgcccatagtggccgactgtatgaatgggatacgtagatgagatgtggtgccgcactggtcagttgcgcattgtgcgtggcttcgattctcggcggtgcttggatgtctcgtccgactccggttgattacggtccggtgctcgctacggcaagtgatatgtacgccgtcgccgatgccgagggggagccggtccgttggtatgtggtagggaagggcggcgccggcaatggcgccagtgccgattccggcaatagcggttccactgataccgattccgccaatagtgattccggcacgtccaaggcttctcgtatccccgcttccgccgccaccctgccatggaaagtcagcgtcacctactcgcttgacggtccaaacgtcgaggcaaacgaggttgccggcgcatctggactgatcggcgtgtatatcgatattaagccgcaaaccaaggaggccaaccgtacgatcccggttgtcgcctttaccgtgcctacgcaggtagccgatgatgtttccgctgacaactccattacggtaaccacgcaaggttccaataccgtagtcgccgcagctggaaaagccgcaaccggcttggaattcagctgctatatgaacgccaaagacttctccatgagttccgtggcgctcgccgtattgccttccaattccagcagtccggtggttggtgctaatcccgatgccgcgaatgccgccgcacagcctgctgccgatacggatgtcgcccaactcaccgcctctgccgccacactggtcgattcactgaccgacgccggttctggtgaacagcaacagctcatcgagcagcttcaaaccctgcgcgataacgaacgtgcgctgaacaagtctgtagtggccgaacgcgaaaccgcccataagcggacgtttgaagactatatggccgcgtatgtgggctcatataccacgcacctgtctggatcgattggtacctccacccagttgtcggcgttgatgggcacggccggcgaactgtccggggatacgcctttggcacaagccgtactcgacttggccaacgcggtgaacaacgtcagtgccgcacatcagcatgccggtgcggtcgatgcgttggatgaggtgattcgccgcatccagcagcaaggcaccaccggactggtggatgatctgaccgccgaggcttcggaggaagccactcgaggctccaagcaatacgccgatggccagagccagctctccgccgcaatgattccgtattcgatgaaatacacggacgtctacacggccaatttgagcgccctgaccggcggcacgtcttcgggcgccaccgcttacgagagccaagccatcgccgaaaccaacggtagcgatgaactcgccgacgatcaatccaaggtcgatgccgcgatgagcacgcttgccaccgcctccgagcatacgggcaaagccacggccttgcgccagattgtattgcgattctccgatcagttcgaaggagtcgcgtcctcggcttccggcagcgatggcgatggctcgtccggtgatgtctcttccggtccggtgaccgaggctcaggcactgactggcctggtcgattcgcaatcgcaatcgttctacggcaagacccgggccgcccaagccaagcgtaaggccgatgccgcccgtaagcaggccaaagccgcgcaacagcagcagcagtcgcagcattccaaggcctcactggtcgatgacaccatgtccatgtctgctggcgatgtgatgaactatgcgggtggtcttacttcggccatcggtggtggaggtaagttcgattcgtccaagagcgatggttcgggaacgaacgactcagccaagtcgagcgatactggcgattccggcaacaatcttgacaccgctccagtactgttcggctttggcactggcggcacgctgctcaagcatgacatgagcgcgctgatcaatgagaccgtggagatcagcgatgctggcacgctcttggcgcaggccgtcgcgcagctcgatagccccaatacgcaacaaaaaaccgccgaaacccgatacctcatcgtgattccgacggtgtgatggtgtatgcgggaaaatccgcatgcgacaggtgcccaatacgcgtaaagtgcgttatcggtgtgggacgccgcatcaaaaactggctttttcgatgcggcgtcccacaccctcttgtaagtcagagctaactatagtttgaagaatggctaaattccaaggatttgttgatttggtctgtggaacgccgcgtatataaaacgtttgacacgcgtggtggcccacgctattgtgggccgccagcttacaatgcgggatatttgcgtgccgtcccacagtcgtgtcatccgaacgtcaaaaaacaaaagaggggaacctcaataggaggttcccctcttttgttgttgtgcgcaacgctcagtgctttggcttcttggctggcggctcaccgagctcgctggcttcgacggcgacctcggtttcgggcgcgtcttcggcggcggattcctcggcgtgcttggccaccaagtcgaacttgcc

SEQ ID NO: 2391 - DNA, 12512 bp, Unknown
  R50_10m  MAG No. k141_6431
gcgcgtgattgaacagatggctgttgcagttgtcgactgctgcggcctccacaagctgcggcttgaagcgcatgaacttgcccatcgcgtcggagacgccgagcaccgtgaccagacgcttcagggcgtcgttgtcggggatgacgtgtttcagatcgcgctggctggattgcatcgcgttgacgatatccacgaaattgctcaatgccatatcggggtcgcaggcgtgggccagcatgctcagcagttcggcgcatcgctcatcgggaatgtcgtccgtcttgagctggtcgaacaaggtgcgggccttgtcgaggtcttgcagacctgccctgatgagatccatggagctgggtttgaacatcgacgattccataagattccactatatacgctcatgccctccgaatggggcatgagtcgggaaggagtcatcgggcgacgctgatgagctccgaggaatccatatcgtaatcggccatggcgtaggaacggatggcggggtcatcataggtgttcatgtaataggtgttggtcttggacgaatatccgctggtgaacagcgtgcgttcgaactggccgtcgcccatcttcgccatgccgtccaccatctgcacggagccgagggtgtggaacaggcgagacacattggcggcttcatcgttctgctgcgggtaatgcgcgttggtgtaggccacacgaacgaagcgcgacggggaactcacgtcgcccgggatgccatgcatgcccacacccgcaccccaggcggtcaaggaggccttgccccatgaagtcggttcggccatctcgttgctgacgcacatgtagttgcgcagattttccatatggaagtcgaacgtcggctgattggtcagcacatcaacgtcatcatgatgcacgtgcatgccatcggccatctgctcgacgacgatgctgcgcttgccgtcgccgatgaaccagtgcagcagagactcctgctgtcccggcacgatctgggagacgagcgtcacgttcctgagcgcctcctcgacctcgtcgacggagtcgaaattacgcgccacccacagcggaaattcgaacgtggcgacgttttccgtgccttcgaccggttcgtggacgaacgaggcgtagccggggaaattcaagccggcgatggccagaccatgttcattggcgcagtcgaaatacatcggcctatcggccatgaccacgcccacgccgatcaccgcgttcggcttcgccttgccgcccgcaccgaacaccgtgtcatagtggtagccgcgcggagtgaccaggatggtctccccatatgagaaactccagtcgagattacggccgaaataggtgttgccctcatcatcggagaaacggacaccagtgcacataacggacttccttccatcgctttggttggcttgtacgttcatgatatccatcggccgctgggggaactctgggtttcgccagcagattaacgtgcggcgcgacgcattgagatgcgccgcgctgcgatatgcgtcaaccttgcgtaccgaggaacaacggttccgcattgcgccagatacggcgcgtggtggcggggtggttcatcgaatacaggtggacgccgtccacgccgtgggccacgaggtcggcgatctgctcggaagcgtagaggatgccggcggcacgcagggactggatgtcgtcctcccacttgttcagcagggtgttgagcttgtccgggatacgcgaggcgttgcgttcggccatgcgacgcacggacttggcaccacgcaccggcatgatgcccgcctcgatcggcacggtgatgccggcggcgcgcgccttgtcgaggaagcgatagaagtcctcgttgtcgtagaacagttgggagatcaggtgagtgacgccggcatcgaccttgatcttaaggttttcgatgtcctggtccagcgagtcagcctggtagtggccttccgggtagcaggcgccgaacactttgaggcccggcttcacggagcggatgtatgacacgaggtcgctggcgtggttgaactcgcctaccagctgctcgccgtcgatgtagtcgccgcgcaatgcgagtacggcgctcacgccggcctgctcgaacatgtcgagggcctcgtcgattttcgccttgtcggaatacaacgcggtcagatgcgcgactgcgggaatgccgtactccttgctgatcgtatgagcaatgcgcgcggtggcggtgcgatccgaatgggtgccgtggccgtaggtcacggaaatgaagtcggggttcagcccctccaggccgtcgagggtgtcatagatggtgtccacgggagcgttgcgcttcgggggaaagacctcaagggtgaacatcggggaatgcatgctgatttccttacataaacccgagctccctcatacagagggagctcggtgatttccgctacttgtcgagcttggcgcgcacggccttggcggcggcgaccaggttctccaggctcggccaggtctcggcgttaccacgggtcttcagaccgcagtcggggttgatccacaccttcttgacgtccatcttgtcaaggatctcgtagatacgatcctcgatctccttctcggaaggaatacgcggggagtgaatgtcgtagacgcccgggccggcctcggtctcgaagtgcgcgtcatgaatggcgtcgagcaccaccagatcgccacgggaggcttcgaaggagatcacgtcagcatccatcgcgtcgatgtcgcggatgatgtcgttgaactcggagtagcacatgtgggtgtggatctgggtggtcggcttgacggcggagtgcaccagacggaaggccggaacggcccagtcgagatacttgacgtgccagtcggacttgcgcagcggcagcttctcacgcagggcggcctcatcgatctggatgaccttgatgccgacggcctcgagatcgagcacttcgtcgcggatggcgagggcgagctgcttggtctgctcctcgtgggtgatgtcctcgcgcggccaggaccagttgaggatggtcaccgggccggtgagcatgcccttcatcacgtggtcggtcttggactgggcgtacgcggaccattccacggtgatcgggttggcgcgggacacgtcaccccagacgatcggaggcttgacgcaacgggtgccgtaggactgaacccaagcgttcttggtgaacaggaagccgttgaggttctggccgaaatattcgaccatgtcgttacgctcgaactcgccgtggaccagcacgtcgaggccgatctcctcctgcttcttgatgacggcgtcgatctgggccttgatgaactcgtcgtaggcttccttggtgacctcgcccttgcgcagcttggcgcgctcggcgcgaatctccttggtctgggggaaggagccgatggtggtggtcggcagcagcggcaggccgagggcctcgcgctgcagggcctgacgctcctcgcgggcaggctgacgcacgtagtcggcgtcggacagcttgccgatgcgctcggcgacggccgggtcggcggccacgcgggtgccgtcgaacagggcctggttggcggcgagggcggcggatgccttcttctcgtcctcggtggcgtcggccagagcggcgacttccttgagctcggtcagcttttccacggcgaacgcgaagtgcttgaggtcttcggccgggatgccggtctcgccttcggtgctgaacggcacgtgcagcagggaggatgcggtggagacggccacgttggcggtgacctgcttcagggcgtcgaccaggccgagggaggtggcgtagttgttgcgccagatgttgcggccgttgatcacgccggcgaagatggcggtgttggaggccacgccatacttggcgacggcttcgaggttctcttcacggccttcgttgaggtccagtccgatgccgtcgaagccgagcaggttgacggtctcgtacacgtcggcgatgtggccgaagtaggtgttgagcagcaccttgacgttgcccttggcggacaggatcttggtgtacagggtcttgaagagctccacatcgcccggctccttgtcgagcacgaggtacggctcatcgagctgtacccatgcggcgccgagttcgttgaacttgtcgagcacttcggcgtagacggcggccacggcgttgaccaggcccttgtcgagctcgagttcggtggcttccggggtacgggcgagcttcaggaacgtgtacgggccgatgaacacgggcttggtgtcgatgcccagcgccttggcctcgttgaactcgtcgaacggcttggtggagttgagcttgatctccgcggccgactcgacttcgggcaccagatagtggtagttggtggtgaaccacttcttcatcggcagggcggtcacgtcgcccttgtcgccctggtagccgcgggccatggcgaagagcgtgtcctcctggttatcgaaggcgagacgctcgtaacgcttcggaatcacgttgaggaggatggcggtgtccagcatctgatcgtagtagctgaagtcgttgctggggatgaggccgatgccggcggcctgctgcagcttccagtgcttggcgcgcagttcggcggcggtggccttaacggcggcgaggtcgttggcacccttccagtagccttcgatgatcttcttcagttcgcggttctgcccgatgcgggggaagccggagacggaagtcagagtggacatgaatcctccaatgtatgcgttcgtaacccgacttagggtagcaaaacatccggattccaccccttataaatggccgcagagtgtcgttatagatggaatttatatccgctttagtcgaagtctttcacattgatgaccgcgagcagttcgccgctgtgcacctgccattcgtcgaacggtttgttcgatcccatgatcacgatggatgcgggcgaaagtcccaagttgagcaggtcgagtcgttcgccgtcggagtcggcggaggcgagccattgggcgctgatcgacacagtcggctcgtggcccactatcatgaacacgcggttcttggccttgacgtgggcgagctcgtcgaacaccgcctgcactcccccgtcatacaggctgatgcggtagtcgacgatcggcttgtcgccaaaggtcttgagcatgcggtccagtgtctggcgcgtgcgggtggcggacgagcaggagatctggtcgggcaccagtcccagcgactcgatgcccttgcccacggccttcgcctgtttcagacctttgtcggtgagctcgcgctccgagtcacccttgtcgccgaacggctcggccttggcatgcctcatgatgatgaggatatggtcgtattttttcgctgctttggcgactttgctcagcttgatgcccatccgtggctcccttcacgaaccgtctgcccggtgtggcggtgtggtgttgcttccagtatagaggtgtgtgagcgttcacaaactcatcgtcgggcggttattcatgcgtgttgccgagttctcccacctgacggtcgaggtcgcgcaacaccttacgtagtttgtggtcggagatgtcgcgcagttccagttcctcgatctgcgcctcacgctgttcgtcggtgagcgagtcgatgtcggtctgcgtgtccttggtcacgcgatcgcgctttctgagcgcctcgaatccggaggccatggcgcgcgagataacaaggaaaccggtatggccgatcatctggtggtcggggcgtacggcgaggccttgggccttccatgtgcgttcgaacgattcctggatctgcggctcggtccagcaaccggccgcgcgcagggcttcggccagtcgactcatctgcgtggtggtagttacgtaactgaccaacacgccgccgggggcaatcacgcggtatgcctgctcgagtctgttccacgggtcgagcatgtcgagcatgatacggtcgaaccagtgttcgggcagttcggcggccacggagtcgaagtcgccggttttgagatcccaccagctgggggcttcaccgtaatacagcgtggcgttggcctgagccactttggcgaattcggggcgcagctcgatcgtggtcagatggccgcgctcgcccacggcgtccagcagattcacgctcatcgcgcccgagccggcaccggactcaagcacgcgcatgccggagcggatgtcgccgagctgaatgacctgggcgatgtccttcggatacatgatctgcgcgccgcgcggcatcgaaagcacataatcggccagtcgcgggcgcatcaccgcatactcccagccgccgatggcgcgcgacgatttccacggcttgttcttgtctttctcggggtagacctgattgacctgtgcctcgcgcttggcatgcacggtgaggatcacggtgccttcggtcttgccgatcacatcgtcatgcagaatcaggccatgctcggtctgcgtggagccgccggccacaagctgatcggtgatcttcttgcccttgcggtcggtgaactgcaccttctcgcctgcggtgagaggcccgcgcctcggctccataacttgctccttgcgtgctcggtgggtcaatcgctacaagtctaatgcatgtaagctcgttggtgaggtgatgacgatgcgaatgcagatgacaagccagatcgatgccggcggcaatgaccccatttccctgatgttccacggttacggcaacgacgaaagcgagatggtgcggattctcgacgccgtatatgcgccgacgcgagccgatgcggccccgtccgcaattgccgccgtacccagctatatctcgttccgtgccacctacgcgaggccctatatgggcggcaactactggtatcccgacggctgcggcgtggacgagcgccaacgcgaatgcgcggcggtcggggatgcggtggcttcactgctggatgcctcggcattcgcccatcgcaggaagatattgatcggtttctcccaaggcggttatctgtcgtatcgtctggtcaaggcgcatccgacgttgttcaatgccgcgatcctgctcagtccttcgttcatgggcgaggaacaggcggcgcttgactcccctacccgattcttcctggcgtatggcgcgcaggaccgcacgattccgatgcccgaccagcaaacggcccatcaggtccttgaacgggccgggcatctgacctatcgcgagtattccggcatggcccatgccatctgtgatgaggaaatcgccgatatccgggatttcctacgtgccatatgatgccggaatagcttcaatatggaatatctccgttcaaagaggtaccggtccaagtagaagcggctcaacaatggcggaatggcgttggccacgcccattcatcgcgcgatggttctgcgatcagctcaattcccctgccggctgatgccgcccttatgaccggtggccttgaatggcgtggcgcgtgccgtcaccttcggccccggcagattcgtactggtattggatcgaccgcggagcccggcagccggctgggactcggagcgtcgaccagtacccgtgatgctggtatgccgtttgccgtcgtgcgcccgtttctcaccagcaccttcagcctcgtcaatatcaatgcctttggcgcgcaaagcacgcgcccaccgctcatccatcgaactcctcacacatcccattcgggtttccacgtgtactgcatgtcgtaggcgctgggcgaatggcggcaggtggttcagagtgatcgggccgaatgcgacggcgtcaaaagtcatcgttgctcccttcgatggtgttggccaacaggttccaagggtcaggcacagcgcctttctcaacccgttcgccgccacgatgaccggcagcttgcgttcacgggttcccctgcaatgcgcctcattatggcaacacgaaccgacaggtgccggctgcgcctaggatgggaaatgattgctgcacgccggaaaggggaggcgactgtcatgaggtatttcacgaccgacacgcatttcgggcatccgctggtcacggtgttgcgagggttcacgacgttcgatccgacgcgctcacgctatgaggaggtgctgcgcgcgcatgatcgcaagaccgccgaggattgggccaaggaggagacgttcggcgcggggctgacatttcgtcaggtcgccgatacggatgcgcatgacaaggcgattgtggatcatatcaacgctgtggtcggcccggatgacgagctgtggattctgggtgatatcggtttccgcacatcgctgacccatctgaagaactgcctgcgagcgctcaattgcaagcatctgcatggtgtgatcggcaaccatgatgactggtggcgggaagaccgccccgcacttaacctgttcgaaagtttggagccgcacgatacggttgagattgagggactcggtacggtcaatctttcgcattacccgtatcgggaggatctggcatacagttggcccgatgatgtggcgaagttcagcggcaaggcgttgccgtttgaaggtcgcaaactgctgtatggtcatacgcatcagctttcgccagatggtgcacgcccggaggcactgaatgttggcattgacacagcattgaccgccgttgagatgtatgcacgctgaacacgcgcctcaacggcattggtctcgtcatctctcgctcacaccaacggattgccggcaagacgggtcaattcggcgttcagctcggggaaatgctcgttgccgacgaacggaccgtattccgtgccggattggaatgggcaccatgcctgaatggtcatatgcttcagccgtgaataaggcaggatgccaccggtgcgatcggctgcgggatcgctcgccatattgaattggatttcagcgtcgagcatctgtgtatgcatcaggccgaactgcagttggttgatttccaatttctgacgaaggccgctttgcaatagttcgatctgccacgggcccatattgctgactccgaaatgacgcactttgccgcttgattccaacgcgtcgaatgcttcggcgacctcgttcaactcaaacagcgtgtcaatacggtgcagcagcacggcgtcgacgtaatccgtctgcaaagcctcaagctcgtgatcgagtgcgtcaatcagatgcttggcgctgaagtcatatccgttggcgccgccatcgttttcgccgaaactgtagtcgatgccgaacttggtttggatgaagatggtgctgcggccgagtcctgcgtccttccacgcttggccgaaacgcttcgaactggcgtgcgcggcatgatcatggaatccatagatgtccgccgtgtcgaaatagtcgatgccggaatcatgggccacggccacggtacgtgccgcatcggcggcatccaacgcgtccatgcgcatcacgcccagcgccactcgtgacgcaatcatgccggattgtccgatttcctgagtcttcatagtgtctcatttctgttatcgcgaatcggcgaacgggcactgtccgcctcgttgccgggcagcaatctccattgccgcggcttatgtcaccttatcgcttgaagtgcacttgaaggcaactcgcaggcaggcagcgcgcgctgccgggcgcgtcttcgcgccttcatgtcttcgctgtgaccgagacatcgttgtgccgtaatcatgcccatttcttgtatgatgacctctatagcaacagagctagggggattccatgaatactaccgattcagccaaagtcagtgatgccaacgccggcgcaaacaatgtcatccatatcccgcacaatcccacgcttgccggattggccacgctgacccgcaacgtggcgtacaagaccggggccgataacctggtgatggatatcatctcaccacaatccaccggcgatgacgatgaccgccgctaccccaccgtggtattcgtgcaaggcagcgcctggaccacgccgcatcgcgactacgagatcccgcagctctcggctttggcccgcgaaggctttgtggtggctacggtgaatcatcgcgatgcctcgagcgatccccacgacgtgttccccgcatatctcgaggacgtcaaagcagccatccgctatctcagggcaaacgcgcgccaatggcacgtggaccccgaccgtctcggtatctggggcacgtcgtccggcggcaacacgtcgctgctggtggggttgaccgccgacgagccgcggtatgaggacggcaccaatgccgatgagagcgatgcggtgaagtacgtggtcagctgcttcccgcccaccgacatgcttgaagctgtcgacgcattcgacgatgagaccaatccattccggctgtattatttcggcccgttcgcggccgtggtgggcgcgacccatgagaccggcatcaatgccgaggtccgtcagcgcgcggctgacatgagcccctacctgcaggtgcgggatgaccaacagtatccgccgatgctcctgttgcacggtaccgccgacaccgtggtcccctaccatcaatccgtcaagatgcgcgaccggctggccgagcacggcgtggacgcgcagctggtgctagtcgacggcgccgaacatgagtacgatttttggagccagcaggtcttcgacgtgattttcgatttcattcgtgagcggagctgaacgataagggcacacgggcgcgccctttttataggttgccgagttctcttttagccaattttgttggagcccttatctgcgcgaacataccatgacagttctagactgtgttctaggactgtcaatcggcaatgtgtatgaagcgtgatgtgatgggtcagacggcgattgatggagttgagggacttaatagggccggtgaactcgatgaactcggcagatttagccgttcgcggcagctgatgtggggtcatgcgctgtatctgatttggtggtgtattttcttccgcccgaatgcgcaggtcaaaggcggcgcgctgcgcgtattcggtattgcgtgcattcttgtggccgcggtggcggggcatcgtcggagtagtgttagaatgttttggtatcagtaagttactttagcacacggccgatttcctctttgaatgcataccgtctcgggtactttgccatgatctccttggcgagagccttggcttggtcgagtccgaaaacgttgcgatattgctcgatccacatggcaacgaatcggtattcgttgcgatttccctgttgcagatcgcgatccagcggcagttgctttctgatcagtcgttctgcttccgcgctgtgattgaggctgatgggcttgagcaaatcacgcaggagttccggccgctgcccggctaaggccaaggcctcatcggataggcgctcttcagtcatgagtcgtgcaaggactttcccaccgaaatcatgctcatgatagttgcgcaggatgttctgaacgctttgaggccagcccgatttgccgaccatcgatttgaggatgggaatgcaacgttcgtccgccactgaatcactgtgagcgacgtagtactcatataattgtttgatgccgttctcatcgttcagtcgttcatagcaggcctccagcatggtaagctcgccatgcggcagttgagcggtgagctcccaataccccgcatgcttttgcgcggcatcccaatcgtaagtctgttccaagaaagcggcggccccggcataatccccgtccaggaatttacgtgcgatgacggcaaatctgcattcggccacgtccgtgtttttggacagtagctcatcggcactaattgcgtcgccgccgtacagcagaaagtcatgatggagtttcatcagatagtcctgtgcagctcgccaatcgtaatcggtcaggttcgttcgatggccgtcaatggaatcccccttcttgtcatgaaggaattgctgggcaacattcaatgtggactgcgcataggtgcggcacatgaacgaggtcgtgccgatctcgcggggctgatgctccatctgttctacgtccgccgtacctcgtgcgtgaatatccgcgaatgggatgacgcattccagcggcgtgtgcggccaaaacagcatctcgatcataggggtatcacgtatgaatcccaacgctgcaatcagcatctgctgcgcttgctcgcctgtaacgattggtgccgcggcatacgtataagcgaggatccgctcattgaggtgttcgatatatgtctgtagcgcaccctcttcatcatcgacttgtctcgcgaaccacactgtttttcgcaaagccgcgcacatgcgtctcatggccagcggatagtcgttcgattgttctgcttcctcgaatacggccatcacgccgtttatggcggcatctccccattcgaatgtccagccgtagtccttgccgagatgtcgccgcatgggagattccatgacgcgatccacggtgctttcgggcatcaatggttccatgccgctcgcgattgccggattcgcagtcacgatggca

SEQ ID NO: 2392 - DNA, 9495 bp, Unknown
  R50_10m  MAG No. k141_6903
ccgcggagccgagatccttttcccactggtgggacacggtggagacgctgatgacgtcgtagtagccgttctcctggtactcgcggttggcttcgaccagcgggttcttgacggtgtatgcctcctcgtcgaaggtcttgaacggcgtgaccagacccatgtcctgcgagatggattcacgtgcggcatcagaagtgacgagccactccaggaactgctgggtcgcttcctgatccttctgggaagacttggaattgacgcaccagtagttggagatcacctggttgaggccctgcttctcctcgccgtcgacgcccatgtagatcggcagcacgccgaggtcctcatccgggaatccctgatcctgcaatgcggagtaaatccatacgccgtcctggaagaacaccgcctcgccgagcgcgaactccgaagtggcatcatccatggtcttgcctgaaagcgaactggccggcaccgttgcatcggtgatgtacagatcgtagatattctgcatgtagtcgacatacgtgcccttgacggattccggcacggagttcatatcgacgccgtcatcacggtactcgtagaacagcgggagagaaggcagatggaagttgtatcggaacgccgaggaatccatgccggccgaagtgaacgcgcccttgacgcccatgtcgtccttgtgttcctggatctcatcggcgacggtcttgagcgccttgaagttgttgagaccgtcgatggacttgaccgatgaccacgatgcatcgaaatacttcttgagcagcgacttgttgtagatgatgccgtagctttccaccgcgtacgggatgccgaccggcttgccgtcggcgttcttgagcgtgcggtccttgtagctgtcagtcagctcgccgtagatcttggagtcgctcatatcggcggcataatcgagccagctgtacatgaagctcgggccgtcggcctggaacatggtcggtgcctcgtccttggccatttcggaacgcagcgtctggtcgtagtcggtggccgaaagctgaatctgggtctcgatgccggtctcgtcctggaacgcctgcgccagggcctcccatttctcctgctcttccgccttcttgttcaggtagtacacacgccctttgctgctgtcgaccgcggtcgtgttcccgcatgcagccagcgccccgaagctgagcgcagccactgataccaagccgattgccttggcgatggtgttccacgttcttcctgtcatcattacctccctgtaatggctctccttgctcatgtgatacgtgcctccatgcacatatccgtgtacgaccttgcggtcgccctgccggatcggatgccggctgcatcaaccatgcattgattgacacaacaaaatgatagcgcttacattacacaccgtcaaccgccgcctgcagattgcgcgtcacatcacatgcgcacaatacagaacattggtaaaccattgcaaacacaatcaaaccgtgaccgctaacaacgcgcacatcgtggtacaaaagaatgtaagcgcatacatatatgctattaatatgcatgggcgtacgtcgcagcgattgcggcggcgccagcacggctacagtatctgacaccgcccaccacacagcgaaaggagacatcatggcgacaatccacgacgtggccatagccacaggagtctccgacgccacggtatcgcgcgcattgcgcggcatgaatagcgtccggccgtccacccggcaactcgtgctggacgccgcccgtcgcctcgatttcacgctgtcccgcagcgcatcatcgctggcatccggcaaaaccatgcgcgtcgtcatgctgttcggctgcacgattgcgtcatggttcaacgcgagctgcatcgaaggcgcactcgaaacgctggaaccccacggctacgatcttgtgcccgtacgggtctgcgacctggaacaactgcatggattcttcgccgacctgcccagcaacggacgcaatatggatgggttcatcctcccgtcattctcgctggacgacagcgaatcgacgttgctttccagcatgcatatccccgcggtcgccctcgacgcacggagcgcttcccgcctgcccgcatccgtgatgctcgacaacaagcgtgccatgaacgacgccgtacgattcctgcgccaactcggccatcgccgcatcggatacgtcgcacatccgaaaccggcaccgttccccgccagctcgtatctgcgcaaggatttcttcctcgacgcgatgcgcgaatgcattcccgacgccgaaccggtcgcgttcgcatcatccagcgacatggacgccatgagcgaagatgaggccatggctgccatagccggccggatcgccagcagcgagcatcggccgaccgcgatctgcgtcgaaaccgacgaagcggcggtcgccatcatgcggcatctgcggcagcttggcatacgcatccccgaagacctgtcgatcatcggattcgacgaccatccgaccgccgcagtcgccggactgaccacgttgcatcaggacccgcagcacatggcgcgactggccgcgcaacaactgctcgccctcatgcgaggcgagcagttgagcgaaacggtcaccacggtgagagccacgctgattccgcgcgccaccactgccgccgcaccatcccttccgtgactcacccccggctacgtagcgacacgctggaacacgcccgattgacgatagcgaaccggttcgatatcctataaatcaaaccggttcgactgtatgcttacgcaacgaggcaacacctgagccagaccaataatccactccaacgcataacgaaatgcgctacagcaaaaccggctgcaccaacggcgacgtatgcagtccggcaccccgtacaacaacaagtgcgaggcggctccgtggccgcagatgaagaaaggaaatccatgaataagctgtccaaaggaattgtcctgatcagcgccgcagcgttgacgctgggactggccgcatgcggctcaagcacgaacagcgacgcaggccatgtctacttcctgaacaacaagccggaagtcgtcgaccagtggaacgaactcgccgacatgtacaccaaggaaaccggcgtgcaggtcgacatccagtccgccacttccggcagctacgaatccacgctgtcgtccgagctggccaagaacaacgccccgaccatgttcggcatcggcggcttcgaccagtacgccaagtacaagaattacctcgagccgctgcaggactccgaagcctacaagctgctcaacgagcagggcaagcagatggcccacaaggacggcgacgacgtgtacggcctgccgtacgccgccgaatggttcggcatcatcgccaacaagaagatcatcaacgagtacgccaagaagagctactcggtcatcaagtccttcgatgacatcaaggatttcgccacgctcaagaaggtcgccgacagcatccagcagcacaaggacgacctcggcctcgacggcgctttctccacccccggcctcgacgcctccaactactaccgttacgcgtcgcacatgacccaggtcccggtcgcctacgagtacatcgatgagggcgtggacttcgagaaggagctcaagggcacctacctcgacaactacaaggccctgtgggatctcgagatgaaggacaacccgaccgagaacaccatgctcggctcggtcaactacgaggattccaccgccgagttctccaccggtcgcgtggcgttctacccgaacggcgtgtgggcctactcgcagatcaaggacaacgacgtggccgacgaggacctcgccatgctgccgtactacatgggcttcccgaacgaaagcaagtatgcggcgaactccatctacgacatctcctggtccgtgaacaagaacgcatccgagaaggacaagaaggcgacgctcgacttcatcaagtggatggtcaccaacgacgacgccaagaagatcctcgccaaggacatgggcttcgccgtgccgttcaccacgttcgacagcgaagacttccagccggacaacccgctcaccaagtccgcactcaagctggaatccgacggtctgacgccgatccacggcgcctacattcccggtcaggcatgggccgacggcgtggccaacgcactgctcgagtacgcgcagggcactggcgactggaacggcgtcaagaaggcgtatctcgacgattggaccagcgcctggaacgactacgagtccaacttcggcatgctgccgccggtgcacaagtgatgcgcgcatgattcgagcacttaggcagcaggtgcggcgaccgccattgtcattgtcatagacgaagcagtggcatcgcggcgactgccgcaacataggacggttccggcgtcatgcgtcatgtgcggcaccggaaccgttcgcgtaatggttcgtgtaatggaaggaatagattgacgatgattgccgaccttggttcattgatgaccctacgacgtgagtccagccgtgcgatcaacgcggagaatccgaccggggagcccggccgcggcggcatcgccgccagcgaactgggcccgtcgcgcaagggcagcccctgcctgcgcaacattcccagtggcgaaacggtcacattggccgacatcgacggccccggctgcatccgtcatatctggatcaccgtcgacgaaaagaccacggacgccgactgtttcgtgctgcgtgatctggtgctgcggttctactgggatgacgaaagcgagccgagcgtggagtgcccgctcggcgatttcttctgctgcggattcggccgcgcatgcctcgtcaactccgaaccggtggccgtggtgcccaaccgcgggttcaacatgttcttcccgatgccgttcgctaggcacgcgcgggtaacgctcgagaatcagcatgtgaacacaatcggcgcgttcttctatcagatcgactacagcctgtacgacgatccactgccacccgataccgcctacttccatgcgcagtggcgtcgccagcggctgaccgagctgggcaatgattatgtggtgctcgatggcgtacgcggctcggggcagtatgtgggtacctatctggcgctgaccacgctcgaacggtactggtggggcgaaggcgagttcaagttctatatcgacggcaaccgcgaatacccgacgatctgcggcaccggtaccgaggactacttcggcggctcgtggagcttcgccaagcaggtgaacgggaagaccgtggagcagaactactgcacgccttacatggggtatccgtattactccgcgcacgatgaactggtgcacaacgattatcacaacgacgactgcccgccgatgcgcggcttctatcgctggcacatccccgatccgatccgtttccgcgccgatctgcgcgtgaccgtgcagcagatcggcgtgggccatcgcggcttcttcgagcggcaggacgacgtggcatcgatcgcgtactggtatcagcgtgagccgcatgccgcattccccacgctgccggatcgtgtgtaccgctggccgcggtgacgagcgcaatgagacgaggcgggcgaggagcagattccatgctcttcgcccgcctcattgcgttggtgcgaaggacgccgaagcagcgcagaggattcacgaagcgaactagtggtctgtcttgtattcgtctgagcggcattgcctcctttgacggaccgttgccgtgaagcagacagtggcggtacgttgccccctctgatgggacgttgccgtgaagagctgtctgtagacaacatgcgagccgacaagcgagctagcaggctgccgcgcggagcgcgtccatacttgcgggacgggctggcagcgtagctgactggggggagagacacaaaaccgaaatcctcaatcattagcgaaacaaaccactgggccgcctcggagcggaataatgcccgcgacacgcagggagtgacgtaatcgcgcgcgaagaatgacacagttgcaaacgtttattgcaatcgattgcagtctgtaaaacggcgacaacagtggtaaaaatgtgcggttttgattactttgtctatccgaggttagccgttctgccgagagatggattgcactcgtttgcattcttctgggaaacagtgcacaatagattctgtcgccggaagcaacggtgccggtggcgccgactcaacgaagatgggaccggtagcatttagggtaagggtcgaagatgaatcgtacaatcaaatccgcagcagcgatattcgccgtggcagccatgtccatcagcatggccgcgtgcggcagcgacaccaactccaacgccgaggtcggagacaacggcaaggtctactacctgaacttcaagccgaaagccgccgatcagtggaaggacctggcacaggcctacaccgacgaaaccggcgtagaagtcacggtggagaccgcggcatccaacacctacgagcagcagctcaagtcggagatggccaagtccaacgcccccaccctgttccaggtcaacggcccggtcggctacgccaactggaaggactacacggcggacatgtccgacaccgaggtctacaagcagctgcagaacccggatgtcgcactcaaggacggcgacaaggtcgtcggcgtgccgtacgccatggagacctacggcctgatctacaacaaggacatcctcaacaagtacttcggcctgtccggcgcgaaggccaagtctatcgacgatatcgactccttcaagacgctcaaggccgtcgccgacgacatgcaggcccgcaaggatgagctcggcatcaagggcgcgttcacctccgccggcttcgactccagctccgactggcgcttcaagacccacctggccaacctgccgctctactacgagttcaaggaagacaacatcacgagcagccggccaccatcaagggcacctgcctggagaactacaagaacatcttcgacctgtacatcacggactccaccaccgagccgtctcagctgagctccaagaccggcgatgacgcgaactccgagttcgcactcggcgaggccgccttctaccagaatggcacctgggcatggaccaatctgcagaacgccggcatgaccgccgagcaggtgggcatgatgccgatctacatcggcgacccggacgagcaggacgaaggactcgccaccggctccgagaactactggtgcatcaactccaaggcctccgaggccgaccagaaggccaccgccgagttcctcaagtgggtcatcacttctgacaccggcaaggaggcgctgagcaccgagatgggcttcaccaccccgtacaagaccttcgatgacatcaagaccgacactccgctggttgcggccgccgtcgccgatcagaagtccggcaagacgcaggtcagctggaacttcaccatgatgccgtccgagcagtggaagaatgatctcggcaacgcgctcctcgagtacgcacagggcacccagagctgggatgcggtcaagaccgcgttcgtggacggctgggccaaggagtactcggccgcgcacgcgtcctgagtccgactccggcgtgaaagcgttgccccagtcggctgttagcccatgatcacgcaacgtcagcgaacggggtttcgataccatatcggaaccccgtttttacggcgaggtctggtcagcggctgacgggattcgtcagcccctcagcccttcgcctcggtcgtgctggaccgcaccagcatctgcgcgggaaagacctcaaacggcttggccgtcttccctgtctcgatgagatcaagggctttaagcgccgcgcatgtcgccatcgcgatcggatcctgccgcacggtcgtcaatccgatctcattggcatagaagctgtcgtcgtatccgaccatagacacgtcgaacggtacgcgaaggccagtgcgcgccagctggaacatgagcggaatcgcgataccgtcttcttggcatgcgatggcggtcggcatgcgatccatcgaaagcagttcggtggtcgcccggctgatgcggtcatcgccgtccgcgatgacgatggcggtcaggtcgataccggattgttcgcagacctgtacgaacgattcgtatcgctgctgcacgctgaagtgcagcgtcacggcacgatcacggcgtcggcgttgcgccgtatcggcagcatgtcgaagaactcgcggcgctcctcaatgctgaagatctggaagatcgacaggtcatagccgttcgcgtggaacacctggttcagcccttcgatgatcgaagcgctgaaccatagacgaatgtgatcgctcatcagcaaagccacgcgcagcgcgcggccggacttgagcaccatggccgagcgggaggatcaagaagttcagctcctcggcgatggccagcaccttggcccgcgtcgctttcgacacgagctccggtcgggtgaacgcgcgggagaccgtggagacggagacaccggccttgttggccacatctttgatgttgattcccatgccggtctcctttgcagtgagatgcgtctatgacacaacaataaacgcggacggcgtcgaccatgtgttgagcagtcgataagacaacgttatcatatgtgttattctgcatcggaaatgccaaaaatcagtatttccagcattttgccctgtgcttaggcagcgaggaaggagtgatggacacgctttctgtgacaacgtttgaccatcggtcatacgcgtggtatggtaaccttaaaccggttcgatttggtgctattcagcactgaggagactgaacaatcccaaattcggaccactcgcacgcagtagtgcgggtgtgctcaaggaggagaaagtaggctggcatgatttctatgactggcaaagcgattcgcaggtggtgggcactgttcgccctgcctacgttcgcagcattcatgattggtttcgtggtgcccttcatcatgggcctgtacctgagcttctgcaagttcagcacggtgacggacgcccagttcatcggcattgacaactacgtcaatgccgtgcaggacaaggagttctggaacgcactggtgtacacggtgctgttcacgatcgtgacgaccatcgtgatcaacgtggccgcattcgcgatcgcatacatgctcaccaagcggttcgcaggcaccaatatcttccgttcggtgttcttcatgccgaacctgatcggcggcatcatcctgggctacatctggctgctgttgctcaacggcgtgctggcccactggggtcgttcaatcacctactcgggtgtgtacggcttctggggcatggtcatgctgtactgctggcagcagatcggctacatgatgatcatctacatcgccggcctgcaggcgcttccgggcgatgtgctcgaagccgccgcggttgatggcgcaaccaacacccagacgctgttccagatcacgatcccgttgatga

SEQ ID NO: 2393 - DNA, 5316 bp, Unknown
  R50_10m  MAG No. k141_6979
aggctggataatcccagatccatgaatacggcgtccacacgttctatgcctcggtccgtcaacacctgatcgagctgatcgaaggcggcatgcaccgggatgaatcgatcggcgagcccctcccgttccatacgctcggtggccagccccagcgcttcactgtcacggtcaatgccgatgagccgagcctgcggcgcggctttgaggaaggcgatggaatggccggcaaggcccagggtgcaatccgctgcgatggcgttctcatgttccagggcaggtgccatcaggttcacgcaatcgtcaagcaataccggcagatgaatattcgccacatcaaccatcagaattccacctccggcaacacatcgtcagcaatatcggaatatccctcttccttctcggcgaggtaggactcccacgtgtccttattccacagttcggcacgggtgccaacgccgatcaccacgacgtcggaacccagattggcgtaatcgcgcagcatctgcggcaccagcacgcggccctgcttgtccggctgctgatcgacggcaccggaaaggaacacacgcaggtattcgcgggcggctttgtttcccaccgacacacgctgaatctgcgaggcgatacggcgaaattcatcgaacggcagcaggtacacgcaccgttcctggcctcgggccatgaccaggccctgccccagctgggagcggaatttggccgggagcgccatacggcctttggcgtcgatcttcggcgtatatgtgccgagaagcagcggcggcagaccagccatgagatcagccatagtggtggagccttgtgcgttggcatcagcgtcgcgaatcgtctgatcggcaaccatggctccacctccttcatcgttacgtgggatacacttcggccaactggttcaccactctaccccacgattccccatttctccccactcatgcacgatttgctcacccttttagggcaattaccgatggattgcgcgtgtcggccacgactgtcgcacgaatgggcgctccgcacatccaatccacgttgcgcactccaccgaccgagcagcatggcgaattcacgctgaattcacctattccgggttgtccgcatcactgacgtagggggtgtgcggtaaatttgaatgccttaagttttttctgccccacggaaatggaacgaagagaacagcatgtcgagttacgcctcccagctgcatgaggagcagcaggccgtcgatcgcgcctatggacgattggatgatctgcgagccgaaatgtggcaacgcctggacaccgtacgcgccgccggctcccacggatcccccacgcaacgcagcgaacgagactcctttgccacaatgtacgaaaaccgcctcacgcaattgcgcagcgttgaggatcggctggtgtttggtcgtctcgacgccaagaacggcgaccgtcattacatcggccgcatcggcctgtcgagcccggaccatgagccgattctgaccgactggcgtgccgaagccgcacgtcctttctatgaggcgaccccctccaatcacggcgacatcgtgatgcgcaggcatatcaccttgagtttccgcgaagtcgtgggcgttgaggatgaggtgctcgacgtgcattccgaccaagtcggccaggcgtcttccgccggcacgttgaccggcgagggtgcgctgctggcttcgctgagctcacgccgcaccggcaagatgaccgatatcgtggccaccattcaggccgagcaggaccgcatcatccgctccgacatgaatcgtgccgtggtggtgcagggcggtcccggcaccggcaagacggccgtggcgctccatcgcgccgcctacctgctgtacacgcaccggcgcacgctggaacgttccggcgtgctggttgttggccccagctcggcgttcctgcactacatcgatcaggtgctgccctccttgggcgagaccggcgtggtctcacgcaccatcagcgatctgattcccggcatcaccgccacggcggtcgactccccttatgcagccaagctcaagggcgatcgacgcatgacctccgtagtggccaatgccatcgccgcgcgcgtgcgtgttcccgctgttctgccgacagtaaccattagcggcattcacgtaccaatgctggccactgatatcgagcaggcgcaggcggacgcgaagcgcacccggcaacctcataacaaggcccgcgagacctttatccgttcgatgctgaccagcatgcagaaccgttatgccgaacagcttgattacacgccggatcaggcggagctgaaccgcgcgatgtcgttgctgcgtatgaacgagcaggtgcgcaagaccctgaacctgtgctggctgccgatgaccgccccatggctcatcgatcagctgttcgcccatcccgaacgtctgaagtctctggctggttggctgaccgacaacgacatcgcggcacttgcccgccccaagggctccccgctgacccgctccgatattccgctgctcgacgaagcgatggatatgctgggccccgatcccaagacggtggcccgccagtccgccgccgacgcacgtcgtgccgccgaagagcagtatgccaaagacacgctggccgcgaccggtctgggtggaggcatcgtctccagtcagatgctgctcgaccagatgaacggggacgacgccgagctgaccgcgcagcgggccgcggccgaccgtgaatggacctacgggcacatcgtggtcgacgaagcgcaggaactgaccgccatggactggcgtatgttgatccgccgttgcccctcccgctcgttcaccatcgtgggcgatgtggcgcagacctcggcgctgggtggcacccgacgctggagcaaatcgatgaaccgcctgttcggcgaaagccactgggatctgaacgagttgaccatcaactaccgtaatccgcaggaagtttccgaactcgcctcacgatttgccgagaaggaaggcctctacatctccacggtcaatgcggtgcgcaccatccccgattcggtgtcccgcaatgtggtgcccgacatgtcgtccttgctggaaacgacggccgagcaggcggcgcagcttgccgaacaattcgtttcggcagacggcaccggccgcatcgccgtcatctgtccggatgatctcatcgccccggtgcgcgacgccgtgcgccgcaaactggccgccgttcttgacccggccgaatacgcaaggctcatcgagcagcccgaatgggatgagcaaatcagcgtctgcggcaccgaaacggtcaagggtctggagttcgatgccgtcgtggtggtcgagcccggtctcatcgaggatgacgcgccgagccgcctggtcgccgcctcggacctgtacgtggcaatgaccaggccgacccagaaactggttatagttcggacaagaacggacgaaaagtccctgaacatctaaggtatgaagcatgcccaaagcactgttattggaaaacattcaccccgacgcggccaaatcgctgcgtgatcacggtttcgaagtcgagaccatgaagggagccctgagcgaggacgaactcatcgacgcgctggatggcgtggacttggtgggcgtacgctccaagaccaacgtcacagcccgcgtgctggatgcgcgtcctacgctaagcgccatcggctgcttctgcatcggcaccaatcaggtcgatctggcacatgccggcaagcgtggcatcgccgtgttcaacgccccctactccaacacccgttccgtggtggaattggtgatttgcgacatcatctgcttgatgcgccgcattcccgcacacacgcatcacatcaagcatggcctgtgggacaagtccgcttccggctcgcatgaagtgcgcggcaagaccctcggcatcataggctacggcaacatcggctcccagctgtcggtactggccgaggccctcggcatgcgcgtggtgttctacgacattgaggagaaactggcactgggcaacgcccaccgttgcgataccctcaacgaactgctggaacagtccgatgccgtgaccctgcacgtggatggccgcaagtcgaacaccggcttcttcggcgaagaccaattcgcccacatgaagcaggacgcgattttcattaacctttcgcgcggtttcgtcgccgatctgggagctctgaagcagcacctcgattccggccatctgtctggcgcggcggtcgacgtgttccccgttgagccgaagaagagcggagatccgttcgagacctcactggccaacgaagacaatatgattctgactcctcatattggcggctccaccttggaggctcaggaatccatcggccatttcgtctctcagcgtcttgaggattactggttcaagggttctacctcattgtccgtgaacctaccgcagatcaacctaggtgaacgcaagggcgtgtgccgtatcgcccatctgcacgacaatcttcctggtgtgctggctcatgtcaatcgcgtgctcggcgaagagaacatcaacgtttccttccagtcgttggccaccgaaggcgaacttggctatgtggtcaccgacgtggctcagaagcccagcgccgccacgcttgaagcactacgcaacatcgagggcaccgttcgcatgcgtgtcatcagctgacgcagctcatcctcgattgatatgaaagagacccgtcgctgtgaactgcgccccgattgttggacgtggtttattaagggtacctgattaggctgtgagggacatgttccggaattcctccggggtgtgtccctccagtcgtatctggcggcgtttggtgttccagtggatgatgtacgcgtccagttcgttcttgaactgttcgtatgaggcgaactcgcgtccggcgtagaactcgtccttgaggtggccgaacacctgctcggtcgcggcgttgtcgatgcagttgcccttcctgctcatggactggcggatgttcagtcccgcgagccggtcgcgccaccaccggtgccggtactgccaacccatgtcggagtgcaggatcgggttggcgtcttcgggcagcttctcctcgagcatggcgagcaggcgccactgctgggccatgtcgggatgccggctgacgtcccaggccacgatctccttggatcccatatcgtatacgggagccagatacgccttgccgtcggcgaccctgaactcggtgacgtccgtacccagcttcacccacggccggtcggccgtgaagtcgcggttcggcaggttctccaccctcgcgcccgtctcgccc

SEQ ID NO: 2394 - DNA, 3149 bp, Unknown
  R50_10m  MAG No. k141_7113
ccttggcgccgaggaaggtctcgtcgtcggtgcccttgacttcgacctcgtcgccggccagagccttggcaagggcggagcgcttttcgtgagccacgtccatgttgttggccttcagtgcttccttgacctgggtgccgatacgccacaccgggttgaggttgctcatcgggtcctgaggcacgagacccatcttggtgccgcgcagcttgtcgaactcgctctgcttggcgccggcgatttcctcgccgtcgagcttgatggagccgttgaccacgtgaccggtgccgggcagcaggcccagcacagccatggcggaggtggacttgccggagccggattcgcccacgatggccacccactggccggggtagacggtgaagttggcatcgcgcaccgcatgcaccggcttgccggtgtcagtggtgaagtcgatggccagatccttgacctcgagcagcggaccatgctctttctgcatagccagcatcttggcgttggtattgtcagtcataatgattctccactcccctcgctcaggccgtacggctcttcggatcgagggcgtccttgacggcgtcgcccatcatgatgaacgcgagcacggtgatggccagtgcggcggacgggtagaacagcaccatcggatcggtctgcaggttggtctgcgcgctggagatgtcgccgccccagctcaccgtggtggtgggcaggccgacgccgaggaagctcagcgtggcttcggccacgatgtaggaggccagcgaggtggtggcgatgacgatgatcggggccagggagttcggcaggatgtgacggaacaggtttctggcaggcgtggagccgagggccgtggaagcggtgttgaattcgaggttcttcgattccagcacggcgcttcgggcgatacggcatacgccgacccagccgaagagcgtcagcaccagcacgatcttccagatggacttggaggtcttgaacatctggagcaccacgatggcgccaagcagcataggcagcgcgaagaagatgtcggtgatacggctcagcaccgcgtcgacccaaccgccgaagaagccggcgacggcaccgatcagggtaccgacgatcacgaccagtagcgtggagagcacgccgacggacagtgaggtacgggtgccgtagaccacgcgggtgtacacgtcacagccctgcaggtcgtagccgaaggggtgtccggtggaggcggggctcaaggagttgcccagatcgcaggcgttcggatcctgcttggtgaacagaccgggggcgatggccaccacgatgatgaacaggatcagcaagccggagatgatgaacagcgggttgcggcgcagggttcgccatgcgtcggcccacatgctggtggccggtgcggattcgtcgacggaatcgacgtcctgcaacggggtctcgtcgagaggagctacgtaacggtcctgaccgggcagggtttccatgaagtattcggttcctggctcgccggtctggttgagctcgttttcagtggtttcgtttgccatgtgactcactcctccctatcacgcgtaacggatacgcggatcgagggccgcgtacagcatgtcgacgacgaggttgcacactacgaaaatcagcatgagcaacgtgacgatggacaccaccaggtttgcctcgcccttcagaatggactggtaggtgaggaagccgatgccgtggatgttgaagatctgctcggtgatcatggcaccacccatcagggcgccgatgtcctggccgaggtaagtgacgactggaatcagggagttgcgcagtacgtggcgcagcatgacctggccgttcgacatacctttggcacgtgcggtgcgcacgtaatcctcggcgatgttggaggagatttcggagcgggtcagtcggatgatataggccatcgacaccgaaccgagcaccatggccggcatgagcagatcaaggaagccggggtcggcgcctgccgtcaccggcaatatcgcccactgaataccaaagacatattgcatgacgaagccggtgacgaaggtcggcacggaaataagcagcagggagacgatcaggataacggtgtcgtaccacttgcccttcttgaggcccgagataatgccgaagaccacaccgaaaatcgcctcgaacacgaacgccatcaagccgagcctgatggtgaccgggaaggcgcgggtgatttcgtcgagaacgggctggccggcgaaggtatcgccgaagttcagggtcagtgcattcttcaggtagatgaagtactgaacgatgaacggctggtcgagatggtattctgcgcggatctgggctgcgacggcctcattgacaggcttgtctccgaacatggccttgacggggtcgcccggcagggcgaatacaagggcatataccagaagagtcgtaccgagaaccacgggaatcatctgcagaatgcgtcgcagaagatacttacccatacggttgctccttatttcctagaccggccagaaagggtatagtacgcccccgccggtcgataaatactccgacagtttaccgcatgcccggactgtgatatgtaaatttgcgttaacgcaaggtttgagattgggcaatgctggtggatatgtccatggttgcggtcggatagtggatactttaacttggttcccgatggcgtgagcaagcacccctcacacaacaaaaagggcggggatcttgcgatcctcgccctttatttccgaactacctaacggtatccgttcagtgagtcagactcacttcttggacatctcggtgtaggtcgggaggttctgccaatcgaaggcgtagccggacttcacgttgagggaagccacaccggaggcgttggagtagtacagcgggatggccggaaggtcgttgaggaggatctcctcagcctgctggtacagcttgttggcgtcatcagtgctggaagcggcagcggcctgcttgcacaggtcatcgaaggccgggctcttgtagtcaccatcgttggagccgttgccatcagcagcagcggtggagtacagcggccacaggtagttctcggcggacgggtagtcaggctgccagccggtacggaaggcgcccttcatctgacggttggtgacggcgtc

SEQ ID NO: 2395 - DNA, 13859 bp, Unknown
  R50_10m  MAG No. k141_7322
ccattgcaccgacaatcgcgcgtcctccgtcacggcgtccaaaagacgcggctcttcgtgaacgcctacaccgagctcatccaatcgggccagcatatcgcgcaactggctgataaacgcatctgaaatacctcgagtgaacctatccgcgctggtcgagccgcctgccgacgtcggagacagcgaatccgacccttgttgcgagaggcttgattgtgcggaagcggccgagccgggcatctcgccggcaccggcatcgcgtatgagtttcgcccagtcatcctgggcaaagtagacgcgtagcaaatcacaggtgccgcaatcatctcccgctacggcatggcgcagatgcacggccatgacttgacgcagcaaagcatcctgttccgcaccgttcaacaatcgaggcgacggcaatccagttccctcgcgcgaagctgatatggcccggaatgccacggcacccagcgtggtgaccggcctggcctgcacggaaaacccgagctcacgaatcacccgattgcccaatgcgtcggcggccacacggccggatacggccatcaccgcctgcgtgccaccgtagcggcgcagccccgccatcaacaccgataaggcgaattcggttttgccgcttccaggcgtgccgacaatcagcctcgccgctccatcacggtcgatgccgtccagcactgttccaggttcaagtctcgtcatcatggctccagcctaaacccgaccgtcacagagggaaaaattttaccgaacccgacgaagaatcgtacccttgacggtatcctgtagaacgaatgcagggagagcgcattttccaaggagggagggaacagatggccaatattccgatgaggccgccgaagctgcccggatatgatttcgtccagatgttgggaagcggtgccaccgccacggtgtacctatataaccagcgtatgcccgcacgcccggtggcggtaaaggtcagcgccaaaacccttgacccacgggccgctgccctgttcaaccgcgaggccaacttcatggccaagctgtcatcccacccgtacattctgccggtatatggtgccggcgtcacctccgatggccatggctacattgtcatcgaatatgcgccgggcggcacctacaacagcatcatgaaggcccggtccatgacctgcgagcaggtactcgacctcggcatcaagctgtcaagcgcgctgttcaccgcgcatcgcagcaatatcatccatcacgacatcaagcccagcaacattctcatcacctcgcagggtttgcctgttctgggtgatttcggtatctccaccgatgtgtatgaccgtaccgaaaccggattctcgccgccgtgggcaccgcctgaagtgcttcagcatctgaccaatggttcggaagccgccgacatctattcactggcggccaccctgtacgccatgttcgtcggctgctcgccattccagcacgaatatcatccacgttcgcaatcggaactgatttcgctgatcgtcaatcagccattgcctcgcctcaaccgccccgacgtaccggccgatgtggaagcggtgctgcgccgggccctgaacaaggaccccgaccagcggtactactccgcgttggagttcgcacgcgccatgcagcgtgtgcaattcgcatatttcgggcatgccactcccgttaccgtggaagggatgccggcctaccccaaagacatcgagcgtcggcgccgggccacggaccagcgagatcagaccacccgttcgtcacggcgatgggtcaaaccggtgggtattaccgtcggtatacttgcggcgatcaccgcagcggcactgatattcgccttcgtggtcgttccccgcatggacagcgccaccggatcagataccaaacaggtggcgacgcccggcaccaaggatgatgacaacaaccgcaataatcaggatgacgtgattaccgataccgcgaacgcccagattccttccccggagaatctgaacggcacctatgcggcggatgggtcatccgtgacgttcacctggacgaatccagacccgcaaagcggtgatacctatgcgtgggccatagtgcagggcagcaataccgaccagagcgcgcaaaccgtcacaacgtcagatcccacggtgaccgtcaacgcgcaggaaggctcgcagacctgcattcaggtgtccattgtgcgcaagaaccgccagatgtccgtcagccccgccatcgcctgtgcggccaagccgcaagagtgatccgctcgccactgccgggcataccaccttggcattgcgtatcgcatcaggcatgcgcccggcagtggcgaattcaccaaatggacaacaggaacggcaggtattggaaccgtaaagcgttgtcattacactagcaaccagagaaaccagggttcagggagttcagatggccacatcgtcccagtcatacgatcgtcgccgacgcatcagcgcggctttgcgccgccttatgccctccggagggcatacgtggacggttcccgtaatcacgctcctgctgcttctgggacttgttgccggcgcggtgatcatgagcaccgtcacgcgccgccatgtgcaactggacgatggcaccgtatgggtcacttcgctgaagaaccagaaggccgcacgattcaacgtaaagaacaaggaggccgacgccggcgtctcctcctccgccccacgattcgacatcgcacagcataatggcgacaccatcctgaccgaaacgaccaaagcctccaccatcaaggcatccacggtcagcaccggtgtcaagaccgacatcaaagccaacaccaccactgtggtcggcggggataccgtagccctgatcaacgagaagaccggcaatgtgtggaccggcttgtcggaaaaccttgattccgtggcccccaccacttccgatccgaaaatgaagctgggcgagggcgggcgcatcgtagtaacccacgatggcaaggtctacggataccgtccatccgacggtatggtgctgcgtcttgacaatcccagcagcgccaaggccaaaaccctcgaatcgctgaccgacggcaagcagcagaccgttgaaagctttaccgtcatcgggagcacgccggtaatcgcaaccggcaaaaccgtcatattcaagggcggccgcgtcgatgtcgacacgaccggcaccctcacccttcaggagcctcccaccgatgacgtacagtccgattgggtggccgcggcatcaccgagaggccttacgcttatcccgttgaagtccaatgccaaggcgaatttcatagccaacgggggcaaggcgaatccggcacgaccggtatcgtccaagggctgcgtgtactcggcttggagccagaaggccagcaactacattcgcgcctgctcccccgcggataccagcgtcaagccgcaaaccctcgaatccgtcaatactacttccgaattggtgttccgcaccaaccatcgccttgtggtgctcaacgacacggttaacggcaatgtgtggaaccctgaggattccaccaaagtcatcaaaatacagtggaacaaaatacaggccgagcagaccgagaaagaacagcagaacaacgactcggccaacaaccaccacgacttctccaagacctgttccgcacaatccggccaaatcaaagccgaggatgatgaaatcggcgcacgagccggttcggaacagattctcgacgtgctgcgcaatgacgagcagaccgattgttccgtgctgaaaatcaccaaggttggcgcaccaaacaacaaagacgtcaccatttcgccgatttacgacggccggtatctgcaactcgatgcctccgccacatccgcaggcaccgttacctttacttacgatatttccgatggccgcggccagacctcttccgccacggtgaccgtaaccctgaatgatggaggcaaccacgctcccgtacagttcgacactcctcccgagatcgatgtggagcagggagccagttataccgccaatgcgctgagcagcttcaacgatccggatggagacccgctcactctggtctccgctgtggcccagaacaccgacccggtgcaggtgtccacccgagccgacggccagcttacgttcaacaccggtgcgctggcgtcgggacgcgtgggcgtcgaggtcaccgtctccgacggcacggcgaccggcaccggcatggtgtatttctcggtcaagcccgcgaacaccttggccgcggtcatcgacccggtagcgaaaaccaccgttcccaacacggataccgtcgtcaagctgtcctcttacgtgcatggcacttccttgcagccggcacagctgactcaggtggatacgcccaacggcgcttcgacgaccaccaatgcggcggatatgtcgttgacgttcaaggccaccaatcccggcacctattatgtgccctacaccattactcaaggctcgattccggccaccggattggctcgagtcgaggtgcagcctgccaccggcgaggccgccaaaccggttgccgccaacgatgtcgccctgcttggcgcggataataccgccattgtggagccgctcaccaatgacgtcgatccgatgggcggcgtgctgtccgtcaccacggtgagcgcaccggccgactccggcatcaaggttggtctcgtcagccataagcgcgtgtatatcactgcgcgtcagatgcccacgaaacccgtcgcccttacctacaccgtggccaacgcctccggaaccgccaagggcaccatcgtgttgcagccaccggctctgaccacctcgaattcagtgcccaaggccagcaatatcaatgcccaggtgcgcaccggcggcatcgtgtccgtggatgtgcttgaccatgtggcctactcggatggcaccacggtcaagctcaagaacaacctgcaatacgacaaggagacgttcaagggtctggccttcgtctctggagacacggtccgctaccaagcatccagcgagaccggcaacttccccatcacctatacggttgaagacaatctgggtaatgtggcttccgccaatatcaccattaccgtgcataagagcgacgcagcgagcaaggccgtgccaaccccgcatgacgccgaagcgcaggttgccgccgggcagaaggtccgcatccccatcatgctgaccggcatagatacggatggcgacgacgatcagctgttgggtctgggcaacaaggcacccacgctgggccgcatatccgaagtcggttccgactacttggtctatgaagcgtatccggattcgtccggcaccgacaccttttcctatgccgtggaggattggaccggtcagcgcgcacaggcgcagatccgcgtgggcgtattccaaggatcgtccgactccggcgtatacgccagggatgacgaaatcacgttgaggcccaatacggccgcaaccgtgccggtcgcgcagaacgacatctccggcgacaacaccaatctgaccgtcgacaagcatgtcgatgtccaaggtctcgacggggtgagcgtgaaagacaatatgatctccttcaccacgcccggcagcgccaccaccgcctatatcgcctatacggtcaaagacaaggccggcttgtccgatacggccaccctcacggtaaacgtggatccgaatgccgccatcgagccgcctaccgcctacgactatcgtgtgccgtccgccgccaccatcgataagaagtccgtggatgtggatgtttcccagtggatcgccaatccttccggcacagccaatgagctcaaggtcggcgtgcatccctccgccagcgctcacgctcacgtcaagggcggcgagcattcgaccaccatcaccgtcgacctgacgtcacaggcgcgagctgtgccttacacggtgaccaatacgaaatacaacatcacctccaccgcgttcatccaggtaccggcctatggtgtctttccgcccacgttgcgtcccaaggcaccggaattgaaggtcaattcgcgcgaaaccattgaaatcaacatcaatgactatgttcgcgtcggcgccggcaaggaaccgtatatcgaaagcgctgattccatcagcgccaccaaggcttccaactccgatttctacgtgaacgacaagaccctgaagttcactgctgcaaaagactacgcaggccccgcctccattacctttaccgctgtggatggcaagcagggatcggataagaccaagatcatcaattccgcagtgatcactctccagatcacggtgataggccgcgatgtgccgccgcccacgttctcgtcctccactattgatgtcgaggcgggcgcggaccccaagaccgttgatctggcggcgctcacccatgcaccgtccggcgtgtatgacgacgaaaagcaatacacgtattccggcggaagctcatcgtccaggcaaatcaccgcaaacctgtcccgttccggtagcttgcaggtttccgccaccaaggatgccgctcctggcaccaccgcgtccattcccgtgcaaatcgcatacggcgcgggcaccgtgaatgccggtgtgaccgtgcgcgtagtgtcttcgacccgtccgctggcacacgtcggcgacaagacgttgaagatcatggccggtgccagcgatgtcgtgaacgcgcttaccggcgcgtacaatccgttccccgattcctcgctgaccgtcatcagctgcaaggcggatgacgccgccaaactcaccatcgccggatgcgatgcctccggaaacgtcaccatcgccgtcgcatccgatgtgggtgcttccacgaataccgtgctcgtcaccgtgcaagacggcaccaagtccaaggatcgtgaagtcaccgcatcgattaccgtgtccgtgatcgacaagcccgagccgccactgctctcccccgtagccggggaaccgcaggacagcgcggtcagcctcacatggacgcccggtgccgccaatggcagcccgatcaccaactacaaggtcagttggaccggtgccgccaccggagagaaggattgcggtgccgtcacctcatgccaggtcactggtctgaagaacggcaaaacctattccttcaccgtcgccgcgcgaaatgacgtcggctggtccaagccgtccaccgccgtcgaagccacaccggacaaggtgccgtccgctcccaccgatgttacggtcacgggtggcaataaaaccgccaaggtgacatggaaggcaccgagcggtgatttcagcgccgtcgacaactactcggtgaccgtcaccggtgcaggtgctccgcagaccaaggaaaccggcaatacggccaccgagctgtcgtttacgttcaacaacaacgacatttccgatggcaccgccatcacggcgaccgtcaaagcccataacaaaatcaattggagtgccgagtccgccgcatcgccgtcagagaagatctggggagacccggatgcgccgaacattgcgttgtcgaacgacgacaccacggtaacggcgaaagtcactctcggcaacaaccgcaatgccggctgccggaagatatcctttggtggcgacgctggcggcgaagcctcttgcgagtcaccgagctcccagtcgttctccatcgatgagtcgttgctcaacaccacaacaatcaccgtaacggccaccgtggtgccgcagcgcgatgcttccgccggcacgggcgagagcagctttgtcccgcagtacaaggtccagccgcccactgacgtctacaccaccggatccggcagtacatgcaccgtgcattggaccaagcatgggcatgcgcagtcctacagcgtgactgccgatggcatcgattccggtacagctactaaccggaactcactcgacttccgaatgagtccttgggccagatgcaacaccgcatcggtgcaacaggtgttcaacggcgctaccagcgatgccgccaccggaggcccgcgcaatggcgctccctacacctatgagaagaaggctgtaatcaacaaaccgcaggagctgcgctggtcagacaacgctcacgtcattaacgtcaccggcggttcggttgaggtctatggcaagcaggccaccgtacaaatcatcatcaatggccaaccgttcacgtggaactccggccagccattggatgtcaccgacttggccgtggccgccgatggcaactacgcgtggagcgtcaaagtcaccggcgggccgggatactccggtctcgacaacactgcgggcggagacagcgtcgcgggcacacgcccctctggctcctcggaggggaccgaatcgctcaaatccggtaccgatgtcatcactttggccaagaacccctggattcttggtttcggcaataccccaatatcgtcaaccaccattcacaagcagtaggagaacatccatgagcgagaacatcgacgacgcgacgcagctgtctgacagcacgcagctatccgacgccacgcacttgtccgatgccacacatctggcatcggaaccgcacactggcaccaccccgaacaccgagacggcacagcaacccgttgcgttgcctaacctgccgcagcggccgtcacaagcgtcgtcagaaaagccgtctcctactactgatgccgcctccattcctgcgggcaatgacagcaccgtgctcaagccgcgcaaggacgcggcgccagccatcccgcagcaggtcggcatgccggcaaagaccagcacgcccaaagtcgcgcttccgcacttcggacgtaaatccggcaagcaggccgctactgcgaatgctgcccccgccacccagacctcccgtcaatggacgaccacaaccgccggcaagaccgcagcctccaacgccgaaaccgtggctggtcgcgggccggtagccaatcagcaggccgccgcgcaatcccagccgcaatcccagccgcagcgtcagtcgagcaaagccgcgcaagcagccgcatcggcactgcccgccagcatcaattccggactactgccccagcccacggctcaggtccgggatttccagcagtccttcaatgcgctggtcgagaatgtctccaaggtggttatcggcaagaccattcccatcaagcaatgcgtcaccgcactgatggtcggtggccatattctgcttgaagacaaccccggcaccggtaagacccagttggcccgaggcttggccaactccatttccaccggtttcaagcgtattcagttcacgcctgatctgctgccttcggatgtggtgggtgtgactttctacgatcagaagcgcggagaattcgagttccgcgagggcccgattttcgcctccatcgtgctggccgatgaaatcaaccgtgcatcgccgaagacgcagtccgcacttctggaggttatggaagagcagaaagtcaccgttgacggcgtcacccatgatgtaccgcagccgttcatcgtgatcgcaacccagaaccccatcgagcagctcggtacctataagctgcctgaggcgcagatggaccgcttccttatcaagacgtcgattggctacccgggccatgatgtgtccgtcgatatcctcaagcaggtcgatatcaccgaccgtgcgcagaccatttccccggtgctgagcggtgacgatgtcatgcggctgcgtcaggtggccaccgaaatctatgtggatgatgcgattcgtgaatacatcgtcaggctcgtcgaggcgacccgccacaacgagaagatcacggtcggctcctccatgcgtggcgctttggcactgacccgatgcgcccgtatctgggccgcggccgatggccgtgcctacgtggtgccggatgacgtcaaggaccttgcagtggccgtgctcgcacaccgtatcacgctgactccggaagccaccttcgatggcgcgactccggaaagcctgatcgcacaggtgctcgaagacgttccctcccccaccatcggttcctgatagggcctggaaaggtatccgaccatggcatctacatccgccgcattacgccgtcgccggcgcgctgaacgcatgttcaagcgcgcggtaagacgcatcagacggttcttcgcatcctacgtctcgcccttgggctgggcggtaacgggcgcaggcatcgcatgtcttattgcgttcctgcctctgggctggtatgagctgctcgtattcggcatcgtggcgatggtgatgatgctcgcggcaatcgcgctttccctcggcaacacacgcttccacgcgtccatcgccgtatccaatcatcgcgtgaccgtgggagacaccatatccgttatcgtcggcatcgacaacaccggcaaaacgccgacaaccacggcacgcggatatctgccaatcggcgatgcgcatgaacgattcaacatccccatgctggctcccgggcaatccaagcaaaccgatgtggagttccgtacggtatcgcgcgcaatactgcccatcggaccattgcgcatccgcaagggagacccgttcggcctggtacgtcacgaaaaggagctggccgaccgcatcaccgtattcatccaccctcgtaccgtgcgtctcgataccctgaatgccggcgtgccccgcgatctggaaggccaaccatccggccagatcgtggatgatgatctcgacttctacggattgcgcgaatacgagccgggcgacgacgtgcgtaacgtccactggctgagctccgcgaaaaccggcacgttgatgattcgccaatatgaagccacgcgccgcaccgacacctcggtgaccatcagcgtgaacccggatgagtacgtcaacggcgaggaattcgagatggcggtgtccatccactcctccatcggcgtcaaatgcctgctgcaggatcgcccgctgttctgtcacgcgggcaacgcgcacggccagccgcgcaacgccatggagttcctcgacaacgccagtgccatagagcctgatcgtgaggacaatccgaatctcgccgagggcacgctgaagcacagtcctgatgcttcgttctattttttcactgttggatcgctgaaagacatcgagcaaatcaagcgcatgaccttggccttgccccgatcggccagctgcgtggtattgcaggccagcgccggcgccaatcgcggcatcagaagattcgccaacttcacattggccaccatcggcgaactcgatgatctcccactgatcatgggggtgctcgcatgaccttcgaccagtccagtatcaccaataccaataccgctgcgtacgccggatcgagcggcacatacaccggcacttcctccggcacgtacaccggaacctccaccaccaccggctcctgggccgactccacacattcggttatctggatgaccagaggcaatgtgcttcgcggcatgggcctcagtcgccagccgtggggcaaacgaatcaccagcctcgtactcatagcggcgatgatgttgctggcgcaagccaatctcatcgacgtgtacggcggcgtggccacttgggcgatcgccgccgtaccggccaccttgctgggcgcgatcatcgctctggcgggcatgttgccggcgttgcgactgtggtggcaaatcgtgtttctggcgtttgcccaattcatcatcggtccggtggtaacgctgagttccaccacgtcccattacgtgattcccaccttgaagaccttgagttcaggttgggaaatgacgtttggctcgttcaagtacattatttccgtcgatccgcctctgggcacgcaagacggcgtgctgctggcggtatggaccatcggcctgtggcttacgttcctcaccggcgtgtttgccattaatgccaacgcatggttgtctctggtgggagtgccgccccttgcggcggccgtggccgtatgtgctctgctgggtacggacagcggctggcaacgtgccatctgcggcattgcctttgccttgctgctgattatctggctgtcttggcgtcttgaactgctggaatgggggcgctggatatccgcgctgatcatcgtcgtgctcgctgccggccttgctttcggaggcacgttgctggtgccgcaggaccgtttcgtgctgcgtgaccgctacgatccgccgttaagcccctacgattacaccagcccgctcagcggcatgcgatcctatatcaaggaccacaaaaaagacgtgttgctgaccgtccataatctgccggccggaacaccagtcaaacttgcggtgatggatcgattcgacggcacagtatggaacctgtccgattcttccgaagccacggactcctcgaattatcatcgcgtgggcaccacgatcaaggcggatgagcagggtaaatccttcactgcgaccttcaccgtcgatcagggactgaccgacacctggctgccgctggcgggagcggccactggcgtgagcttcgccaacgatgccgacaacggcaatgacacgttctactacaacacggataccgattccgccattattcccgccggcacgcgtaaaggcctcacctataccgaatccggcattatcgcccgcaagcccaccgataagcagatcagcagtgcggccgcggcccgcatcacccaaccggaagcccaggatgttcccgattcggccagcaaactggccacgtccattgccggcggacagtcctcgggcggtgccgcagccacggcgttggccgacacattgaaagactccggatggttctctcatggactcgaaggcgattatccctccgatgccggccatggcaactaccgtatcaacaagctgctggcaggcacggccatggtgggcgactccgagcaatatgcctccgccatggcactgatggctcgtgagctgggactgccctcccgtgtggttctgggcttcctgccgaaaaacgaggatggcgaaatcaccgatgcccgcacggagaagacctcgggcaatggcaccaaaatcgaattcaccggcaacgatgtcaccgcttgggtggaaatcaaattgcagggcctgggatgggtggcgttctatccgacgcccaaggagaccaaggtgcctgatgaaaaccagaacctgacgccgccgaatccgcagacgctggtccggcaaccaccggtgccgttgaccgatccgctgcgcgatcagacgcaagccaggggccaaagctcattggccggcgccgacgccgatgattcgccgaccaacctgttctgggtgcggttctggcgagtgacccgcaaggtggccctgtacggcagcccattgtggaccctactcatcgtctgcggtctgattctgatgttcaaggccatgctgctggcgcgagcgcggcggcatggcagtccgaaagcccgtgtggcagcaggttggaatgccatacgcatgcttgccgagcaaagcggcatcacagccaagggcactcgtcgagatcaggccggtgccatcgcccgtcaactcggcacagatgaccaggctttgatccagcttggccgggaagccgactacgccacgttctcggggcaagacattgaatcgggccaagccaccacatattggacaggagtcgaccaattgcgcaaggcaatgctcacttctttgccgcgtttcaggaggatacgtacacgactttccctgaaaagcgtggctatactgtcaaatagacacgcagccaagtcgcacacgacgcatgtcaagcgcgcgcgtaagaaggggaagacgtcatgaccacaggctccatccgtatcgcgatgaccagtgacgtgggtcttaggcgcaagaacaaccaagacaccggattcgcccaacagggcgtgttcatggtctgcgacggcatgggcggc

SEQ ID NO: 2396 - DNA, 17058 bp, Unknown
  R50_10m  MAG No. k141_7381
cgtcatggtcgcggtgactcccggcatgaccccggtgggggagcctccgattctcggcatcgccgcgttcgctttgttcatggcgctgattaatgcgtcaatcaagccgattgtgcatctgatcgcactgccgtttgcgattctgtctctcgggctggtcaccttgattatcaattggctgttcatgcgactcgccagctggctggcggtcagtctgttcggcgtgggcgtcttcgtacacggtttctggtggtcggtactggggtccttggttctgaccattgttgcgggaatcgtcgggtccatcttggatcagtgacggtgctcgctgggcgaatatgaataatggcggttggaatcggactgattccaaccgccattactcatatcaagctacgggatcgagcagagcgaacgctactcgcgcaccaagcggatatgctccacatcgtcgcgccgggagcgacggaacagcacgaaacgattgccgatggactgcaccacttcggcgttcagctgctcggcaagctcggcggcggcttccttggcggtcaggccagaaccgtcctgcacggcgcacttgatgagctcgtgcttctcaatggtttcatcggcctgattgacggccgactcggtcaaatcgttcttgcccacatagaacaggggcttcagcgagtttgccatcgcgcgcagctgcttgatttgcttcttggtcaatgccatgggaatttccttacatctttcgtataaccacaccagcatagcaaccggtgctgtctgtgctgtttgccgccctacagcgcgatgatggcggcgatgtaggcgatgacggcgacggcgaacacgagatcttgcgcggcgatggtcagggcacgccagtgggtgcggcggatgctctcctcgtagcagcgggcgtcaagtgcgaggctcaggttgtccgcgtgacgcaacgtgccggcgaaaatcggcacgataatcgcgctcatcgccttgatacgctgggccagcgaaccggtttcgatggaaccgccacgcgcggattgggcatcgacgatggcacgggtctcgtcggtcagcgttggaatgaatcgcaatgccagactcatgaccaacgcgatctcctgggcgtggatgccgagccggttgagcgggctgatcagggtggcgaaggcgtcggtcatggcggtcggcgtggtggtggtgaggaacaccgcgcccaagatgatcaccaacgcgaaacggcaggcgtacagcacggctatggccacgccctgatcggtgatgctcagcgggcccagcgccaccaccggcgtgccggtgcgcaccacaaacagattgaccacgcccatcagcaccagcagaatcagaatcggatgaatggattcgagcacccgtaacgggttcaggcgtgccgccgcgataacggccagggtgatggcgatgcccagcgcaagctggaggggtgtgttcaccgcgaacatcgtgaacatgacggccaggaagcccaccatcttcacgcgcgggtcaagtcggtggatcaccgagtgcgcgggtttgtcaggggagacggactcggcggggaaggcagtctcggttgccgagatgctctcagcaccagccgcgccggcaatcggcatacgtaccacgcgatcggcgatatgcttggcctccgctcggtcatgggtgatgatgagcacggtcacgccgcgcgatttgagcgtgcgcaacagctcatggatgcgctccttggcctggacgtccaggctcgcggtcggctcgtccatgatgagcacgtcaggattgcaggccagcacgccggcgatggccaccaatcgctgctgtccgccggacaggtcgaaaggggagcggtcggcaagatgcccgatatgcagcaggtccagtgattcgcgcacacggtcggccacctcggcctcggcgagcccctggttgcgcgggccgtacgccacgtcctcggccaccgtgtcagcgaacagctgatgctccggatgctgcatcacgtaacccacatgccggcgcaattgcgccaattgcctgcgattcgccggcttcggacgcgcgttgcgaccgcgtttgccggtcgaggccaccggaacgccggccacctcgatgctgccggcggtcggcgcggccagcgcgcacagcatgcgcaccagcgtcgacttgcccgaaccgttcacgcccatcagtgccacggtttcaccgcgcgcgatggtgaacgacaggtcatcgataaccgcccgtttggccgaaggatagcgataggtcagatgcgagacgcgaataatggggttcgtcatatcaccgatgccgtcggagagcagcggcagttcggagccgtcttcgcgcttccgctggcgggggctgtcgttcgtaggacgactgggggcggcttctgtgccgataccaccctcggtctcgctttgcgagacagcctccgctagcgggggtcgattatcggcggctgcagtgacaccaacgattcgcccggcctccatgtgcacgatgcgatcggcatgaacggtctcatccggatgatgcgtgacatgcacaatagtggtgccgcgcgcctgcaaatcatccaaaatgcgcataacttcggcgcgtgcggattcgtccagcatggcggtcggttcgtccaataccagcatcgccgggttcatggccagcatgccggcgatggcggcgcgctgctgctgtccgccgctcatacgggtcgggtcggactgacgcaagttcgccaaccccacggcctgcaatgaatcaacgatgcgctcgccgatgagcccgcgctccagcccgagattctccgggccaaaagccacgtcatcctccaacacggtggtgaccagctgatcctcgggattctgaaacaccataccgatgctgcggcgggcagcgcgataggcgtcggcattcgggccggctgcgtacacgcgctgttccagtagcgtcacttcgccaccgtccggcgcggtcaatcccgcaatcagacgggccaacgtggacttgcccgatccattcggaccgaccaagcataggcgctcgccggcatggaccgtgagcgaaacgccatccaaagcccatgaagtgccgcggtcatagctgaaacgaatgtccttgagtacggcggcggggggagcgggctcggcggaatcgtggaactcgtcggcgtcgaaggaatggggtgcaacggtcatgaaacagcaatccgtaactgataggcgaaaacgcagaatcccggcaagggccggagttctgcgttcttgttctttgagtggtcgttgagtggtcgttagtcgtggcgggcataggcccgtctcaggccggtcactgctgcttggacagcaggttggagaccggcttgtagatcaggaaggtgatcacggcgtgaatcgccatcttagccacgttgaacggcagcagaatcggcagaatcatcgcggccacagcctggtagggcatgtgcgcgtaaatcggcgtgatgatgaggttgcccaccagcgccaccacgatggccagcaccgcacccaccagaatgccgatggcggcacccttgcgcgtacggatcttacggtagatgaacgcggccggcacagacaggaacagcgccaccagcacagccatcagcgaaccccacgggtcggcgaacatgtgcggcacaaagccgagcacagacacgattgcggcggcggccggaccgtacgcaaagccggcgatcaggcagacgatgccggacgggtcgtacttcagccaagtgaccggcgtaatcgggaattcaatgaagctggtgaccatcgccagcgccacgaacagtgcatacatggcgatacggcgcgtggaccagcggccggaatcggccacaccagtggtgtgcgagccgagtttggcgctggtgctggcggtggacgcgctggccgaaccctcggcctcgggcgccacagaacgaacaacttgcatgcggatacgcgaagatacgctcataatgagccctcgtttcttccatccggactataccgttggctccggaatctcaccggatcagccgcttgcgcgggtcgcgggcttcccgccatccccgttatgaaacccggggtacaggttaccgccagtaaggaattgcaccttccctgaaactgacaggcttattcatacgccatgcgccggacgtacgcaacccgcgtttcactgtgcagaaattcgtcttgtgccggtcaagtgcaacaatgggagccatggctgaagtgaagaaacccaacaacaccattgacaagcttgccctgatcgtcaccacctacaaacgtcagcagctgctcgaggtactgttcgattcgattctggcgcttgagcaggcaccgtggcgcattgtcatcgtggacaatgagcagtccgatcagacggcggacatggtcgctgcgtttgccggcaaggtgaccggccagtggggcaccaccgtggccgaccagtccggcaacgaagagcgcgtggtctatgcgccgcagaccgagaacatgggtggtgcgggcggtttctccgccggcgtggccaaggcgtatgatctgggcgccgcatggttctgggtgatggatgacgatgtggccgtgctgccggacgccattgccaagctgtccaagtggaccgacaagcacgaggtgattcagggatcccgattcgattacgatggcggcccgttctactggcagtacgacttcattgtgccgctgggcatcccgaacccgatcgcgcccgccgcattcggcccggccgggtatcgagtgatggacacgctgtgcttcgaaggcggcctgttcaaccgccgtgtggtcacggaaatcggtctgccggacccgcgcttcttcatctactgggatgacacgatgtatggctaccgcgccagcaaggtcaccaacccgattgtggtgcccgacgtgattttgcgccgtacgcgcgaaatcggcaattgggatatcgccggcgtgcgccagctcaactccacgtccgacatgaaccggtaccacatcatgcgcaaccgcggatacatggcccggtacttcatgacctatggtgacttccgtccgctggtgtttggactgggtaccgtgctcaccgcggccaaggaagtcattcgcctggtgatggtggatcgcgagcacctcaagaccggtttggtgcagattgccaagggctggtgggactcgcgcaagctgatgcacgaccccacctggaagcccatgccgtcgcttgagtgacggccatgccccggcccgtccggcgcgtccgcgtgatggtcgcgttagactgggcgcaaccctacgaactgatgaaaacgtatggaaaggaaggtcaacgatgattgaaactgcacaggctttcggtgttgacattggcggttccggcatcaaggccgcacctgtcgatctgaccaagggcgatttcgccgagccgcgattgaagattctcactcccgaggtctccacgcctcaggccgtggccaaaatcgtcaagcagcagctcgaccacttcgaagtgcctgaatccgcacccgttggcatcgccttccccgcgccgatcaagcccggccagaagctcgacttcatggccaacctcgaccagtcttggattggcgtggacgttactgaagtgttctccgaagcctgcggccgcccggtcgtcgtggtgaacgacgccgacgccgccggcctggccgaagtccagttcggtgccgccaagggccaggatggtctggtcatcgccaccacactgggcaccggcatcggcaccgccttgatctacaacggcgtgctcatcccgaacaccgaactcggacacatcatcctgagcgccaagcatctggacgccgagaagtatgcctcctccgcgattcgcgagaacgaggaactgggctacaagaagtgggccaagcgtctgaccaagtactacggccttatggaaaagtacttcaacccggacctgttcaccgtcggcggcggcgtgagccgtcagagcgaaaagttcctgccgtacgtggatatcaagaccccgattgtgcccgccaagctgcgtaaccaggctggcatcgtcggtgccgcctactacgccagcaccaagcagcagtgagctgagttatttctgctggcgcaggagccgtattgcccagatgtaaggccgtccaagtatttcgggcggcctttttttaatgagtaattcgttcattaggtcgattatgtgttcattaggtcactcccattccaaacctgaattgcaatgggctcggaatggcggcgtttcaagcatcaacaattgtgaggctcgactagcagtgacctaatgagcgcgaaaatgacctaatgaatgtagctaggccgttattcgatgtggattgaagtcatagtatgtctgacgactccgctgccgtgccgcacgattgtcgtagtgctggatgctggtggatatgaggcctcgatatacctggctcggcaggggtggttttatcgtggagggtatgagcgtgcatttctcttctcgtgtggatatttctgcgccgaatcccattgcggcggccgaggcggcagccaaggcaaacggcatcgcactcagcaaactcaacgattccaatccgacccgccacgggttggcacccgaattggtgccgagcgtgtatacggccgacccgcgtggaccgcgtgcggcacgagaatcattggccgcattcctcaatacggtaaacgtggtagacgcaagcagccctcagttggcttcgcccgccgccggcgagggcaggaacgagcgccatgccgctttcaccaatgtgaataccgccatcgagggcgccgacccggacgccctgtacctgctgagctccacgtccgaggcgtattcgtggctgattaagttactttgcgatgccggcgacgcggtgctggcacccaaacccggctatccgctgattgagtcgattgcacggcttgaatgcgtcgatacggtcgaataccagttgcaattcgacggctcctggttcatcgacatcgccgaactcgagcggctactcagcgagcccggtggcgaacgcgtcagagcattggtactcatcaacccgaacaatccgaccggttcgtacgtaaaaccaaccgagcgtgcacgtatcgtgacattgtgccgtgagcacggcatcgcccttatcgccgatgaagtgttcttcgattactctctcgaacctttccccggcgacgcacggctcgcgggggagcgcggcgtgctcaccttcgccctagacggattctccaaaatgctggccgcgccgcacgccaaagtcgggtggattcaggtgtccggacctgccgaggacgttgccgaggcccagcgtcgactggacgtcatcgccgacgattatctgccgatgggcgacatcatcgccgaacggattcccgcattattgaacgccgcgcccgcacagaccagacgggtgggggagcgcgtgcgcaataacctggccaagttgcacgagttgcttgacgccgatcccaacgggctggtcagcgtgctacgggccgaaggcggctggaacgtgctgttacgagtgccttccgtcatcgatgagaacgaactggtgttgcggctgattgacgagcaccaactcaccggacagcccggctacttcttcgacatgacctccaatggatacctggccgtttccctgctgcccgaaccggacgaattcgagcgtggcatccgcgccgtgctcaataccgtcgccgctttgctgcgataggccggtgtttgccggcaccgcacctgtactccacgtacaatggcggcatgggattcttgtttagaccgaaagaactgccacacccggcatcgctgacgttcactttggaacaggccgggcatacgtatgatgatgggcacgtgggacttgctcccacggacatcaccatcagcgagcggcgggtggccgtgatcggactgaacggcgcaggcaaatccacattgctgggtctgctggacggttcgttgaaggccaacgccggcacggtgaccattgcgggcggtgaggaacgtcttgacccggctgtgaagaaggacgcgaagcgcatcgataatctggtcggcaaagttcgccgcgaggagattccgaacagtttctaccaagcggcgaatatttccgaggctgtttccgaagcgttgaaaaagcacaaggtgcccgagtcagaacgtcatgcgcgcatcggtaatctgttcgcgcattttgatttggcgcaggtttccaaggccaaggccggcgaattggactccgagaaacggcacctgctggctattgcggccgcgctgagctttgagccgagtgcgattgtggcggatgagccgagcaagggattggatgagattggcaccgcgcatgtggccaaggcgttgttcagctacaacaagcaggtgattttcgccacgcatgacacggatatgatccgccggcccgaatacgccatcgaccgcatactggtgctggacgagcacgcggtcgtgtttgacggagctccggctgaggctgtggcgttttatgaggacctgatccgacgccgatacgagactagagcatcgtgaaccatgcctgaacctgatgccagagcgtcggattgttgtcgatcatcgaatcgctgcgcgactgcacgaagcagctcagtatggctatgcccagcgcccacaatacggccagcaccacgacccagcgcatcagccaacgccacggagtgacgcgggcgatgccatcgtctgaagcggcgtcgttggcccccgccaatgaccggctcggttcgcgcccattgaccagccacagtagccccggtatggacgccagcgagatcagccagccgaaatcggtggaataccgccatcccaaaccgccgacgcggctgtcgaatacgaccagcaccgccgccacggccaagcaagacatcagccatggccgcatgccgtgtgtttccaatctgcgcagcaggggcagcgccaaagccatcaaggtcagtggcgtggccgtgaaaatcgcgccgaccatcacctcgtaataaccccattgcggcatcggggcgggagagcccgccagccacgggaaacgattcatgaagcgcagcggcaggaacaggtaataccagatgttggcgggcatatccgcggacggggtggtataccgggtcatatcggatacggagaactgatacgcattaccgaaattgaacggggaatcgaaccgaaccatgttccacgccatcagaggcgtcacgacgagaatggcgggaatgattaccgccagcggcgcgcgcaacgcctgcaacggcttgatgcggcgtgtgcgcagaccggtgcccagcgcgcgaatctgcggccagaacagggggaacgcaagcaatgcggccaaggtgaacgtcggtcggcatccgaaattcgccgcaatgcacaaggcgcccaaggccagtcgtggcagggagagaggcttggcatcgcccgcctgccatcggtccgatggtctcagcggacggcgggacgtgtccgcgccgagccatagccatagtcccagcgacgtcaacgtcagcgatgcggcgaacggtatctgatagaagttcgtgcgatacagcaaataccccacttgcgcgctcaccaacgatgagaccactactaacgacgcggccgccaccgaagtcttcggcatcacacgatggatgacgcgcagcaccagcaaggagaagaagatgatgaacagcagcacgagaatatactcggcggcggatgtcggcagattatgaccggccagcagacgataggggacgaacagcagcactgcgggcaacacgccaaaataggaataccagtgaccgtcataatacgcgtaatcccagtagagcggactggctccattggcgagtagctgggcacgtgtggctacgtcataggggtgctcggtggcggccagttgttcgggaaccggcaagtcgagccagggccggccggcgaccagcgcatcggccacatgcccatactggtcgaaatcataggtgtaatcgccggaaacgtggaagacgagcgaagacgcgtaccacagttcgtggatgatggatacgccgataagcagggtaggaatcgccagaagccccacgaaagcaagtcgttgccgagtgctggacgggtcaagcgtgatacgccacaggcgcgatcccggcctccagacggcaatcatcagcaacaccaaggccatggcgagcacgcgcatccaattgatgacgaacggtacgcgcacgttggcgcgggcgtcggtgaccggtacgatcgcgccgcgctcttcctgaatccaaatacgcacgatgccggcacccggcgccttgacataatggctgcgaatagcgtcgggattcatcgactgggccttgccggtgatgccatcgacatccgcgcgcacatgaatggtcgccagcggtttgaagacttccttatcgtcgttcgctttggattcggcctcggcctgctcgcgggccttatcgatgaccttgctgctctcggtatcgatgcgtaggtaatccgacgtgccgtccgcggtcagttcaagataggccttggtcggatcggtgacggtcaacatgccatcattccggcgcgtgagacccgaacccagcgtgttatgcacggcgttcgtatccgtgctcgctccgagcgtacgccagaacggcaggttgaacacgatgcactccatggcggcgatggcggcgacggcggccagcaaggcgatcagcaggcgcaccaaacgcagccggtgccgggtatccgggcggctgggcaggtgccgttcatgattcgacggcatcggacggtctgcgcgagtgtggtctatggaatgcacgcatttattctataggctttattcgggcttgatgtcgggcaaacaagagacaatgtgaatcatgccaaaacgtacatcggaccatgggaagcacaaccgcacgccactgctgggcgggctgaaggattcgatgaacgcgctcgcggccgatctgggactgtccaagccgaagaagcacgatacgaatccgttcggcgatgccttgcgggagaccagtgagcgtaaaggcggcattatcgacgaactgactcgccatgcagtggcgctgagtcctgtaatcaagcgacgcaccttccccgaattggagaacgtgccggaagggctggtgcttggatgggcgcagctgccctccaccagaggccgtggcttttcgcttggcattttccccgaccgcgatcattttgcgcaggtggcgttcgccgatacgcatggccgcgtattcgtgggcaccgaccccaacatggacgtgcaggatatgcaggcgcgattcatgttcggcaaggaaaaggaagtgactctgccggacggtgagcggctgggcgaaagcgacgagccgcgttcacgttccggtttctcccgtgcaggccatggcctgggaagtgcgctgcatcatgggcgtggtttggggcgtggccttggtcatggtgctgacggcgtgaaggccattaccggtggcgtggtggggcgtgacgacaccggacgcatgacgtggctcgcctcatggctcaaggccggcaaccggtacacgcttgagcagatgcgtgccaatctgccgcctgtgatgcgtcatgatttggaataccgcgatgccattaccatcgcgttcttcgccacgtatatgttgccgcagatcaatggtctgctcatcggattcggttccggcaatatcttccgccgtctcaaccgtgaggcgccaatcggtgcgattcgccgttcggtgcgtgacactttggcggcacgagcccacggcatgcgggcctccggtctggaggatcacttcgccgatctgatgcgcgaagccggcgccctcgacaccacgccgggactggaagcggtgcatggcgccgaaccgttgcacctgtacacctcgacgtattcgagcggctatttctttacgtgggataagtccttggcattcgggcaggcgctgaaatccttgaagatcgaaggcaacctcaaccgattcgctgcggtgagcgcttggctggagcgcaacgcttccttggggcgcaaccctacggaagatacggtgacccgtgccgaggccgcgcaaatcgacatgaaactcattgagaaccctgcgattatggcgcttgacccgtatgatggcgagcaggagcgtcgggccgtgctgagcctggtcgatatcgccgcacgcacggctgggcagattcgcagtgaattccctgatcctcgagatgtgctgacccagcagaacgtgccggattcgggtgtgacgaatgctgcgggcgctgaaagtactgagagtgttgagggcgctgtagagcggaccaataagagcgacaccaacactcaagccgctcggccttcgtattcgccggcgaggagcgacgaatgggtgtatcgtcagaccctctcctcactgttgcgccggttacggttgccgtatcggtttgatgtggagttccggtcgcgcttggattcgggtgaagtggccattggcttcaccactgccggcacctcgatgatgcccgatagccggtatgacaccactcgccgtacgtggcgtgcgctgagcagcgccgaacgcgcgtcgatgagcgccgcctacaacctgcgtgtcggcctgatgatggcagcgctgagtttcggcaccagcgaatccgtgcgccaggtgtcgttgcacatcgattccattggtcttgaagaggcgattgccgaacaggattccgccatcgaggcgatgatgagcgaggccctaagcgccttcgaacatctgcgcagtggcgatttggggcgtgtgggttccaaagccgaccccaaagatggtgatttccatggcgacccgacccgccccatcacccatgaggagacgttcgggcaggcggcgtccggtgacgaacgcggcacggccgggggaacaggcaacggtaccggaccgtctgcggatgctacggatcaggccgcggccgaatccgctgacgccgatggcgccgcgtccatcgattcgcagttcgaagacctgatgaagggcgtcgatatcgacgaaatggcgttcggcatgccggacgataccggcgcaggcgacgacctgggcggtatcggcggcgagggcgtcggcactgacgatgctgatggggccgccggcatggacgatgatccgatgagcgtgctgcgccgcaatcccaccgtgcgcaatatggtcaccgtcaccttcacccgtgatgccttcctcaagcgactggacaccgatgggcttgacaatcccgaggaaacctaccgcatgttcggtgccgtgatggacgtggacggcgaaggcggcctgaaacccatcagcgccgacttcgacttggcggacagccggttctctcccaccggatcccaggaggagcccgaactggccgaccgtcaattcagcccggcgaccgctcacgtgctgggcgcacagaatagtgccggactggctatccagcgagtggacttactgcagcatggcgtcaacgaattccacgatatcgccaggaacacgtcgctcggctccgtggaaaaggcccagcgagccatgcagatcatcgaatcgatatgcgatcccgaactgaccggtttggcctctcaggtcaccagtgcgttgatcgatggcaaggacaccccggacttcacgttcacgcttgccgacgatcttgacaaggagcgtctgcgcgcccgagacatgctgttctcgggccaagccgatcaggccatcgaagcggccgaagcggccgtgtcccatctggatcaggtgtatgcggcaggccatggcgtacctcgatacttcaactcctatgccgagcgtgtggtctacaaccggctgttcgccacattggacgagcgtacggtgctcatcccggacaatctgttctacgcacacatggagctggctgacgtgttgagccagatcaagggtgccgaggcggccatcccgcacctcaaccgtatggtggcgtacgcgcccgcctacccgctctcacatctgaagctcgccatccaactggcccgcaatgaggattgggattcggcacgcgccgcctgcctgaatgctctgcgcgtggccttggaccgcgacgatgccgcgttcgcctactaccggttcgcgtacgccgaatggatgcttgaccggttcgacacagccgccgcagcctacattatgagcgatcacatcgctcccggggccattggttcgttggaaagcgaactgcaggaactggtttcccgtgcggactcgcagtgcatgccggtgcctgaatcggtggagacggccgcccatgtgcttgccacgcatgatctgccggtctggccgcataacgaagtggctgacatcgtgcgtgacgccgcccgcgtgtgcgtggatgaaggcatgttcgtgccggcccgcacgctctcggtggccgtggcccgcatgaatgacggtgaaggcgacaacatcgacatcatccaagcccagttcctgcgctcgctatccgcgtagccgcctgaggggagttgacggtatagccggccgaggggagccgagcccgctaggatagacaaccatgagcacgaacgaacaactggcatgggatttcgacgatggggatgtggccgaggtccggcctgataccggtattgcacgttttgcccctggctccgaacaatggatagccgcactgcagcccactgacgacgacgcgatatgcctcgaccgtttcgacgtgaacacgatgaccgctgaggccgccgcccgcctgtgggctcgcgtggccgcatgggtggaatccgatcagatcgcctactacatcgacgactcacccgtcagctccgacgccgcctacgacgcgcgcatgcgttgcctcgaacgactcgaagcggcgttcccctcattggacaatccacagtcgcccacccatcgcgtcggcggctccttctccaacgacttcgcctccgtgcgccaccccagccgcatgatgagccttgatgacgtcttctccatcgaagagctcaaggattggtacgattcggtgattcgcgacctcgattggcccgaatccaagcccctgcccatgagctgcgaggtcaaaatcgacggcctcgccctgaacctcatctatcgcaacggcgtgcttgaacagggcctgacgcgcggcgacggcgttaccggcgaagacatcaccctgaatgtgcgaaccatcggctccattcccgccaacctcggcggccccaaggaagacgttccggacttcgtggaaatccgaggcgaagtgttcatgcgctgggatgacttccacaccctgaacaacgagcaggaggacgccggacgagcgcccttcgccaacccgcgcaacgccgccgccggctcgctgcgtcaaaaagaccctcgcatcaccgccacccgtcgcctgagcttctatgcgcatggtctggggcagctcacctggggggcggaccatccgcgcggcacccatgatgtggtcgccgaccagtcgcaggcctacgatctatacaccaggtggggcgtgccggtctccccgcacaatcgtgcggtgacctcattccaggagatcctggacatgatcgagtactacggcgagcatcgcggcgacatcgagcacgcgctcgacggcattgtcgtcaaggtcgatgacctgggcctgcagcgcgccctcggtgccacctcgcgcgcgccgcgctgggccatcgcctacaaatacccgcccgaagaggtcaacaccgaactgctcaacatcatcgtgcaggtggggcgtaccggccgtgtgacgccggtcgccgtgctcaaacctgtctacgtggccggctccaccgtggctcgtaccacgctgcacaacggatttgaagtcaaacgcaagggcatcctgatcggcgacaccgtggtggtgcgcaaggccggcgatgtgattcccgaactggtcggtccggtgcttgaacggcgcaaagggcgtgagggccagctgcgcgaattcgtcatgcccgagttctgtccttcatgcggcgcgaaactggcacccgccaaggagggtgacaaggacatccgctgcccgaatgtggaaagctgcccggcccagttgaccgagcgcgtgatttcgctggcctcacgcaaggcgttcgacatcgagcatctgggtgaacagtcggccatcgctctgaccaacccggaggagaaccggcctgattcggtggcgacctacgcgccgaacatcaccgaggttctggtcgcccccggcgaagagcccgaaccgtacgagccggtggaggggctggaattgccggccgcgcagaagccggtgttgtccaacgaatccgggttgttcgacctgacctccgccgatctgcgcgacgtgcgtgtgtggcgtgaggccgcaatcgtcgaagtgcatgagacggtcggtgcgaacggtaagaagaaaaaggtgcgtaagcgtgtcggcggctctggcctgtggcatcaggtgcctgccttctggaccgcgcccacgccggccaagaagctcacggccaagcagttggccgaacgcgcgcaagaagaggccgcagtcgaatctgccggaacacagggaggtgccgccagcgagacgaccggcgcacctaccggggctgaggctccacttggtactatgccgggctttgccgcagcctcctatcccgagtatgacgtgccggccgacgcggtcatcgtgcgcgtggaccacaagaccacgcgcaccggcgtcacggatgtgccggtgatcattcggcccggcgaaaacacgcgcaagatgttcgacgaaatggacaaggcccgtcacgccgacctgtggcgtgtgctggtcgcgttgtcgattcgccggctcggtccgcctaccgcacgcctgatcgcctcggcgatgggctcgctggcagccatcgaaaacgccacgattgaagatctgacggccatcgacggggtgggcccggaaatcgccgaa

SEQ ID NO: 2397 - DNA, 9313 bp, Unknown
  R50_10m  MAG No. k141_7401
agcggatcatcggccttgtctcgcggcgtgacgcgcacttccaaggaggcgcccagcatggcgagcgagccgagttcttcagtgacgcgcgcgcccaagtcggcagcggcagccacgcgcgcggcgctcagcacgtcggcggcggcgagggccgcatcgtacagcgtctgccgttcggattcgagttcggcgaccttttccggcgaggcgtccagatcctccagatcgaacgccgccttgtcccgccaagcgagcacgtcggccaaggtggggccccaccgacgggtgaggtcgccaagctcgtggatacggccgttgatctggtccagatcctccacgctgccttcgtcgcccagctcctggctcagggcgaacaccacgtcacccaaatcggcattgatggattcaagccgatcggcctgctcggcgaacgtgccgccgacgcgaatcgcgcgcaacgaggtcaccgcatgattgatgagttccacggccgaagcgccgtcggcggcatccacatccacctgcgaggcatccagcgcgcccagcgccgaacccacgccttgggcgatgtcggccgcgttttcgatgcgttcgcggcgcgccttcagctcctcgtcctcccccggctgcgggtcggttcggttgatgcggtcgatggattcgcgcaggtagtcggcctgttggcgggcagaggattcctgcgagcgcaggcgttccagccgctcatccatggcggccagcgcatcccacgccttgcggtaggcggccagttcggcttcgtctccggccacccggtccagaaactcgcgttgccgtgcggcggccgcgattttcagctgatcggtctggccatgaatgatgaccagttcgccggcgatggcccccagcaccgaacgcggtacggacttgccgccgagcacggcccgcgaacgtccggaagcgcgtacggtgcgggaaaggaacagttcgccgtcttcggggtcgacgcccgcgtcgtgggctttggccacggccgcggcagcaccggtgagcccgctgtcagaatcgtcagaaccggcatcgtcaccggcatcgttggtgtcgccggaatgttcagatgcgacggcatcatccgcgagcgcgaaaatcgcctgggcccaagcctcgtccgccccggccgagacgcgcgaggattcggcggccccaccggagaccagtcggatcgcggagagcagcatggatttgccggcaccggtctcaccggtgatggcggtcatgcctgcggccggcgcaatggcggcttctcgaatcggccccagattgcggatatcgagttcttcgagcatcaggctcctgccttgccgtcgcgttcgcccggcttgtcgggctcggtaccagcgacgccagcgtcaccggcaacgccagccgcatacgcggccgccgggaacgtgtgcccgtgatgcagcggctggctcgaggcctcgttgcgcgcgtgctcgcgccaaccgaccacgggcagatcgaacttggagaccagacggttggtgaacggcatgccggagagtcgagcgaggcgcaaggtatcgcgcgattcgcgcaccatgacgcgcgtaccctgcggcagggcgcgctggcggcggccatcgcagcaaatccagccttcggacatggaatcgtccagaatatcgatggtgaaggtcgaaccggagccgatgatcagcggcctggcgaacagggcatgcgcggccaacggaatcaactgcagggccttgacgttcggccacatgaccggaccgcccgcggagaaggcgtaggcggtggaaccggtgggcgtggagacgatgacgccgtccgcgccgaacgagttcatctccacatcgtccacgcggatggacagttcgaccatcttgccccggtcggcgcgttccagcgtgatgtcgttcagcgcccaatcctcaatgggcttggtggtgccaggcagccagacgtccacatgggcgatcatgcgttcgtcgatcgaatagtcgtgggtggcgacccggcggatcgcctcgtcgatctggaagctttcgaattcggccaggaagccgacatgccccatgttcacgccgagaatcggcacctgggtgcagtggacgagttcggcggcgcgcagtatcgtgccgtcgccgcccaggaccacgacgatttcggtgtcgtccgacacgcacggcggctgcacgccgaaatcgggggcctcggtgttgtcgatgatggtgacttcgaaaccggccactcgcagctggctcaccgcctcggccactacggttccggtctgcctgagcctggtatgcgtcaccaccaccgcgttgcgcttggccatggcatcctcctgtcgattcggtcgcactgctcattattctagccgcagacaccgtcatcactcgtacaggtgttcgaaaaatgccgcttcgtggcgcgtcgccgacaacgttccgcagagtcgattaacgtaaggcttcggcatacaatggcatacagccgcgcgatcaccgtacgcgtgccgtgcgcagcgcgatggcatgccgtatgaccatacagcagtatcagttgaggagcttgaggacccatggccaatgacttcgacgaatcctccgccaatgaggaggcctcgaagggcctgtcatggtggtattcggccgatgtactgagccgagacaaaagcgataaaaccgccaagcgcattcgccgcatcagcatcaccgaccgtctgctcaggcacccgggccgtctgtccatggtgtatttcggcgcactgatcatcatcgtcaccggcttgctgctgctgccgatctccacatcggacatcatcttcaccaatttcccgatcgcgttcttcaccgccgtctcggccctgtccacctgcggcattccggtggtgaacaccggcgaatactggtcgacgttcggccaagttgtcatcctattctccatccagttcggcggcctgggcgtcatgaccttcgcctcgatggtggctcttggcacttcccgcagactcaaggtctcccagcgcatgcttaccgcgaacgaactgggcaccacgaagctttccgaggtcaaaggcgtactcaccgtggtattgggcacctccatcatcgccgaggtgcttaccttcgtgctgctgctgcccgacctgttccgcgtgcaccacggcaatatgggacgtacattgtggcaggcgctgttctacgcggtatcggcctacaacaacaccggtttcacgcctgacgccaccggcctgcatgtgaaccgttggggcgtgggactgccgattctcatcagcgcattcataggaacgctcggcttccccgtggtgctgaatctggtgcagtgcgcacgccgacatctcagcccgaaacgttggacgttgcacaccaaactcactttggtgaccaccgctgtgctggtggccacctcactggcttggttcctgctggtcgagtggggcaataccggcctgttccccgcagatggtcccggcatgaagatgcgccgtgcgatgagcgccgccgtcatgccccgctccgccggtttcgatatttcctgggtgcccgaagtcacgaatgagaccaaggtgttcatgagcatactcatgttcatcggcgcaggctcctcatccaccgccggcggtatccgtgtcaccacgttcgcggtgattctcttgatttgccgcgccgcattcaccggccatcgcgatgtcaccgtgttccgccgccgtatcccccgccgcatccagatgaccgccgtgtccgtgaccacggcctgctttgcgctggttatggtcggtgcgatgatgctgatgttcaccaccggctgcgcgttcgtggacgccgtgttcgaggcctgctcggccttctcgttgggcggttattcggtgggcgtggcaagcgccggcaatccggccagcctgtttattctgtccgccgagatgattgtcggacgacttggcccgttgaccatcgcctactccatcagcagaccgatggctcccgaacctattcgttatccgcaggaaaacattatcgttggctgatcggccattcaatcggcacacagaaatccggcatagagaggaccatcatcatggcagcaaaaccgagcggcaacaaaagcgtgctggtcatcggcctgggccgtttcggcgggtccgtggccgccaccctcgaccagatgggtcaggatgtgctcgccgtggataagaacccggagcttgtggcccgttggtccgcgcatctgcccaccattcaggccgacatgaccgatgtgctggccatcgagcagatcgacgcctcccagttcgacacggccgtcgtggccatcggcgacagcatcgaggcttcggtgatcatcaccggcaacctgctggatgccggcgtttccgatctgtgggccaagtccgtgtcccaggagcatgcgcgcattctgcagcgcatcggcgcccgtcacatcatcaatgcggagaccgatgccggcaagcgcgtgggtcatctggtggccggcaattatctggattacatcgaaatcgacggcccgtacaccgtcgtcaagatccacacgcccctatacgcggtgggtcgcagcatcgagaacgtgcaggtgcacgacaaatacggcgtgaccgtggtgggcctcaaggccccaggcaaggagttccagtacggctccaaggaactggtcatgcatcgcaacgacgaactcatcctcatgggcaagcaggatcagatcgaccacttcatccaaggctaacccccctaactgcgctcgctataccccctatctgctcacatcgtgaccgatataacccccctcaacatggatgcgctcattattggggcaataagccataaagctgtacgtccatattgagggggctttatcatcatgggcaagcatacgcagaattgcacgttgataggcaaaggagtctacggcaccataggagtggaccaacgttcccgtcttgccgatggcgcgcattttcacaccatgattgtgaccagcaccctcgaggcctcagttatagaaggggacaaactggtcatcaagagtggcattgtgcggtgtgatggtgatattcgcgtatccagcatcagcggcagcggcgacatcgaagtcggcggcgacattatttgcgatgaaataacctttaccggcaaactgcgatgcaacagcgatatcgtttgttccggaaatctgtccgtcaatggctccctaggcacccgtcatattagcggtcagacagtccgcttgaacggcgtgttgaagggtcatgacgtcaacagcagggctctggaagttcatccactgcgcagtacgatgttttctcgttttgatatggatgggtatgaggatggcagcatggttcgccatatcacagccgtcacggttgaagccaaccatctgcaatgccggactttgacggcggactccgccatgctacgcaacggcagtgcggtggaaagcgccacgtgtgccaccgcaataggcatcgaccgtacctccagcgtgctgctggtgaacggagactgccaacgcattcatctcaagacagcgtaaagcaggtattcctcattaccgtgggtgccgatgatgggactatcggcagtggccaccacgtcaagtccgtgctgttcagcacaggcgaccacgtcgtgcaatgcccgctcccgcaatgccggatcttccacgatgccgtttttgccgagtcctgcccgcccgacctcgaactgcggtttgaccagtaacacaatctgcgcaccgggagccgcgatgcgcgcgattaccggaatcacataggtcagggaaataaaggagacgtcggagacgatcatcgccggccggtaaggcaggtcgtcggcctctacttcgcgaatgttgacgccgctcatttcgatgacgtgctcgtcattggcgatgcgcgggtcgagctggccgtggccgacgtcgagcgccacgactttggccgctcccccgcgcaacagtacatcggtgaagccaccggtggaggcaccgatatccagacattccaagctttccggcccggtaaggccattgccggcaaaggtctcgaacgcgcccaagagtttgtaagcgcctcgggagacgtagtcgtcgcccttatccacggcgagttcgctgtgcccggctttgaccatgaacgatggcttggtgatggtctcgccgtccacgcgcacatgcccggctttgatgagtcgctgcgctttggcccgcgattcgaccagtcccgaagccacgagcatcatgtcgaggcgatcaagtggggtcgcgggatcgatatgttgctcggtcatataccttcctttcgacccatcatccaccaacggggtggctcggcatggacccaccatccagcacttcacgtcatcttccgctggcgggagaatgaatctcctctgctagctgcggctgttatcaagctcgtgttgtaacgattccagcacgttgcgataggtctcaagcttgcggtcgttgtcttgttcatcaatatccgcaagttcggggtatcgctcggtgaccggcgcgtgttcgctatccgtaggcataggactatgcctcgatggcgaacaccggtaccgtggcctcgctgagctgtgcgccttggtcggcggcttcccatgcggcgcatacggcggcacgcaggccgtccatactggtggggtcgctgacgtgtacctggccgttttcaaaccaagcgctagccttgcggcattcccaagtaccgctctcgtcgcggaccggctccggttgggcttcgccgagttcacgcagatcaagggcgatgaatgtgggcctcaggtgtgccggagccagcatcagttcggtcgggttggtgacaccggtcagcaccgccagcgaatcatagtcaccgcggttaccggcctcgatatcagtgtcgagtcggtcgccaatggcgatggacgcctccttgggcaccagatcgtggccttcggcggcgttcagttcgcgggcctcatcgtacatgtacgcttccggcttgccagcggaggcgaccggttcgacgccagtggccgtgatcacggcgcgaatcatcgatccgcaaccgggggcgatgcccagttcacgaggaatcgtcaggtcgcggttggtcacgaaatacgtggctccggcctcgaccgcgaacgcggcatcggccatcatctgccaagtcatatccggataccagccctgaataacggcctgcgggcggtcctgaggaccgtccacgatggtcaggccgttgcgggtgacctcatcgcgcaaatgctcggcgcccaatacctgtacgcgcgcgccggcgggcaacgccttggccaccacacgggcggccaccaccgaagaggtgatgacctgccacggctccacgtccaagccgaagcccttgagctggtcggccaccacgtgctggaagcgcgaggagttgttcgtggtgtattcgatggtcatgccggcggcttcggccgcacgaatggaatcggctgcgtattcgaccggattcttgccgcgatacaccacgccgtcgaggtccagcagcgcaagctgataggcctcggcgagcgggcgatcggtgcctttgaggaaacgggtcattacgccgctcactcctcggtttcggtctcggtctcgtcggactcagccggttcaacggcatcgtcagcggactcggaagactcctcggcttcagattcctcagattcttccgatgcatcctcggactcagcattttcgacatcggcctcatcagactcggcatcgccgtcttcagcctcgtcgtcctcatcgccgtattcctgctccagatccggggcgtactgcgcctcgtccggatcgatgccgagcttctcgagcacgtcggagtcgtcggtgatgtcttcgagatcgtggtcaatcaccacgtcgtcgctgttttcgtcaatctcctcgtcggcatactgatcctcaagacggtccagcaggtcattaagctgctcggcttccttgctgcggccggcctcttcaaggaagtactgctcggcctgcacggcacgcatacggtactcacccggaagaccctgagagcggccgacggtatgaaccacttcaatggccttgtcccacatctccaaatcgccaagggcaccggcatacaccaggaacatctcgaccttgggagcgccatgcagctgcttgccctcatcggacagcgccagttccacggccttcttcggttcaccgacaccacgctcgcagtcagcgatgaacggcaggtagtcgaggaagccgttcatacggtaggcggtacggaactcacgcagggacagcttgtagtcgccctgacggtaggccacgaacgcgagcgtctcgcgggcaaagtcgatgcgggaggcctgacgggccacccacttggcgtgctccaaggcaagttcgggatcgctctcctccagcgcgaaagcggcgaggatgtgcagaccaatgttctccgcatgctccttggacaggccgcgcagacgttcgcgctcatccttggacagcatcgaccattccatgcccttgggcatcttgggctcgtcgggacgacggtcggtgtacgggttctgcgaggggaagctcatcgtgccgtcggagttacggcgcggacgcctcatgtattcagagcgcttctcctcacggtactggcgcttctcttcctgcgaaaactcgcggaattcgccgtcacgacggttgttgtcgcggcggtcgtccctgcggaagttgcggcgatcgccatcacggcgatcgtcgtcgcggcggaagttgcgacgctcaccatcacgatggaaatcacggcgatcgttatcccttcggtcatcgcggcggaagtcacgacgatcattgtcacgacggaagtcacgacgctcaccatcgcggtggaagtcacggcgatcatcgcgacggaaatcacgacgatcgttgtcacggtgctggtagcgcgggttctcgccgttctcgccttcgtgggaacggtagccgccttcgcggcgcggcttgaaaccttcaccgtcacggcgcgaaccactgccgcggtaaccacccttgtggaagccaccggacttgccgtacgacttacggtagccgccgtggccctcgccatcaccatcacggcgcggcgcgtaaccctcaccatcctcacggcggcgcggcttgaagccctcgccatcgcggtcgcggcgcggacggaagccgtcgccatcgcggcgcggaccgttgccgcgatagccgcccttgccaccgaaaccagagcggccgcccttgtgga

SEQ ID NO: 2398 - DNA, 14431 bp, Unknown
  R50_10m  MAG No. k141_7487
aaattgaatattcctgcgtagctcagttggcagagcatccgactgttaatcggacggtcactggttcaagcccagtcgcaggagctcacctgaacgggtaactccggacgggatgaaaattgaatattcctgcgtagctcagttggcagagcatccgactgttaatcggacggtcactggttcaagcccagtcgcaggagccatcgaaagcctcggttctccgaggcttttttattttcatcgcattggtgaccagacacgacaccccatcatcaaccgggaaatccatggcgaagacctcaccactactcacatccggcagacaggtcactgtcaattcaccgatgagaggcacggtattcccagtatcagtctgggaataccgtgcaaatcttacatcgagaccttggtcaggggcatggcggagtcgatcgggaagtcgggggcgctgggggccacgccggcttcgaccaggttcacgccgagcatggcgaccatggcaccgttgtcggtgcagagcttgatttgcgggatacggacgtcgacgccgtagttctcgccgaattcgagcagtttggcgcgcagctgcgagttggcggagaagccgccgcccacgatcagcgtgttggaatcgtactgccggcagccgcgcatggacttacgggctagcacggtggccacggagtcggccagggatgcgcacacgtcgtccaccggaatctcatggccggcggcctgctcgctttccacccaacgggccacggcggtcttgacaccggagaaactgaaatcatacgggtgcgcggcaccggccttgccttgggtcagacccatcggcaccttgatggcgtgcgggtcgccgttctgtccgtggcggtcgatgtgcgggccgcccggatacgggaagccgagcagacgggcgactttgtcgaagcactcccccgccgcgtcatccagcgtggtgcccaccacatcgatcttgcgcggcatgtcctccacatgcagcagcgaggtgtggccgccggagacaatcagagccagcgtgtccttggggaacgggccgaactgcagctgagtgacggcgatgtgcccgatcacatggttgatgccgtaaatcggcttgttcgcagcccaggccagcgccttggcgccggacacgcccacggccaggcaaccggccagtccgggaccggcggacacggcgatggcgtccacatccgccaacgtcatgttcgcgtcggcgagcgccttggacacgcatggcacgaaggcctcagcgtgcgcacgggaggcgatttcggggatcacgccgccgtatcgcgcgtgttcctccatggatgaggccacgacgttggagagcagttcgcggccgcgtacgatggcagccgcggtttcgtcgcaggtggattcaatgcccagtacaaccggttcgctcatcgtgcttctccgttcttctccgtttgcttgctggtgatgtcttcaatgtccgccgatgccgtctgcggggcggcaaagcccacgaccctaggtttcaggtccaagctcatggtgtatgcgtcgatgccttcaggctggtagtagcgtttgcgcaatcccatgcgttcgaatccgaaccggtgatacagggccagcgcagggtcgttatccacacgcacttcgagcagcatgcgcgaggcgccctgacgcttcgcctcgtcgaccagtgcctgaagcaacgcaacggcgatgccttgccgctggtatgccttgcccacgccgatggtcatgagctcggcgtcctcgccgtcataccagaagccggcgtagccgcggacaaccgcctgttccacctctcccagcacatccagcagatacgtgcgggccggtgcgtccagttcctctcgcaccatgttcgcattccatgcgccgcggccgaacagttcgccttccaactgtgcgatggagcgaaccgcaagatcacgacttacggcagtgatgtcaacaatcatcgaatcaacccgtctcacgccttatcggcgccggcatggccgagcacgtgcttcagcggattcggcacttcggcgtccggacggcgcaggtacaacggttcgaccggcgtatcgggattacggttggcaaccagttccgcatcagtggcaaagatagcgagaccttgctccccttggtccaatacggattcatcggtgatgtcgccaagctgctcgattgcacccagcgcatccgcatatttgcgggccccatgacccacaacatccacgaccacatccacattgctgtcttctggcataagtccgtcgcggtacgtatgaacggcatcattcacgcgctgcgcgatggatgcagggtaatcgatatccatgtcaatcagagccgtcgccacggtttcgccatcgggatcgccaacgagcgggtccgagtacaacgcaaaatagagttgcttgcggcgtgcgtcgtttacggcaagagtgagcacatggcatttatgagtatcgccgagagtgccggctttgccacggcgaatgagattccattgcacctgaggctcaagaacattatggccgataagcgtcgctcccgttgcgaaagccagtgccttggccgtaacgataccggcacgcagaccagtaaagggggctggaccggtacccacaatgactgttgcaatgtcagatgctgggaacccggcctcctcgaccgcgcgcgcgatattgacctgcagtttctccacatgggtgcgcgaatcggtctctacaatgggctcgcgccccacaatgccgaccgtcgagccgaatgaggtgtcaatcaccaacgtgcaacccatgaatcctcctagtcgtaaagcctctagagagtgtacatcgaggagtctataggcgcatggcttactgcagatcgaacgcggcccatcgcttgccgactgggacgaatgcgacggtacgagtgccgttgctggtgagttcgccgtctgatccagcggatgcggcatcggaggaatcgagaggtcgatcgatatggatttcaagtcgttctggcgccaaggcggtggccatttgttcgccccactccataagcaccaccgtgttctcgccggggtcttcaagttcttcgtccaatcccagcgattccagctcgtccaacaaacgcccgatggcgtcctgccccggcgcataggctgagccgcccagacggtaggcatccacatgcaccagatgagacggagtgccgtcggcgaaatgtccgtcgagttcgcgggcaatggtgaatgtaggagacacgatgggttcggtaatgcccagccccgccccgaagccctgggcgaatgtggttttaccggcaccaagagggcctgagagcagcaatacatcgccgccgtgtaccattccggccacacgacggccgagctcctgcatggcctcgctggtgggagccgcaatagtgtgttcgctcataaatacccctttatcgacttttaccgacctttatgactgatgtcttcaatgcagcgttccagcgcatataccgggtcgccaccgtttgttttgctttgctcatccgcccaggcgagcatacggatgcaatgcgcgagtcctgccgaagtccagccgccaagttggcgcatcgcattcttcagcacccacggattggttttcgcttcggcctgggaaatcgtgccggcccgtaccgccgaggctttggcaatggtacggagcttcatggccaacgcgccgatcagcgcgatgggatcggtcccttgttccacagctgcacgcatcatgacgatggcttctgcggttttgccttccacggccttgtctgccacggcaaaaccggtgacctgcggattggcggtcaaatactggttgacacggtcgaggcccatcggattatcgtcaaagtcgaaacacagttgctcgcacatggcggcgagttcgccggttttgccgccgagtacggataccagctgctgtgcggccatcggttcgactctacgaccacgtttctcgaattctccgagcacgaaattgagctgtgcatccggtttcttcaaatccggcacgtcctctttgcgagcgccggctttcaccagttggtcgatgattttgcgccctttgacgccgccctcgtgctggcagatcaccacgctggagccgttcggatccttggcggcctgcttggtgtacgccaccagagcttcggcgagcttgtcgtcggcattctgcaggttgacgagtttgaccacggcaacgtcggaaagcaacgatgggctgacggcttcatcgaaggcatactggtcggccgatgtggcgtcgagttcgatgaggtcggcgtcgggccgcgccttcaacgcctgcgcgcacagtgccttggtgcgcgcgtcgttcaaatacgagtcgcctccgggcaccacggttaccggtgcattcgctgctgttttcgccatgccaccatctcgccacacaggttggacaatgacctgccggcatcacgattttgccgctgccgtcaagatagtggtattcggctgggattgcgatggttgctgcaccgaataccgcattggctattcggcttgccgccgcgtaaagaggcgtctcgtctcctcacaccagagactgaggcggacgcgccaagcggaaccgaagcgcacgccagacattccggcctcataacgacggacatgctggaggcaacggctgacgaacaccagtagcatgccgataccgatttccgccgccacaatcagcacggcgcccgtaacgccgtctttccatgggatgacggccatcgtgctgccgcccagccacaacgccacccgttccatcaccagcgtgccccatgacgatatccacgcgaatacgccggccagccatggcgtgcaccatgcgcaggccagtgccatcaatcccgccatcgtggccaatcccacgaacggtgacaccagcaggttcgccggcacggacagcaacggcaattccggttccatcaacacctgaatcggcagggtgaacaattgcgcggccacggtcatcgccatcatttcggcgatgctgtgcggcatcgctcgctcaaaggcaccggccagccgccccgcaaacagcacgatacccagtacggcggccgaagacaaggcgaatccgtagctggccgacatatccgggttcaccgccaatacaccgattatcgtccagcacagggcgctcaacgcttgcgtacgccgtcccatcgcatacgccaacgcacctatcaatcccatgatgaacgcgcgggtgaccgaatcactggggaacatcgccaatgccagcagcgcatatactccagagaccagcaacgccgtcagccgccgatcaagcagcatccacatgcataaccgacgcaccagtcctgccaccagtacgaagtggccgccggatacggccatgaggtgcatgatgccggaccggcggaactgattttccaacgtttgcgcatacgtgctgttgaccggcatcggaccggcatcgccgccgatataatcctggccaagcacacccatcgtcaatcccggcaccaacacacgcccctgatcggacaattgtccggtcacggtgaaaaacgcctcctgcatatgtgcgatcgcggcgagatgccacggcggagcccgcacctgcgctaccggctgttttccttccaagagcagccatagcggtatgcgtccatatcgcgcttgctgcaatacgcccgtcaacagatagaccgcgcctcgacgcaactgcccacaatacgattcatcggcgtatacgcgcacggcgaccgtggaacgtacgtccgcgccatccacagtgatgccgctcagccgtatgtccgtctgacaatcgtatgtgcgttggtccgaagcgatcacgggcgtcgtcaccgtggccatgacttcgtggtatgaactggattggcgagcttgtgcggaggcaggatcatgccaggcaatggtgtccgacgcgattgccgtcatactgccgatgcacgccaccgcaacgcatacggtcaatgttcccgtccacctgatccgcaggcggaaagacaccacgatcatcgccgccacagcggcacatgacgccactgttataggtaatattcgtgtgacaggccattccatgccgattatggtggcgtcaatgccagctccggcatcggcctttgcctgaccggtgccgagtccatcagacatcctccatgcgaataatgcgtgcgctcccagactcgccgcccacatcactatggcgatcggcagcatcctccaatcgcggctcccctgctcgcgcagtatccgatccctgctcatccgaccgtcacctgccctcgcatggtctccagcgtcttggagccgatgcctttgacatccagcagctgatcgactgatgcatacccgccaatcgccgtgcgatgatcgatgatccgctgagcggtaaccggcccaatacctttgatggattgcaattcctcaacggtggccgtgttgaggttgatgagaccatgcgtggaagcgccggcatcgctgccgtccgtctgcatgtgcggagattgcgtggtatccgattcggggttcgctgtggcatcggaatgctccgactgctgcggatccgtgcgtttctcgtccgtggtgttctgcgatggcatcgtctgatctccagcggagccgcccgtggtctgcatggcggtcggttgagacagcatggccatattcatcgactgctggaccagcaatgccaagctgatgccaagggcgacgatcagcagcaatatcacggccaaggcatgcccaatggtgaacgacaatcgcggctgatcccgggtgagtctggctgattctccgacggcatcggcggaacgtacgccaatcagatccgataacgcacgtttgtcacgggtcgcctgccgcaggccgctctgcgccctttgggacgggtggccggccggacgaatccgtgcatggccgggaggcggcggaggcgtcgtgggccgttccactcgcggttggggcatggcttcgctctgcctgctgaatgcgcgcaaacggttggcggcatggtctgcgcgatggttatgagaaacgcccatgcatccacgctgatggattcatgggcgtttgtccagctgaaacggggtatgtggttctagcttatgaagttatccacaattgaggtggggcgatatcgcacattggctgcccctcagtcagctacgctgacagctcccctgacaaggggagcttagatggaatcactccgcgggaacgatggagacgatcttgggggccttgacgatcaccttgcgcggctccttgccgccaagacggtcggcgacggcggccagcgcctgcttctcgaggtctgccggatcgatgtcgaccggcacttcgagcttggcgcgcaccttgcccttgatctgcaccacggcggtcacggtatcgtggcccacgtaacgctcgtcggccaccggccacggctcggcggacagggactcggggtggcccagcttgctccacatctcctcgcagatgtgcggggcgatcggcgcgagcatcaggatcagcggctccacggcggcgcgcggcacggccttcagaccggtcaggtggttgttgagcacgatgagcttggcgatggcggtgttcgggcgcatgccttccatttccgcggtcacttcggcgatcgtgttgttgagcagtttcagggtcttctcatcgggcgcgtcctcggtcacgtgggcctcgccggtggtctcgtccaccacgttgcgccacaggcgctgcaggaagcgcatgccgccgaccacgttgcgggtgttccacgggcgagactcgtccagcggtcccatgctcatttcgtacaggcggaaggtgtcggcaccgtagttctcgtacatgtagtccggggtcacgatgttcttgagggacttgcccatcttgccgaactcgcgattggcatgttcgccgttccaggtgaacgtcggctcgccggaggcgtcggccgggccttccacgacctcgtcggccggcacgtactggccgcggtcgtcggtgtaggcgtaggcctggatcatgccctggttgaacagcttgtggaacggttcggccgagtccacgtagccgaggtcgaagagcaccttgtgccagaagcgggagtagagcaggtggagcacggcgtgttcgacgccgccgatgtacaggtccacaccgccttcatcacccgagtacttgttgtggttcgggcccatccagtagtcgaactcgtccttctccaccatgtgcttggtgtcggtcgggtcgatgtaacgcatgtagtaccagcaggagccggcccagttcggcatggtgttggtgtcgcggtagtaggtcttcttgccgtcgcccaagtcgagctcgaccttgacccagtcctcgttgcggctcaacggtgcctcgggattggactcggcgtccatcggatcgaaggtgcgcggctcgtagtcgggcacgtcgggcaggttgattggcaatgcggaatccggcagcaggtgcggggtgccgtcttcgccgtacacgatcgggaagggctcgccccagtagcgctggcgggagaacagccagtcgcgcagacggtagcttacggtgcccttgcccacgccggcggattcgagccaggcgttgaccttggcgatggcgtcgtccacgcgcaagccgtcgagcgacagcgcgtcgcccttggcttcggtggcctcgacggaggagttgatcacgatgccgtcatgggaaacgaacggcgccttgccctcgtagttggccaagtcgtcgccggaatccggcagaggcgtgacggtgtagatgacaggcagaccgaacttcacggcaaagtcgtaatcgcgctggtcgccaccaggcacggccatgatggcgccggtgccgtagtccatcagcacgtagtcggcggtgaacagcgggagcttcgcgccggtgatcgggttggtggcgtacaggccggtgaacagacctgtcttctcaccgccttcgtccacgcggtccttggcggtcttggcttcggcggcgagcctgtaggccttcaccgcctcgaccgggttggcatagccgcccttccagtcttcgggtacatcggccggccattcggcgggcacgttctccagcaggtgatgttccggggaaacaacggcgaacgtggtgccgaacagcgtgtcgggacgggtggtgtagatttccatgtccttgtcaccgtcggcagtggccacggtgaagtgcacggaggcaccatgggattcaccgatccagttgcgctgcatgagcttgaccttctcaggccaatcgatgccgtcgaggtcggcgatcagacggtggccgtacttggtgatgcgcatggaccactggcgtagctcacgctggaagaccgggaagttgccacgctcggacttgccttcggcggtgacctcctcgttggccagcacggtgcccagacccgggcaccagttgaccggggacttggagatgtaggccaggcggaagtcgttcaagatatcctgctgctcggcggcagtgaggtcggaccactgcttgccgtcggactcgtggccaggaatggccttttcgccggattcgaatttggcgacgagctcggcgatcgggcgtgcggatcccttggagccggacgggttggtggcgtcctcgtcgtaccaggaatcgtagatgcgcgagaagatccattgggtccagcgcacgtagccggggtcgatggtggcgaacgtgcggcggttgtcgaagctcaggcccatgcggtgcagctggcggctcatgttggcgatgttcgcctcggtggtcacgcgaggatgctggccggtctggactgcgtactgttccgcgggcaggccgaaggcgtcatagcccatggcgtgcaggacgttctcgcccttcatgcggtggtagcggctcgtcacgtcggaggccaggtagcccagcgggtggccgacgtgcaggcccttgccggaggggtacgggaacatgtccatggcgaagtaggcggtgcgcccctcggcgttgcggcccttgccgtccttcaaatcgccgttgacgttggcggcccagaaggtgccttgctcatcccagatcttctgccacttgttttcgatgtcctgcgccagtgcggcgttgtagcggaagttgggctcttcggtttgcgtgctcttctcgttgtcactcataaatcagcaaggtagcctcgcaactggacacgtcgtcaatcgttattcagcatccgagacgatggctttggggtcaccgttcagcgaaaccgtgagctttgtttggcttgtgaacgtatccttggcggccgtccagctgccatcctcaaccatgtcttccaatgcttccgcgattttctgcgccaattggctggtgccttgactcacggcgatgccataactgacctcgcccttgtccgcaatcacgtccatatactggggcccgttggccgcttgaagaccggaaagcaccgccatatcggaggctatggcatccgccgaccctacttgcacggccgtgacgcactgcgcataactgctacgctcctgaatccgagcctgcgggtggttgccgcggaagatgccgactgtctcgtcacctttcactgcgcacaccgtgccgtcgcctacgtcgcccaccgaacctgcgtcattggtgaatcggccacgctcatccgacctgaccagcaaaccgacgctggtcgtgaggtatggtccggcaaaatcaacgatcgcgctggacccatcggtgataggccaagaggcgacgaccatgtcgacctgtccattgtccagcatggagcgccggttttcggggcgaacctgcttgaagacgatctgcttgttcgcatagccgagtttggcggccacgtatttggcgatggtgatgtcgaagccctggtatgtgccgtcatgccatgctcccaccgatggttcgtcggctgcgaccccaatggcgatggtgggcccctccggcgctccggagacggtggtgacttgaatttggccgcaaccggccagaccggacaatggcaatatcacgccaaaggccgcggcgaatcctgccatcagtcgggagcgaaatccgcgccgcatcgggcggcgggcgcggagcatgctacggctggcgaacgatgaccaatggtgcataaccgtcaaacgccttacttgaacatgcgcgaacgtgtgaggaaccaggcaaccacaccggaaagcaccatggagatcacgatgatgagcaggaagccccaaggcttgtcggtgaacggcatgcccatcatgccgccgtcgaagttcatgccgtacatcgagaaaatcagcgtcgggatggacagggtgatggagatgatggtgaagatgcgcatcacgttgttcaggttgttggacacgatcgaggcgaaggcgtcggtcatgttcgcaagaacgccgctgtagatgttggccatctcgatggcctgcttgttttcggtgatgacgtcgtcgagcagatcctcatcgtccggatactgcttgatgcgttgcagggtggtgagtttctccatcacgatttcgttcgatttcagcgatgtggtgaaatacaccaaagtcttgctcagctccatgagcatcacgatctcgcggttctgcatggagtggcgcagcttcagttcgagcttgtcgctttcgcggtcgatgatgcgcaggtaacgcaggtacatcgtggcgttgcggtacaggatctgcaggatgaagcgcgaacgcatgaaggtgttgaagcctcggatcgtgccttccatgaatgggtggagcacgggcgtgtcctgcatgcagacggtgatgatgaggttttcggtgacgatgatcgacagcgggatggtctcgtaccagtcgcgtccgccacgctcttccacggtgggaatgtcgacgatgatcatcgtgtaatcgtcttcgacgtccacacgtgaacgttcctcgtcatccaaaggggcgcgcaggtcggccaggtcgatgccggtctgtgatgcgacggtggcgagctccacatcagtgggttcgctcaaacataaccaggagccgttttccggtttctcgatctgctccacttggccattgattgagctgaagattctcagcatgtcgcctcacccgccttccgcgctttcctactgttctatcgctgtacggttccaaaccgagattagtctagacccaccgttcgaatttgcgagcggggtttcgcatagcgaccatcaccagacgattggctgccaactcggcatgtgcggtcctcgcagatcggtcggcccgttctcccagtcggcgctgtcggcgatggcgggagccttgttgtattcctccaactcccacaggggctgttcggtgggggtgccgttgacgctgtggcgcactttgagccggcaccagcaggcgttgcgcatgccgccgagtgcgttcatgccgtccgggtcgagttcgagcaggttggagatggtggcggtaatccatgagccatgggtgacgagcatcagcgtggtgggcatgctgtctgaataggcggagtcgatgaccagtgcgcgcacggcatcggcacctcgctggcccacggcggcacggctttccacaccatgcttggtttcgcccccggtgtgctgtttccaagaggcgtagtcgtcggctgccacggctttgatttcggcgcgggtcatgccttcccactcgccgaagctgcgttcacgcagtcgttggtcacaggtgaccggcaatcccaaaatatcggcgaaggcgtgtgcggtctgttgggcacggaacaggtcggaggtcatcaccaccatgcgccggccggcggcgggggcctcctcgaactgtcgcgtatcagtgcgttcggcggcgtcaggaccgggctgggcgatggcttcgggatgctcggcaagccggttcaccttggcccagtagtaccgtgaagcgagcgcgaatccggtctggtcgacctgccattggcctacgatgtcgagcggcacatcgatctggccttgcaagcgatgttcgagattgtattgcgtacggccatggcgcagcatcatcacttcatcgatcatcggttttcgccacctcgttctcttgcggttttttcatactcatctcagcacaacccctagaatggcggcatggagatttctgagtcgacttgggcgttcatcgccaaacaccgccgtgaagatgtgcgtgatgtggccttgcacgccaagcatgatggcgacgtggatgtgccgttcgcgctggagcagattgccggctggcagcgcgcttcgctcaagctacctgactgggcgtcccatgatgggctgattttcccgccgcaagtcccaatggaacaatgttccagccagttcacggctcaatacaaagcccggttagcacagcgattgttggacggggaagcagtcgacgacgccgacgattccccgacatccctagtcgatctgaccggcggtttcggcgtcgacttttcttacatgtctcgagtgtttgaccatgccatatatgtggaacaacaatccattttatgtggtatcgctcgccataatttcccgatactcggccttggccacgccgaagtcatcaatgatgattcaacagcagtgcttgatacgcttggccgagtctccatgatcttcctcgatccggcccgccgtgacgatcatggctcgcgtacctacgcgattgccgattgcacgccggatgtgctgaccctgaaggatacgctgctggccaaggcaccgacggtcatggtcaagctctcccccatgctcgactggcataagaccattacggatttcgccggcgcggtgcatgaggtgcatatcgtctccaccgggaatgaatgcaaggaattgttgttggtgttggggcgcggccgttgcgcctcaccgctcgtggtatgcgtcaatgacgggcaggtgttgtcgtacaaggccggcgataacagcgacaatcacacccctatcagcgattctgccttggttgcacgcaatacctgtaataccgaggatttcccggctgaggaaagcgcgaacggcttcgattcctcgcattggaagtacctttacgaacccaacgcctcaatcatgaaggccgggtgctttgatgttctcgaacagcgcttcgtcgtgcatcacatcagcccgaatagccacctgttcgtggcggccgaacctattgccgatttcccaggcagatcattcgtcatcgaatccatcgtcaccatgaacaagaaagaactgaagcagctattggccggtctcacgcacgccaacatcgccgtacgcaatttccccctatccgtggcccagctgcgcaaaaaactcaaactcaaggacggcggcaacacctacctcttcgccaccaccgacctcaa

SEQ ID NO: 2399 - DNA, 4653 bp, Unknown
  R50_10m  MAG No. k141_7691
agcggaaaaagatgttgacgaagagtccaaagaagctgaagtaggtaatcagaaggacgattcccaaggcgatgccgatgaaggagtcgaacgccactgagcgcactttccatgggcttttgtcctgaagaatcaggcgaacaagcccggtgatgatggccgtcacggcaagtatgaccgtggcggccatcgtatatccgaaagcaaccagcagtgtgatgacggcgacgacgccgagtacgcaccattcaaaccatggcttgccctcatgcgcttcggatacatagggatggttgtgcatgttgcgattccttctgtcgaacggttacgtgaccacaatagcaggcgaatagcaaaggtgggattccgcttggacccgttgacgggtcaggcggaatcccacctttgtgcgttttggctgagctgctcccctcagagagtcccgatcagtggaagaagtggcgggtgccggtgaggtacatggtcacgccggccttcttggccgcttcgatgacctcctcatcgcggatggatccgccgggctgcacgatggccttgacgcccgcgtcgataagcacctgggcaccatcggcgaacgggaagaacgcatcggatgccgcgaccgcaccggtggcgcgatcggcaccatcggccagcgtgttggcgcgctcgacggccaaatggcaggagtccacgcggttgacttggcccatgccgatgccgaccgtggcctggtcgtgggccagcaggatggcgttggacttcacgcagcggattgcacgccatgcgaacacgaggtccttcagcgtgtcagcgtcggcggcctcgccggccacgagcttccaggcgtccggatcgtcgccgacggcgttgatcagatcggtgtcctgcacaagcaggccgccatcgatctggcggatggcctcgtggcccttcggcggctcggccaccttgaggatgcgcaggttcttcttcttggtctgcagcagttcgagcgcggccggctcatagtcgggggcgacgatgacttcggtgaaaatcgggcgcacgctttcggccatctcaagagtgaccttggagttgcaggcgatcacaccgccgtaggcgctcatcgggtcgcaggcgtgagccttcttgtgggcctcggccgcggtcgcgccgatggccagaccgcacggattgttgtgcttgactacggccacggcaatggcgggagccatatcccatacggtgcgccaggcggcgtccgcgtccacgtagttgttgtagctcatcggcttgccgccgagctgctcggcgtgggcgaaaccggtctggttgagcgggtcaatgtagagggcggcctgctggtgggagttctcgccgtagcgaagggtgtgggcgcggtcccaggtgcgggtgaactgggccgggaacttggcggaatcgacttcagtgccctgatcgtccttgtccacctcgacggcgtccagagaggccggcttgggccagtgcttggcggtccactcgttgatggtggcgtcataggcggcggtgtgcgcgaaggccttggctgcaagccacttgcgctcgtcgagggagaagccggtgccatcggccacgcgggaggcgaccagtgcataatcggccgggtcggtgacgatggccacggtggcgtggttcttggccgcgccgcgcaccatggaggggccgccgatgtcgatcttctcgatggtatcggcctcgttggcgccggagcgcacggtgtcggcgaacgggtacaggttgacgaccaccaagtcgaacggcttgatgccgaactcctcgagctgcttggcatgctcggggttggtcatatcagccagaatgccggcgtgaatgtacggatgcagcgtcttgacgcggccgtcgaggcattcggggaatccggtgacatcggacacctcggttaccttgacgcccagctcggcgagcttcctggcggtcgaaccggtggaaacgacttcggtgccggccttcacgaacgcttccgcgagtacttcgatgccttccttatgaaagaccgagaccagtgcccgacggatcggtcggttcgtgtttgtcatcctgttcctccttggattcttgtggttgtgacgccagggaccgcgcctgacggacgatgacggtcttcggggtcgcggcggtggtgcgggaatcattgatcctcccaaccaaccagcctatcgaaaaaacgagcgctgtgccaatcagcgcgagcagccatgccgcggtaaatcccaatgcggtcgaatgaccgacgactctggtggaggccatgacgtcgacgccaatgtgagcgagacgatgatcgccaagcgatccattggacagagcgaacagcaatgtggatgccagtgagatcagcatcgcgctcaggcagaatgacccggcggagtagatcagcgaaaccaatactgggccgcgggtggacgcattccgtatattcaacggtctgcaggcgaatccttgcggcaggaatacagccagcaggcccacgagcgcagcgatggcgagaggcgcgttcaaggcaacggtacgccatagttcgctgctgaccggttcgggcagaataccgaataccggtattgcaggaagctctttggattggccgagccataacgtgaaactggccaaatcaccgatggcgaatccgccgccgaagagccaggaaacagcccagagcatgacgttgggtagccagatcagcatggcgacggtggtgagaattcgtgaaccggtttccatcccggacaattcgaacaacgatacgacagcggcatggttacgtaccgcccatacgatgacggtaatcaatccaattgccaggtatatgcccagtatcgcgacggccaaggcgacgccgattttcaggcagtggcgtatgtccgccggcacctgcttgcgagtccagtccctgaatgctcgcatcttggctgattccggtacggctgcgcataggaaaccgatcgagaatacgatggctgctttcagcaacaccagccactggtcatcgacaagacctaggtgcacggattgccggaatgcctcgttcaacccgagccaaacattcaatccggcaacatacgcatgcggcccgtatgctttgattcgcatggtgagtgcattgatcagccatatcagcagtatggtcaacatcaatggcgtgatggtgagggtgaacgaatcggttctagagcccgatccctcactcagaagcacaacggcctgtgtcagcgaggttgtgccgacggtgagattgtcgccgccctcttccatagagacgaccaataacatcagcgctgtatagcaacctaatgcaacggcatagatggccatggatgcgagggcgactatggctccccgcacccattggcgaatcacggctttcatcacgattggttggaaccgatcagtcgatgttggccttggcgagtatgtcgcgcatgatttcagcggcctggcccggggtcttgcccacggggatacccgccgcttcgagcgcgttcttcttgtcctgggcggtgcccttgcctccggagacgatggcgccggcgtggcccatctgcttgccttcgggggcggtgaaaccggcgatgtaggcgacaaccggcttggtcatgtgctccttggcccatgcggcggcgtcctgttcggcgaagccgccgatctcgccgatcatcatgacagccttggtgtcggggtcggcttcgaatgcctgcagggcttccagcagcgtcgtgccgacgatcgggtcgccgccggcgccgagacatgcggtgaagccgatatcggacaattcgcccatgagctggtaggtgagggtgccggatttggagaccagtccgagcgggccgcggccgacgatgccgtcggggatgatgcccaagttgacgccagggttgccgagcgtgatgaaaccggggcagttcggtccgatgatgcgcacgcccttcttgagcgccagttcgacgaagtatgcggaatcggccaccggaatgccttcagtgatgaccacgatgagttcgatgccggcttcgacggcttcgaccacggcggacttggcgaacttcggcggcacgaacaccacgctggccttggcgccggtggcttcacgtgcttcaccgcaggtggcgaacacggggatgtccacgtcggcaccgttcttggcaccggggaaggtgacggatgtgccggccttgcgcgggttcacgccgccgacgatattggtgccggccttgagcatgcgagccgtgtgggtcatgccctgatggccggtcatgccctggacgataacgggagcgccgtcttcgatgaacagcatcagcgaacctccttggactgggtcgcctcaccggcgagctgcgcggccttggctgccgcgccttccatggtttcggacacatggatattcggattgttggcggaagcgaggatatgcagaccctcggcggcggcgttgccatcgaaacgcacgacgatcggcttggaaccgccgagcttggcgaccgcttcgaggatgccgttggcgacttccacgcaggaggtgatgccgccatagacagtgatgaacacggattcgacctgagggtcggtcagtacgatctccaggctttcggccatgacggctgcgga

SEQ ID NO: 2400 - DNA, 8948 bp, Unknown
  R50_10m  MAG No. k141_7911
accgatacggccggcgccttgcttgacacctcgaactcgctgatcactcaggtttcctctgccgccaaacaaggaggcaaggatctcgccagcgccaagcagggagtcaccgacgtggtcggagccctgggcaccaccgctgacgcgatgagcagctcactggacgcgagcgcctccagtttcggcgcggtgtccgattccatagacaagctgtattccgacgcgaatgatggtgccaccacggccgccgacgaattggaccgtcaagccacggccattggcaagcagacggagaaatacactgaaattcgcaacacgttggccggcatactgggcaacgactcatccatcatcacggcgattgaccgttcaatcgcacggcagaacaggctgcggcaagcgctgaatacggcggcgaccgatattcgccaaggtaatcaggacgcgcaggatcagcatgcgcaggtcaaggatctggccgatcaagcgcagaacagtatcgccaatatcaagtcggatttcacggccacggtgaaaccgcaaatcgactccctgtcgtccaccgtctctgacgcctccggcatactgagttccggcgccacccagttggactccacgctcggcgacctgaaaaggacttccgacgacgccaacgatatgctcggcgacgctcgcaccaccttgggcaaggtgtccggcaaactgcgttccgccggtgccgaactggcttcgttcaacagcacactgagcgacgcactaaacagtggcgatatgagcatggtcaaagaggtgctgggcaatgatcccgaaacgctggccagtacgttggccgcgccggtgcagctcaggcgcaaggccgtattcccggtggcgaatttcggttcgtcgatggcgccgttctacacgctgctgccgctgtgggtgggcgcgctgctgatggtggtgacgctgaaaaccaccgtgtctcgccggacacgcaaagcattgggcgagccgcggccgcatcggctcttccttgggcattacggggtgttcgcgctgattgcgctgctgcaatccacggtgtcgctcggtggcgatctgctgttcctgcgcgtgcaggccgtgcatccgctgctgtttatgttgtccggatggctggcctcgctggtgttctcgttcttcacctatacgatggtggtgagtttcggcaatgtgggtaaggcaatcggcgtgcttatgctcatcgtgcagatttcgggtgcgaacgccgcctacccggtgcagatgttgcccgacttcatcgccaaagtcagtccgttcttgccgctcacccatgcggtgacgatgatgcgtgcggccatcgccggcatctacgacatggattactggcgggccgccggaatgctgctggcgttcgtgccgccgctgctgttgcttgggctgttgctcaggaagccactggtgcggttcaaccagtggtatgtggccaaagtcgagagcactaaagtgctgagctagtaggtattatccgggggttgcctacaaacggcatggacttaccaccctcagtctggctttgccagtcagctcccgccaacgggagcgtacgggagcatatttcgaagagaagagatgacggagatgacaggtacgacggcgacaccgcgcggtgagcgcacgcgcgaggcgacggatcgcaagctcatgcgagccacgctgcagattgcggtggaccgcggcatcagcggcgtgaccatcgaggaggtggcccggcgctccggtgtggccaaaaccacgatttaccgtcgataccataatgccgacgagctgctgcgcgagatcagcgcgatgtatctggccatcccggattccgacccagtgcccagccccacgcgtgagcatttcacgcaactattgcagcgattggtcgattgggtgctcgacaacgacatcgacgtcaagcgcgtgggcattgtattgtccagcgaggccgagttcttccagcacatcgtcgaccaggtggtgaccccgtggctggagcatgtgggggcgttcctcaagcagggagtcgcgcagggcgtgtttcgcgaggacgttgacgagaagttgctgttgtccacgattatcgggtctttggtggcgtatgaggccatcgagggcaaagcaatggacgacgacaccgcctgggcctcgcgcatggccgatctgctgtggccagcattgctgaagtagcggtcttactcctgaatcgaagcctcctggcgggcgacttcgagggctttgttgaaggcgtcggaggtccagctggcaccggcgaccttgtccactttgagtcccttcaggggcttgccgtccactacgccgttgatggctttggcgaagtcgtcctgatggttcttggaaatcgtggtgaacgggtgcccaatgattttgacggtctcgacgttgccgtccttgatggtcagatggacgtcgatggaatcctcgccgaccgggccgtactggccgttgatcgagtagttgccgtccttgtagttgccggtgtccttcttgtcggacgtggtggtggacgggtcgttgtgcgatgagccggaatcggagccgtcggagctatcggagccgttcgactgggattgcgactgctcttcctgcgacttctcggtctcgcccgagttgccggcgtacgcatcgtccatcggcgtggccttggattcgccgcacccggccagcagcgcgccagccacgaccagtccggccgccgccaatgtcgcggatttcttcaacgtattcttttcggtcatattcacgctccttaagccccctctgacgagggggctgtcagcgaagctgactgggggagagaccatcagcttgccatgtattcctcacatactgctcgatgcccctgacggccctactcctcgccgccggttttcgcggccttggtggggtcagcgaaaccaatggcggtctcgccgttctgcgcgccctcgacctgtgcacccgtggaggcgggcttgccgccggccgcctcgtaggccttgcgcgcatcctcgtcattccacttctcaccgacgagcacgccatggttgagcatgatctcgcgctgcgcgcagctggcgacaagcgcatcgtgggtgaccacgataatcgtggtgccctgctcgtgcagcttgcggaacaggtcgagcacgattttctcgttcttctcgtcgaggttgccggtgggctcatcggccagaatcagcttcgggtcgttgatcagcgcgcgggccacgcacacgcgctgctgctcgccgccggagagctggccgggcaggtggtgggcgcggtccttcaggccgaccttttccagcgcctccatggcctgcttctcatcgaccaccgaatggtagtactgggccaccatcacgttttccacggcggtaaggtgcggcaccagatagaacttctggaacaccagtccgatgaggttcttgcgcacgtcggccagctgcgtggcgttcaggtcctccagcttgcggccttccagcttcacggagcccttggagggcgtgtccatgcagccgatcatgttcatcagcgtggtcttgcctgagccggaggagccgacgatggcgagccattcgccttccggcacggtcaggttgaggtcgtccacggcatgcaggtcgccgtagatcttcgagatgtggtcgagttcaagtagcatgacgtttctctttctttattcttcgcgaagcacgacggcggggtcgatgcgggtggcgcggtggacgggcgggatggaggcgacgatggcgaccagcgcgctgaacagcacggagatcagcgccagccaccagttgaatccgatggagcgttcgaacaccgccacgcacagccaactggcgagtccgtagccgattgcggtgccgatgaggccgccaatcaggccgtagagcgatgattcgatgtagaactcggtgccgatggcacgcgagctggcaccgagggccttgcgcaggccgatctcgttgcgtcgctgcgagacgatcgagctgattgtggtgccgacgccgacgagcgtcagcaccagcaccaccaacgagacgatccagaacagcgtctgcagcatggtgatgatgcgggtgtcggaggcggtgatcttggtgacctgctgcgccttgacgtgcatggaggtcatgtcgttgatgctggacaccaggcctgcgaggtcgctggcgccggccgaatactcgatgacgtccacgccgcgcgtgatgccggtgagcttgttgacgtcggcgttggtggcgtagatgatcgagtcttcgctgccgccggtgtccacgatgccggccacgcggaattcggtgccggaggtgtccatgatgtcactggagacacggccgtctttggtttgctggtcgatcgaggagttcgacgaagtgccgttggtgctggcgttatcggatgcacggtagccgatggtgatggcggagccgattctcagaccgatggcgtcggcgatgtcacgtccgaccagcaccttgccgtcggtcggccacgagccgtcgaccacccagtgatggttgaggttcttgacctgcgccgcattcacgccggccatcacgtacggcgaggcgttgacgcgcacgttctcgtagcggtaagtggcgtatttcgcggaacccttggccttgaccatttcagtggtgtgctgcaccatcgccttgtcgatgccggccttgccgtcggcattggtcgattcagtgggtgtgacaatcaggttcgcgccgtacgcacgcatctcctcgttcatctgctgcggcacggcgaggcagatcatcgccaggcagaacagtgtggccgcgccgaccagcgacgccaccacggccatcaccgcgcgcgaacgccggcggaacacggcgctgaacagcattctgaagaacataccggtgttggtcatcggtttcctccttccacacctacgtagataaactcagcggccatggagcacctccgcgggcttgagattcagaatcgaacgaatcgaggaggcggacgccagcagcacggtgacagccagcagcacgaacaccagcacgaacaccatcggccgcatcgtgatgccggaaccgaataccacccggcctatcagctgggccacgccggaaccaagcaacgcgcccacaatcgcgcccagcagcgagattgccgccgtttcggccagcatcaggcgggataccgcggcatcggtggcaccgagcgccttgagcagcgccagctcgccagaccgttcgccgatcgaggcgaccatcaggttggccacggccacggctgcggcgatcaggctcagcacggtcatcagaatcatcacggcctgcgtcttctgcagcacattgccctgcaacgcggcgacctgacgcacctgcttggccaccgcgcccggaatcacctcttcgatctggtaggcgatcgagctcgggtaggcggtgcagtaccaggtctcccattcctcctggctcagcgcggccgggttcgcggcggccttacgggccaggtcgttctccggcgtggtcagggccttgacctcgattttgtcgaccgaatcgggcaggtcggcgagcacctgggccgtggaggaggcgatgtagagcgagccgttgtcctcgtcgccggaatcgtagacgccggtgagcttgattttctgctcgttcttcttgcccgaggcggtggtcttgttgagggtgatggtgtcgccggtggtcacaccgagttcggaggccagcgtcttgccgatcacgccctgatcggaatcgtccttgggccacttgccgtccagctgccaccacgagcgcatgccttccacgcccacgacggtggtctcgccggtggagatcttgaggtccttgttgaaccacgtgccgacgaccggcacgttggcaccgttcaccgtggcgtggatgttgagctgcggcgcgaagttggtgatgttgaacgaccagaagatcgtcttgatcttggccgcgtccgactccttcagaaaagcggtcgggtcgctggtggacgccgcgccgcccgactcggtgttgtacaggtcggaaacgaccgcgtccgccttgggctgcacggtgatgttcgaaccgtaggtggacagctcggcgttgagcttgtcgcccacgtcgaacacgacgcccagcatcgatacggacacggtcgccgacaggcatacggtcagcgcgataagcaggcgccggcgcagctgtcgggtgaacgagcgagtaatcatacgcagaaagaacatgattcttgtctcctgcctgactcactggaagtgggcgctcagcgcgtccagatccgtagtctgaatggtgatcttgccgtggccggtcttgtacgggaatggtatcgggttgcagccacccttgaagccgatggtcgccaggttgatggccacctcgcacttcttgcagatgatcttgccgtccttctcgtagtagccggcgtcgccgcagttctcgcaggcgtccaggccgatgccgtacgcgccaccgttctttcggatgatgatgaagcgcatgacggtgccgtccttggccttgtattcgaaacggtgcaggtggccgtcctcgacctggctgaaggggatggtggccacgccgtccttgagcgagtaggcttccggcggcgaaagagtgatggtctgatgggtcgcggcgacgccgacggtgagggtcagcgtgacgccgatcatggccacgaggctccagacggcggaggccacggcgcggcggcggaacgccttgtgcttgcggccgatggcttcgttcgcgccggtcagcggcatgcggaagccggccaccacggaggcgatggccggaatcaggaacacgaacgcctgggccatgatcatccagtcgttgtggttgatcgaccaggcgagggccacgaatcccgtgtggcccatcgggaaaccgcgtgcctgcaggatctgcatgacaccggtcaggtgccggacgaacagaatcaccagcaccgcgagaacggcggcggtgaacgaggcacgcaccgcggtcgaacgcatcgtgcggaagatcgcggccacgatgatcgacatggccaggcccagcgcgaagccgagcgcgcgcagcagcatgtcggacgtgaagatcgggtcgccgggctccacccagatggtcagctgcagaatcacgtccggcagcgcgtagaacagggtgagcgcgatgtcgatggcggccacggcgttcgcaatgtgcatgaacaccttgtgctgctgccaattggtggtgatgcggcgtgcgaacaccaccacgacgatggtgaggatgtcggcaatgatcgcgcaccacagcaccggatagttgacgaacgtgcgctggttgatcacggccgaggcgcgcaggccggcgaatgtgatagcggcgatcaggccgacggtcaggccgatgagacgccaatgcgagcttatcggcttatctcgcccctcgccgaccgtgagcatcacgctcaggctcatcaccagcaatgcgggggccaaggtgcccggcatcactgccacgaattgttcaagcattcgcgtcctttctctgttcatcttaggctcccctccctgaggggagctgtccgcaaagcggactgaggggagtttttagaccgtcctaagaattatctccctaaagcggcgtaaagccccctctgacgagggggctgtctgcttagtcaatcaccactgacgcggggtgtagtcccagttgtcgaaggtgacctcgatgggctcggtccagaacttgtggttcttgacaccggtctccgggtcaacgtggagcatccagccgttcttctcaggggactcgatggagagcttgagttggtaggtgccggccttgtcgagcttgacgttggcgccgtagtgcgggccgtcggaggcgttcatctgcatgaaggtaccggaggtggcctggccgccctcgacttccttgccggtggacttgtcgatgatggtgtagttcacagtaaggtcagggacgaagtcgcccttgccgtagccgtagtcggtgccttcctgggaggcgtggatgtcggcttccaggtggaaggaagcgtcagcagccttcagacccatggaagcagggtacatgtcgatgggctggaagtagacggcgcccacggtcagcgggccagcggccttgtcctgctccttggcggtgccggaggggccgaccgggacctcttcgaagccggaggtctcagtcggggcgtcggccttcttggagtcgtctttcttggcggtgtcggaggagctggtcgaggacttggtatcggaagcgttgttggtggaaccgcaagcagccatcgaaacagccatggagccggcgagcagcacgccgagcagagcggcaagcttcttgttcttcatcatttctcttattccttctgttgtggtgaatggattattcacgacttatctgtttttagttgtggcggcgtgggctggaatcgcttccattgccatgtcgcaagttgtgttgcgcgagatggtcgcaccgggcgttgtgctacgcctgcgcgctctcctcgtcagccttcgcgtccgacttgctcgcaccggccgcaagccgggccttggccttacgctgtttggcaaagccgaccacgaacagcgcgatgacggcgatggctgccagtacctgggcgatgatgcattcggcgtacgggtagaatccgagccagtcgttggtgggaacgcccggcaggtagttggcgggcagcaggtcgccctcgatgagcgcgtgcacgccgccgccggcgaagacaaccaccagcacggacatgaggatcgaggtgaccaggaagaacgggccaatcggaatctttacggaggtgaagcgaatcaccaggaagatgatcacgagcaccacggcggaggcgagtgagccgaccaccatgccatgcgtatcctg

SEQ ID NO: 2401 - DNA, 3790 bp, Unknown
  R50_10m  MAG No. k141_8018
gccgaggatcttttcgaggtagggcttgtaggtgctgttgggcatggaaaagatttcgtggcgcgattcggggaagcgcacgatgttcgcctcgccgccgccgtccttgaccagttggacgaagtgattctgcggcttattgagtacccagatgtcgcgtccggactggaagagcagcaccggcgtctccacttcggcgcaggcggacggattcagtatggcccggttgagcttcaacgcctggcgcacccattcgaacgccgcgcagtaggtctggtattcgcggttctcgcaacgcagcttgaagtaccagcgttcacgcgcttcggaagcgccctcgttgccttccatcgagaactccggcgtgaagtccgactgcccgaacacacgcttcttgccgaagccgagtccgcacagcgcgccgaccagcacacgggccacgcccagcggcatgccggtggcgggggcgaccatcggggcggagagcaccgctttgtcgaacagggtggggtatcgctccaacacggccgcgccgatgccgccgcccatcgaatggcagaacaggttcagcggcatgccggccgcgtactgctggccgatggtttcggcgaagccggccagatcggccacgtagcgctgccagtcatcaatccacaccatgcagcgattgtccacgtcgcgcgcggacttgccgtggccgcgatgctcgagtacacacaccgagtagccggcgagcagaaaataccagacgagctcgtcgtatttctcggcgaactcggtgaagccgtggctgatgacgatggccccgcggaagatggcggtggcgccttgctcgcgaatcgcgtcgaatttggcggcgtcatagcacaggtagtgcagctggcccgagcggccgccggtgtccataatgccggacagcggctcgaccccggccgaacgttcggcggcggacggatcgaaccagccttcctcgcggcattgctcgagcgcgggcagcaccacgtcggccatcgtttcggcgtacttgttttcgtcgatcatcgtcacctgcatggctcccatcttaggacaagcctcacgcccacacctcgcacccacaccacgacacattcccgggaatgcgtcgcaagcctgcgcgccactgaccgcacaggcgcgtaggttgtgaggtatgagcgaaaccaatgatgtcaatgacgcaatcaagcatttcccacgcctccgggcgcgcacgctgcgcttcggctgcggcgcaccgcgctccgcacagaccgtgggcgacggctcgcgggccctgttcctgcgctccgacggccccgaggatctggtgaccgcactgtggctgagctggttcgacgagtccggcgaacaccatgagaccaagctggccgacccgcgcgaactgctgggcgcaaccgccgacagcgaggacgtgccggccgaggagaaggcccgccgcgagcgtgcgcgcgaaggcggcaccggcatcgtcggatactccgcagatgacgacggcaatcgcatcgtgttcaccatcaacggccgcctgttcctgaccgacatcgattggaatgacgagaccggcgcacccgagccgcacacccgtgaactggccggcgaatggctcgatgaggacccggcgatgtacacgccggtgctgaacccgcgcatcgccccggatggcgaacatgtgctgtacaccacgggcagctacctgatgctgatcgatatcggcggcgagctgggtgaccgcatcaccgcggtctacggcgtgagcgtggaggatgaggacggcaatccggccgaaaacacgtggaaaatcggtctggccgagttcgtggccggcgaagaaatggaccggtacgacggtttctggtgggccccggattcgcagcacgtgctgttcgagtccttcgacaccgccgacgagccgacctggtacatcagcgatccggccgaccccgagaagccggacgccggccgccgctacccgcgcgcgctgacccgcaacgccgacgtgtacctgaccgtgatcacgctggcgttcgatgagaacgaccggtacgcgggcatcaccggcaacgccgatgtggattgggatcgcgaggcgtacgagtatgtggccgccgtgaactggcgtcgcggccacgatccgctggtgctggtgcagaaccgccgccagacccgcgatcaggtgcttgaggtggcagtcgcggcggatggggccgcgctgggtgccacgcgtgtgcttgaggagcacgcgaaggagcagtggatcgacatggttcacggcacgcccgcctacacgccggatggtcgtctggtgtgctcgctcaacgatatggccacggacaccaaccgtctgacaatggacggccgcccgttcacgccggctggctggaacgtgcgcacggtgctcgccgtgaccgacgaggatgtgctggccgtggtgcagcgcgcgcccgaaatcgcgcctgaggtgccggacgcttgggccgatgcggccgccaccgagtccgtattcggcgaccacgacgcccgcagtttcgacgtggtgagtatcgattacaacggcacgatcacgccggtcacgaccgatcccggccagtggaccgcctcgcgcggcgagcgcggcatcgtggtctccggccgcgatatgcgttccgcccgcgcccagatgcggcatattctgggagaacagagcgccactatcgcgtccacggcggccgaacccggctttacaccgaacgtcacgtttacgcgactgggcgagcaccagctgtacacggcgatcatcgcgccgagcccggaaagcccgtacgcgcacgccgagaagctgccggtgctgatgaagccgtacggcgggcccggcttccagcaggtcatcgcctcgcagtccttctactgggagggccagtggtgggccgaccaaggcttcctggtggtcacggcagacggccgtggcaccaccggccgcggcccggcatgggaccgcgagatcttcgaggatatgaaggacgtaacactggccgatcaggtcgaggccgtcaacgccctgcccgaggccgtcgcccggctcaacgccgatgtggaatcacgtgcggcacagccggctgcgggcgatcaggcagacgccgagaaccacccaccggcgcttcgcgccacctcccgccagcgggaggcgattcccatgccggacctcgacaaggtgtgcatgatcggctggtcgtacggcggcttcctgtccgcactggccgtgctggacgcgccgaacgtgttcaaggccgcatgcgccggcgccccgcccaccgactggacgctgtacgacacgcactacaccgagcgctatctgggcctcgacccggatgtctactaccgaaacggcatcgtgcaggacgcaccgaaactcgagcgcccgcttatgctgatccacggtttcgccgacgacaacgtcaccatcgcccacagcctgcgcctctcgcaagccctgatggcggcgggtcgcccgcacaccttcctgccgttgacgggcatcacccatatgaccaatgacgagaccgtggccgaaaacctgctcaccctccagcgcgatttcctgcgcgacgcgctggcctgacaaatcgataacacgcgcatcccacccgaggtgctccaccggtaaagcacctcgggtggtgcgccgcacccatttccgccctgaatttttggatatttggcacccatcgtcatgtgcaagaccggttttgtgcctcatattcccagcaccgcgtaggctgggtgatgattagaa

SEQ ID NO: 2402 - DNA, 6248 bp, Unknown
  R50_10m  MAG No. k141_8251
gaggaggaaataacaatgaacaagacacgtaagctgaccgcgctcgccgcggccactgcggcgcttgccatgctgcttgccggctgcggcgcgggcaatggcaacggttccagcaatgcctcgagcgccaccgaaccgccggccggcatcgattcgtcgtacaccggcgacctgcccatgccgaaggtcaccgagcgttacgacaaccaccagagccgtgacaacgtcaaggacggcggcacgctgaccctgtccatcgtcgaagtcggcccgaactggaactacctgtcttccgacggcaacaccggctacatgtccgagctgtggagctggtaccagcccagcctgctcatgaccgaccaggtcaatggctccccgattaaggtgaacccggacttcctgaccgacatgaagctcgtgagcaaggacccgatggtcgtgcagtacgacatcaacccgaaggccaagtggaacgacggctccgacatcgactggaccgccttcaaggccacgtgggaagccaacaacggctccaacccggactacaacccgccgagcaccgacggcttcgaccgtatcgctagcgttgagcagggcgacagcccgaagcaggtcaaggtgacctacaagaccccgtactacccgtggcaggaagtcttcggcgctctggtgaacccgaaggccgccgacccgaagaccttcacccagggctgggtgaagaacccgcacaacgagtgggccgccggtccgtacaaggtcgactccttctccgactcccaggtcaccttcgtgccgaacgagaagtggtggggcaacaagccgaagctggacaagatcgtctacaagcagatggccgacaccgcctccctcaacgccttccagaacggcgagatcgacgccgtggaggccaacaccaaggacgacatcaaggccatccgttccgtcaaggacgcccagctgcgcatcggctacagcaccaagacccgcgtgctggagtacaacagcaagtccaagccgcttgacgacctgcaggtgcgtaaggccatcactcaggccttcgacgtgaacacctacaacaacgtgcagttccagggcctgaactggaaggccgagcagccgggctccgagctgctgctgccgttccagaagggctacgagaacaacctgcccgccgaggccaagtacaacgtggacaacgccaagaaaacccttgaggccgacggctacaagatgggcaaggacggctactacgccaagggcggcaagacccttgagatctccttcactttcttcggtgacaacgccacccagcaggccctcgccaacgcctaccaggcgatgatgaagaaggccggcatcaaggtcaaggtcgtgaacgtggccgagtccaagttctccgacaccgtgtcttccggcaactaccaggtgctgccgatggcttggcaggctccgagcgccatgaccttcgtggtgtccgccccgcagctgtacacctccgacggcccgtccaacttctcctacgtgggcagcaagaagatcgacgagctcgtcaagaaggctggcagcctctccgactatgacgagcagaccaaggccgtcaacgccgccgagaaggaagccctcaagctgtacggcaccatcccggtctccaacccggcttcgtacctcggtgcgaagaagggtctggccaactacggcccgtccggcttcgccggcaacctgccgcaggacatcggctggcagaagtgatgacgtctgactgacgtctgacatggccaccgcgccgggaacggccggccgcacgcatcgactgcaaggctttcgatgccggacgcggcctgcggcaggttcccggcggggtgtgaccgcggcagcatatgccttactctccttatttctgcatatgatgctgcggttgggaagcctcccgtttgcgcgcttatgcgtcgcgcgcgaacgggaggcttttgcatacttgccgcgattccatcccggcaacgatttgtccaccttgctgcccgcgcggctgaaaccgtatccaccttcctcttcccggatttgtgacgctgacggttgccgagcgtcacaaatccgggagatagtcgcccttacttgttgtcagaacttggtgagcccggatttgcggatatggtcctcccagccatccggcttaggcagtgtgaccagttccctcattgtcacggcagggatcgcggccgccacgatgcacaagcccaaagccacggacgtgactgagtaaccccagtgttgcatggcgatgccggacagaaatgtgatcaccggggcagcaatcgtctcaatcatgcccatgccggcgaatacgcggcccatatgctccttgttgatgagcaatgattggaatccgttgattaccgcattgccggccggtagggccagcagcgaaattgccagaaacgccatacgcgcaagaatccacggagccagcgctgcgccgagcgcgccgatgctcatcagcacgtagaacgatacggcgactatgccgccgcgcacatgctgaaccagcacggaagagatgagcgagccaacgatgacgcccacagacacagaaacgttcatgaaactggctgacaccacatgtgatgggtcggagccgatcgagagcaccgtaatcagcaggaacgagttgaagcacgcgaacgccagcgcgctcgacaaaatcaggcgacgttcgaatcgctcgctaagaagccagcggaatccggaaaacatctcacgccaatactgtgacgcggatgatgtcgtggtcgttgcctgctcgtcagcggcctgagtgatgttggccgcatcgccattctcatcggcctcatcgtcggcaagggcgcggccctccgtattggtccgcccgccacgatgccagtattttgtgatccgcatcgccgccgcggtttccaatagattcagcagcgcgctgactgcgaatggcagccatagaccgccgccgatcaatacgccacctactggtgcgccggcgagttcgagggcggcatcgcggccatcattgaggcttgacgccttgggcagcaattgatcgggaacgatgcctcgtagcatcgtgttgctcgtggttcctaggaggcctgagcgtatgccgaggcatatcgcaagtaccatcagcaccgggtatatgagtaatcccgcccatcctagggccgcgcatatgccgaacagtgcgaaaccaatcaggccaaacgcaatcataagttttttgcggtcgtacttatcttgtaccacgccacctggcagccgcaataccgacgatatcatggtcatgattgaatccagcagcgtcgcctgtgccggtgagcccgtgacggtctgcgcgatgagtggcattgcgaaaccttggatacttgatgacagcgacgtgcatgaatccgctacgaaccatttgccataatccgtgccgcgccatagcgactcggtggtgttgctatgtgaattgtgaccgttgggctgtgttgaagattggttgttgactgttccgatggaatcagccattgtgatcatctcctcgtattcatcgatgcttgagatattctattatgctcgtcttcaagcgccgcaccggactcacccccggccaataccgcgacgccttccccgcccgcctttacaacaccgtgtgattagggaaggtcagggtactaaccctgggagaagtgcagtattctgcattactaaccctaggaaaaatgaaattttgaacaatcgcaaccctaggaaaaatgtagaatacgcgaattgcaaccctaggaaaagtgtgtattgcggtatgatggagcgacaggacagtgatttgtgatgtacggtcccatgcgatagggagggcggcatggcggagttcaggcgagatatatataccaggttgtcggcatgggctgaagcgacggagcacaagccgatagtgctgtgcggcgcgagacaggtaggcaagactcatgtgcttaaggtgctgggtcgggacaagttcgagtcattttcttatgtcaacttgttcgatggcggtgcaaaggctgcgttgacaggtgtggattcggtgcacatgttgcttgattccatggaggcgtttaatggggttcgcgttcggcccggcaagacgctgctgtgcatcgacgagatacaggaaatccctgatttactgactctgttgaaagcgctccatgaggaaatgccggatctccatgtcgctgtagcgggctcctatctgggcatggctcagcacgaagacctgtcattcccggttggcagtgtcacctccatcgatatgtatccgatgacgtttgtggagttcttggaagcggtcggtgatggagtgatagccgaacgcatccggaaccagcgtattgagacacttgggggatttgcggaacgtttagagcgaagggttcgtcagtactgttttgttggcggcatgcccgaagtcgttgagacatttgtagaagatggctatcagcatgcgcgtgccgtgcagaaagaattgttatccaattacgacatggacttttccaaacatcccagaaccggtgtggatagtgagaaaatgcgtttggtgttttcctcgattccgtcccatctggcgcgtgagaatcataaatttatttttggccacatcgctcgtggcgctcgggcggcgcaatatgaatccgcgattcagcagattgtcgattctggtcttgcgttgcgggtgtatcgcgtcgaaaaacctgcggcaccattgccgtcataccgtgatgattccgcgttcaaactgtatctccatgatgttgggctgctggcagcggccctggatctgactcccgcaagcgtggtccttggtgatgacgggctgaccgaattccgtggtgcgttaacggaacagtatgtttgccagcaattagtggccgccggcatcacaccgatgtactggtcgaatgcgaacagtacgggagaagttgattttgtctttgcaggtaatggcgcaatcattccgttggaggccgaagctggtaccgagcgtcataagcgtagcttgaagtggctgtgcgacaaatacgggatttgcggttaccgtacgtcgatgcggaattacaaggagcaggattggctgaccaatgtcccactgtggatagtcgggagctgcttccgcccgtggttggcgagtgattatgagccggatggcggagctgatttaggaccgctaccgaatactgatgatgaaggatgactgaagccgcgagatatggttcggccggttgctgacttgggatatggtccgcgaccggcctgtagtggtgaagccttaagggttacagcttgaaggcggcctcggcgtactgatcgcacatcagaccgaagcgcatcttgcggccgttgatggtcttgacatcggtatcgttgtagcggaacaatcccggtccttccaggtacatccaggagtaacggccattgccgagaatgtcggtcagcgaccccacgtacgaccactgctggtcgtcgtcggtacgcagcacctcgtaggcggaggtgtacggattgcgcgtgcgttcgatggtgatttcggcgtccttggaagcgcggtaccaccagccgtcatcgtctcgcagcatggtcgaatcgatgacgctgttcttgcggtcaatccacttgaccgggtcggagaaggtgcggaaatcggtggtggtggcgccgtcatgcggaccgcgcgtgctgctcgaacaggacccggcgcacaagctgtatgccaccggtcaccacaacatcgtgaacgttcccggcaccgacgaatgggttatcgcgtatcgccggttcgcctacaatccgcctatctcacgtgttgcgggagatgccgattccgtctcacaatacgtaaaacgtgaatgaaccactcactattcttgtgttttttgtgattcaaagtgcgttttgcatatgtaaaatcgtgaatgctaagatgatatcagtatgtgattgtgtgatgacctgcgtgttttcagtcattctccacaaaagaggagggaaatatgctcaagcgccatgcatatgaccagttgctgaattggaagaaccgtaaaaccaagcagggcttgttggtcacgggtgcccggcaggtgggcaagaccacgctgattgagcagttcggtgcagaccattatgagcatgtggctgaggtgaatttcatcgaaatgcctcaggcggtcgaaacggtaagcaaggccaaggacaccgaa

SEQ ID NO: 2403 - DNA, 5906 bp, Unknown
  R50_10m  MAG No. k141_8553
aattcgggggtttcgccctcgagaagggcggagatgccggcaccgaggtcggcggtgagcttcggcagcacgacttcggtttccgggtcgccgaaacgagcgttgaattcgatgaccttcggtccgtcggcggtggcgatcaggccggcgtacaggatgccggtgaacggcgtgccttcctcggccatgccttcgacggtggggcgcacgattttctcgatggcctcgtcgaccacggactgcggaatctgcggcaccgggctgtaggcacccatgccaccggtgttcgggccttcgtcgccatcgtgggcgcgcttgtgatcctgggagatcggcatcggccagaaatcagtgccgttgacgaagctcatcagggagaattcctggccgtcaaggaagtcctcgataacgaccttggcaccggcggagccgaagcgatgatcgatgaagatgtcttcaagcgcacgctgggcggtgtgctcgtccatggccacggtcacgcccttgccggcggccagaccatcggccttgatgacgatcggcgcgccatgctcgtgtacgtaagcctgagccatgtccaagtctccgaacgtcttatatttggcggtcggaatgttgtgacggtccatgagctgcttggcgaaatccttggaaccctcgatctgggcggcggccttggacgggccgaacgccttgatgccggcggcggcgaaatcgtccacgatgccttcgatcagcgggacttccgggcccacgaacacccagtcatagccattgttcttcacgaattcgataagtgcggcgtggttcgactggctcagctgcgtggtgtggatgccgtccttgagcatgcccgggttgccgggagccacggtgacttcgtcaatgctcggtgccttgagcagcgtgtaggcaatggtatgctcacgcgcaccggagccgatgaccaatactttctgacccatgtttttccttcctaaagtctttggctcccctctttgaggggagccggtatctggagctacttcagtacgatttgcgtgtcggtggtgtcggtggtgatctggccgagcacgtaggcgggttcgttgttgtcggcgagcagctttagcgcctcgtccttgcgggcggggtcgatggccagcaccatgccgatgcccatgttgaagatgttgtacatctccttgtgatcgatgttgccggccttctcaagtacgtcgaagatcgggagcacaggccaggtgccaagctcgatctcggcggccagaccgtccggaatcatgcgcgggatgttctcgatgaagccaccaccggtgatgtgggccacgcccttgaccacgcccgccttgaacagcggggagagggccttgacgtagatcttggtgggggtgagcagcacgtcgccgagctttgcgccgcccagctcggcgagctcagtgtccacggtatagccagcctgctcgaacagggccttgcgcaccagggagaagccgttggagtgcacgccggtggaaggcagaccgataagcacgtcgccctcagtgatggtggaaccgtccacaatggcggacttttcggcaacgccgaccgagaaaccggccagatcgtactcgtcctcgtcgtacatgcccggcatttcagcggtctcaccgccgaccagtgcggaaccggcctgcacgcagccgtcggccacaccggccacgacctgctcaagcagggccgggtcgttcttgccgcaagcgatgtagtcaaggaagaacagcggctcggcaccctgggcggcgatgtcgttgacgcacatggccacgcagtcgatgccgatggtgtcgtgcttgttggccagcttggcgaccatgagcttggtgcctacgccgtcggtgccggagatgaggaccggctccttgtagcccagggaggctaggtcgaacaggccgccgaagccaccgatgccgccgaccacgccgggacggttcgtgcgggccacgtgcgacttgatgcgcttgacgacttcgtacccggcttcgacgctcacgccggcgttctcatatgcttttggcatttggtggggcctttctgttctattttcaagctcccttgccggggagccacctgcaaaaagcggattttcgtttgtactaaactccccttgtcaggggagctgtcagcgaagctgactgaggggtagtcgtaaagaccaatgactgaggtgtagtcgaaggaccggccgaacctactgcacgtccggctgcacggtgttgtactcgttgccgatgtacttgctcttgtacagcgcgaattcaggcagacgcacacggtcctcgggcgtgagggacttcaggaagtcggcctcgtagtcgtcgagcgcagtggggtagtcgccgttgaagtaggcgacgcacaggccaccgtatggggcgtcggcgttcagtccgatggattcgaccagaccgtcgagcgaaaggtaggccaaggaatccgcgccgatgtattcgcggatttcctccacgctcatcttggctgcgatgagttccttggtggtggagatatcaatgccatagaagcaagggtacttcagcggcggggagctgatgcgcatatgcacttcagcggcgccggcttccttgagcagctgcacgatgcgcttggacgtggtgccgcgcacgatggaatcatcgataacgataacgcgcttgcctttaaccacgctgcgcacagcagagagcttcatacgcacaccctgctcgcgcagttcctgcgtgggctgaatgaaggtgcgggccacatactggtttttgattaggcccatttcgttgggcaggcctgctgcttccgcatagccggatgcggcggacaatgaggagttcggcacgccgataaccatatcggcctccaccggggattcggcggcgagacgtgcgcccatgcgcttgcgggcggagtgcacgttgacgccatagatatcggaatccgggcgtgcgaagtagatgtattccatcgagcagatggccagctgcgtgttgttggtgtactgcacgatcttgtagccgtgatcattgaccaccacgatttcgcccgggcgaatgttgcgcaccagctcggcgccgacgacatccagtgcgcaggtttcggaggcgagcacgtaggcgccgttcttcatcttgccgagggagagcgggcggaagccgttcgggtcgagtgcgccgatcatggcgtcttcggtcatcagcaggtaggcgaaaccgccatgcaccgtgttgagcgcttccttgagcttgtccataaaggtgcgctgcatcgaacggcgaatcaagtgcatcagcacttcggtgtcggagttcgaatggaagatggcgccttcgtcttcaagcttgcggcgcagtgacgggcagttcgtcaggttgccgttatggcacagagccacgtcgccgtcatggaagcggaagatgaacggctggatgttgtccgtggtgcccgagccggccgttgcgtaacgcacgtggccgatggcgcaattgcccttcagtcgttcgatttcgcgctcatcgccgaacacctgggtgagcaggccgagtccgcgatgaccgatgagatgaccgttatcgttggagacgatgccggcaccttcctgaccgcgatgctgcagcgcgtgcaggccaaaataggtgagtcgtgaggcgtcggggtggccccatacgccgaagatgccacattcctcatgaatgtcttcgagttcagccgacaagccaaagctcctttttcaaacaggggattaactatctgccaaccctaccaatcggcggctacatcgcgtgttgtggggtggtggaacttgttggggttcgcggacgcggtttaagcaccagatcagttgagtatgaatagtggcttaggattttggcctttcgtcgtatgaatccggtgtttgtttttcggcttcgtctcagtgcctgaaatggctgaagaactcgatggtctcgggatcctgcgactcgtccatcacctcggcgggtgtgccgttctcggcgatgacgccgtgacggagcagtacgatgcggtcggccgcttcgtgggcgaagctcatttcgtgcgtggccatgaggattgtggtgccttgggcctttaactcggcaaccatgttgagcacttcgccgaccagcatcggatcaagagcagatgtgatctcgtcaagcagcagcagttccgggtcggtcatcagtgcgcgcgcaatcgccacgcgctgctgctggccgccagagagctgatcagggtaggcgctggctttatcgcgcatgccgatgcgttcaagcagttccatagcgcgggtttcggcgcgatccttgctccagtggtgaaccttgattgcggcaagggtcacgttcctgagcaccgacatgtgggggaagaggttgaactgctggaacaccacgccgatacgtgcgcgaatcttgtcctggtcggcacgcgggtcggtgatatcggtattgcccagccaaatccggccgtcatcgacctgttcaagcaggttgacgcatttcatcaatgtggatttgcctgaaccggaaggccccagcaaagccaccacctcatgttggtgaatgtcaaaggaaatgccacgcagcacctgcgtgtttccaaaggatttgcgcacgtcatcaagacgcagcaccgtcttgttgctcacgggggagtcactcgcctcggtggtgatattggtcatttcgctcataccgttcctccgctgagttcgcgtttacgcagacgttccgtgtaccagtcgttcagcaggatgaacggcacgctcatcaggatgaacagcaggctggcgaccacatacggcgtgaagttgtaggtgctggccacgtcgatctgtgcggcgcgcacggcatccaccgcacccagcacggaaatcaggccgacgtccttttgcatggagatgaagtcattcatcagtgcgggcgcgactttgcgcaatgcctgaggaatgacgatcagtcgggtcgtctggccggaggtcaggcccaacgagcgggccgaggctcgctgagaaggatgtacgtcgttaaaaccggcacgcagcacctcggagacgtaggcgctgtatcccattaccactgcaatggtgccgagtaccgagggatcgatacggccgaacaagcctaggccgggaatgccgaaaccgattagatacagcacgacgataataggcacgccgcgcatcacagtcgtgtagatcaatgccaggatacgcagcgggaacagaataggggagcggctggtgcgcaccaatgcgatcagcgtgcttagaatcgccacgccgaccactgcgacgagcagaacgcggatgttgagccataggccgtcaagcacatggggaaacgatttgacgaagtattcgccggagaagaaggtctccttgactcgtggccagccgggggagagcttcaggccgatgacgatgaccacaacgaacacaatggtgctgatcagactggtaatcgtcgattgaatttgctgatgaacacgatattggcgtcgtctgagctcgacctgacttacctcgtgtccgtcaggggcattgtactgcctggtttcggttggtgctgcggtcatgtgatgaatgtcgctcgcttcctgaatgccggaatggccgggtgtcgcaggaaaatttccgcagcgcccggccaaggtgttgtgaccttatgatgtaagcctacttcacttacttcttcagttcggtcaggtcggtggtgtactcggccagccacttgtcctgaagcttcttgatggtgccgtcggcgttcaggtcatccactgccttggtcacggctgcagtcagcttggaatccttcggcagcacgatgcccatgccgctcttgtcttcggagtcaggcagacggccgagcacc

SEQ ID NO: 2404 - DNA, 21723 bp, Unknown
  R50_10m  MAG No. k141_8943
tattcgcccttgtgcgagccggtcaacgcgatgcggtgcagcggcggcactgcggcatacacgtagccgtgttcgataagcggccgcatgtaccggtagaacagcgtcagcagcaggatacggatgtgcgcgccatccacatcggcatcggtcatcatgatgatcttgtggtagcgcgactgttcgatgtcgaagctctggccggagccggcgcccaccacctggatgatggccgcgcactccttgttggagagcatctgcgtgatcgacgccttctgcacgttcagaatcttgcctcgaatcggcagcagcgcttggaaaccggcgttgcgggcggccttggcggtaccgagtgcggaatcaccctcgacgatgaacagttcggccacgtcgtcattgcccggctggcagtcggagagtttggccggcatcgaggcggattcgagcgcgttcttgcggcgcgtgacctccttggccttgcgcgactggatgcgtgcgtgcatttcgccgacgatcttctccagcacgcggccggattgttccttgtatccgcgtttggagccggtgatcatctcgccgaattgcttgtcggtgagccgggtgacgatcggcttgacctgcgcggtgccaagcacgtccttggtctggccttggaactgaggttcggccacgcgtgcggtgaccacggccacgagtccggcttggatgtcgtcgcgctccaccttcatggcggagtccttcatgttcaccttgagcttgcgggcgttgtcttccaccgccttgcgaatctgcttggtgatggcgttcatgaaaccgtccacgtgagtaccgccgccgggcgtctccacgatgttcacgaagctcatgattgtggtgtcgtagccgttgacccatcgcagggcgatgtccacgccgcaggtgcgttcgatttcctgggcgtgcagttcaccgccttcgcccacggcctgggtctcctccttataggtgccctcgccttggatgcgccagatgtcggagatcggctcgcctttggataggaagtcgacgaagtccttgacgccgccggtgtgcaggaattccacgacgcgcgggtgcgcgggctgctcgccgaacgcgccatcgacgacctggtcgccggccgtcagcgagaagtcctcctcggacaggctctcggtactgtcggcttgagcctcggtggagtcgtcgaagagttcggcatcgttggacgagacgtccaaagccggggcctggtcttgcgcaggttcgactgcgtcggcatcaatggcttcggcggtgtcagtcgccgtttccggtacgttttcgtcaacaatggtgattttgagtccgggcaccaggaagctggtctggcgcacgcggtcgatgagctgttcgtatgagaattcggcggttttgttgaaaatctccggatcataccagtagcgaatacgggtaccagtggttttgggagataccttgccgatgatttccagctcggtgggtcggttcttgcgagtgcgcttgaacggggaatcgggagacggattggccgggtcggcatccgtgtatacgccagggtgaccttggtggaaggtcatgtggtgcgtcttgccgtcacgatccacttcgacgtccagtcgggagctcagggcattgaccacggaggagcccacgccgtgcaggccaccgacggcgttataagacgagttgccgaacttggcaccggcatgcagtttggtcagtacgacctccacgccggacaggccggttttcggttccttatccaccggaatgcctcggccattgtccgcgacttccacggaaccgtcggtgtgcagggtgaccacgatatcgttgcagaagccggccaaggcctcatccacggagttatcgatgatctcccacaggcagtgcataagaccctgcgagtcggtggtgccgatgtacatgcccggacgcttgcgcaccgcatccaagccctcaagaacagctaggtccttggcgccgtattcttctttgggcatacagtcctattttctaataatttggctcccctcttcaggggagccttcaacggatggctccgtcgtctgacagcccactgggctgtcaaactcctcgcgcggtcggcctactaagcgggccgaccgtcattgatccaggaagtcgcgcagggtctgcgaacgggacgggtggcgcagcttggacatggtcttggactcgatctgacggatgcgttcacgggtcacgccatacacacggccgatgtcgtccagcgtcttcggctggccgtcttcaaggccatagcgcatcttgatgacgccggcctcacgcggagacagggtttccagcacctgcttgaactgttcctgcagcagggagaaggccacggcgtcggacggagcgatggcgtcggtatcctcaataaggtcgccgaactcagaatcgccatcctcgccaagcggggtgtgcagggaaatcggttcgcggccgtacttctgcacttcctgcaccttctcaaccggcatatccagctcgcgggccagctcgtccggcgtaggttcacgccccagatcctgcagcatctggcgctgtacacgggacagcttgttaatcacttcaaccatgtgcacaggcacgcgaatggtgcgggcctgatcagccatggcacgggtgatggcctgacgaatccaccacgtggcgtaggtggagaacttgaagcccttcttccaatcgaacttctcgacggcacgaatcagaccaaggttgccttcctggatcaaatcaaggaagagcatgccacgacccgtgtaacgcttggcgagcgagaccacaagtcgcaggttggcttccagcagatggtccttagccttcttgccgtcggcggcggcccacttgagttcacgcttgcgcttgaactccatgccttcactttcggtgtcgagcaggtgctgggcgtacaggccggcctcgatgcgctcggacaggtcaacttcctgttcggcgttcagcaggctcacacggccgatctgcttcaggtagtccttgaccgggtcggcggttgcgccggccgcgatcacacgacgcttcggattgcccgaagggatgatgttctcttcctcatcatccgtgtcggagaccacgtaggcacccttttccttgggctgctcgggtgccttggacttggcttcttcctcgtcctcgtcgtcttccacatcgtcgtcgtcggcatcgtcctcatcgaggtcttcgtcgtcggcatcgccttcgtcaacgtcgtcaagatcctcgccgaggtcgtcaacatccaaatcgtcgtcgttgacctcggcatcgtcatcaagctcgtcatcgacctgagtgtcctcgtctttgacgagctcatcgtccttggccttcttcgcggttttcttcgcggcggacttgcgcgtggtctttttcgagggctctgcggacttggacttcttggcagaagtcttgcgcgcggtggtcgtagagctggccttcttcttggtctcggtctcctcgctggactcggctgtctgcttggttgccgtcgtttccttcgtggccaaaactgctccttctgatctctcgccgtgaagcgcatataccacatgggcccacttctggcaagggcaaatcgtcaactatgtgagtaaaccaccctccacggacgattattcccacatcgttgcccgacgtgttgccgatcaccacacgctttccttccgcgcatcgcgcataaaacctcggaaatccgccgtttctgttcattcagcccgagcaccatgccggtgccacgcctcgatcggcggctgagaatatcatcgccgccagcgaacaatcctcatcgagcagcaggcatcgcaaggcgaacaccattgctcgcggatcgcccagccaccataaggtgtaagcgatcacggccaatggctgtatgcagtacggcaccggtgaggcttccgcgatatcgagcaacataccgatgccggcatggcaacgctccttatccggcatcatgccttcatcctcgaatgcgcaggtcagcagctcgcccatttgtgttctcgtacgtgccagatgcggtcgcgccgcgaattccatgagccatgacttggggcaacggctttcatcaataaccaacgagagaatcagcgcatcacgaatcgataaggtctcgcgcatgcccaccgcaaacgcggccatcgtctctcggcctaggtcggtgttcccggcatcgagacaagacagccattcatccaatggttcggccacccagtcggcattagcctgttgcgcgcctcgaagtcggcgatcattgcgaaattcctgtgatctcgtctccaactcatcaaagccaaagggctccgtctgctcggcggcgtgccgtttggcgtgtcggctcttacgcggcttgtgcggcgtgttgttgttcatcatgtcctccttgactaatggtgtgcaatctattggtgttgtggtgcgcgccgagccggatagctcatgcgccgagggggtgtgtgcccactatggctgaaaacgccgtatgacgcaggaaaaaacgaccattgtggttctagcttcaaaacccttgattcccaacgttcttgtgttcttcaaaccctgtggataagttattaggcatgtgcacaactgctaacaaccgcgaaatcatcgagccacgcatcattcagttggtgcgggaactgactgccgcccccgccaccgacgaggttgccgacgccctgaaaccggtgatggaacaggttgtgggccaagccgcctcctccagccaaggaggcaaacgactgcgtgcgttgctcgcattggacgccttcgatattcttgccggcgacgtgactcctgatcggcgtgacgccatgatcgacctagcctgtgccattgaagtgtttcagacggccgcactggtgcatgacgacatcatcgacgaatccgatctgcgccggggcaagccttccgcacaccgtgccttggaacaggccgtacacagcggtgccataggccgtggcttgggcctgatgcttggcgatattctggccaccgcctgcattgaaatcacacaccggtccgccagccgtcttcccaacaccgatgccttgaacgaggcgtttcttaccatgcagcgcgaggtggagatcggccagatactggacttggccgtcgagatgaccccgttgtctgatcccgaagctctggcgaacgcctcattgaacgtattccgctggaagacagccagttacaccaccatcgccccactgctgcttgcactgctggccgcaggagagagcccggatcaggccaggcattgcgcgttggccgtaggccggccgctcggactggcgttccaactggccgatgacctgttggatgtcgtcggatcaagccgcaataccggaaaaccagttggcggagacatccgagaaggcaaacgcacagtgctgttggctgatgctctgtctgcggcagatacggaggataaggccgatctgattgccatcttcgaagcggattgtcgcaacgacgaccaggtagcccgcaccattgaactgttcacgtcgaccggtgctcttgatcgatcccgcgagcgcatcgctgccctatggggtgagtcccgtaaggcgattgccggtcttgagctgaattccgaagcgcagcgccgtctgaccgaggcttgtgcgcgattcgtccccgaatccttgcgatagtccacaatgcgagccgccggaccatgagaccatgaacaccggtgaaaacccgtgaaagctatgcgctgatgctccggccgcgtaaccggggccatgtacactgaacatgtttagtcgtgattaaaggaaccgtacgatacaacatgagtgagaacgagcccgcacagatgattgagggacgctaccgcatcgtgcgcaatatcgccgagggtggtatggccaccgtgtatgaggccatcgatgagcgtctggggcgcaccgtggcgattaaggtcatgcacacacaactcgccaaaggcccgcatcgggagcagttcgtcgaacggttccgccgcgaggccaattcggccgcgtccatcgccaacccgcacatcgttcaggtgtatgacaccggcgagttcaatggacttgattttctggtcatggaatatgtgcatggcgtcaatctgcggcatgagatgaacgcccaaggcacattctccgtgcgtgagacgctgcgcgtggtcgcggagacgctggatggtctggcttccgcacatcgcgccggcgtggttcaccgtgacatcaagcccgagaacattttgatcaatgatcgcggccatgtgcagatcactgatttcggtctggccaaggccgccagccaggccacattgagctccaccggcatgctattgggcaccgccgcttatctggctcccgaaatgatcgagaacaatcaggccaccgcgcaaggcgacctgtattcggtgggcatcatggcatgggagatgctgaccggcaaggtgccgttcgattcggataatccggtgacgcttgtcttcaagcatgttcatgaggacgtgccgtccgtggccacggtctgtcagggcattgatccgtccgtggcggcgttcatcgcccatctgaccgcgcgccaggtggatgctcgccccgccgatggcgcggcagcagctgaggaattgagccagttggccgccaaattgccgctggaggcgtggcaataccgtttgcatgccgaacccatcggaggtgatcataccgatgccaccgctgcagcgctggtaggcaatatcgccgagcaggccccgctgaccggcgtacctgccggtgcagcaacgttcaagccgtccgtaccagcgtttttggccgatgatgtcgcaagcaataccgtcgataccggtggcgccgcagacgtcaatcctccggctcctccggtcgcccccaccacggcacttgattcgtcgacgccagccgatgcttcagctccccataagacgcaaatcatggcacagtccggcagcgagacacaagtgctgcctcaggccggcgatgccttcacccgagcgcttgccctttccgatgagccggacgtcgcttccaacggcaccgggccaaagaagcagcgcagcaaaaaaccgctcatcatcgtactggtgatcgtgctggtactggctgcaatcggcggaaccgccggctggtggtggtttgccggaccgggcagctattggagtgtgcccaagccggatgacgtgacctgcgatgcgaatgcaggcaccgaatgctcgttggccggcgcggattgggccacgtatgagagcacgttgaaggctctcggcatcccctacaagacgcacaaggaatacagcgacgacgtggcggaaggcaagatcatctcttcttccgtgaacaagaccaaggccgttgtgaacagccgcataagcaagcgagccaatcaggagcttacggtggtggtgtccaagggcgtgcggatgaccaccatcccgaaggatattctcgacgcgaattcggccaatggcaaggacccgttgaacgcgctcaagaaggccggcttcgataatgtcaagcatgacgagtcgaaggatgagtattcgatggacacgccgcagggtgtggcattgacgatctcccctgatcccggtaccacggccaagcacaacgatgaggtgacggttactttgagcaagggaccgatgccggtgaccatgcctgacatcgtcggtaagacccaggatgagatgcaagccgcgctcggcgagttgaagctcacggccaatgtcaccgaacagtacgatgacaaggtcgaggccggtcaagtcatttccgcgtctcaggaagccggagcccagctgaagtggggcgatagcgtggacgtggtgatttccaagggtccggagatggcgacgataccgtccggccttgtcggcaaacaggaaagcgccgtaaccaagacacttgaaggtctcgggttcaaggtgaaaaccgacaaggtgctcggtggcctgttcggcacggtacgtaccgtgaaaagtggcgatacggacctatccaacggcggcaagattcgcttgcgcgacgccaatggcaaccccaccgtcatcaccctcaccatcgtgtgagagtaatcgactggctcccctcgctgaggggagccaacacacattattcggcttcttcagcggcctgccgggccttgagctcggccttgaccttctgggcgtattcgttcacgaattcctgaccgctcattttctggattgcggtggaaacacgatcggtcagcgaacgcaaatcatcatgtgtaatttcatcagccggcttcttcgcaacctcaatcggcttgccatacaacaccttggtcttgcccttcttgggaatcgacgtgccaatcggctgcagcttgtccgagccgatgatggcggtcggcacaatcgggcaaccggtctcgagcgcaagtcgtgcggcaccggtgtgtcccttgtacagtcgaccgtctgggctgcgcgtgccttcaatgtggataccgaacaggtgcccatcctcgataatctcgcgtgcatgctcgagtgcgccaagcgacttgctgccaccggaacgatcaaccgggaacacgcccacggacgtgaaccaccacttcttgaacttgcccttcaatcccttgccctcgaagtattcggctttgcccatgaagtgcaccatgcgcgggcaggtaatcggaatcaaagcatcgtcaatcaccgccagatggttggctgcgataatcgcgccaccctctcgaggcacgttattcagtccgctgacagcagggctcaaacgatgatgagcaatagggccgagacctttgacgaagaaccagtagagcacttggcattcctcccgcagacgaactagccattggccggtcgcctgattagagtgacagttatgactgagaaccagaatagcaatgccgacggagagcggccaacccccacgccgggcaacggacaggattccgatacttcgtccaagtcgtcgactcccggtgccgccggaccggccacgaatggtgccgatacaccgcaatcgcatgacatgaacgatttggatgcggcgtgggccgcgttcgaagccgagcatcaggccgacttgcatgacgtggcttcctccaggcaggccaaaaagttcgagaagcaggccaagaaacgcgagaaggaagcactgctttccgtagatgacttggatatcggctcgttcaccgatgatgctcgcccgagccgtggcggcaaaaaaggcaagcagtcaggcccccgtgatttcaccggctccagctggctggataccgataatgtgatggacgcctatgatgatggcggcttcactcccccgaaccctgatcttggtccggtcaaagcatctacggtactgctgacggcgttgctcatcatcggtctcgcaggcgaaacggtgatgatattcgttcccggcttgaacgcgattcctctcttaggcgcgctgctcaatattctcttcgggctgggcgtcattttgggtctgggcggattggtggccaaaatcctcaaccgcaaagaccgccccggtgatcagggtggctattacgacgacggcgcgcgggtctaacgcttggactgggcggtttcgatccacttgttgaacagggcttcagccttgccggagtcgacagcatcctcggccagcttgtaggcctcggcgaagcgctcggccagtgtgccgttgccgaccagattgccgtcagccacgatggcggaggcagcgttgagcagcgcggtggtgcgggacgtaatgtccttgccggccaggaagtccttaaatgcgttggcgttgacgtccggcacgccgcccttgagctggtcgacggtaatcttggcgagacccagatccacggtcgggtcgaactcggtttcggtgaccttgccgtcgcgaatctcccagacggaaaccgggccggtgggggcgagctcatccatgccctcatgcgaagtgtagaccaagccggactgaccacggctggcgtagacggcagccatgatcgggctcaccttgcggttggcgcagccgatggccacgtgtgccgggttggcggggttggtcaacggtcccaggatgttgaagacgcacggaatgccgagcgcggcacgaatcgggcccacgaagcgcatggccgggtggaaggtgcgggcgaacgcgaaggtgatgcccacctcgtcgcccacttcgccgacggcctccggcttcaaatccagcggcaggccgaggtcttcgagcacatcggcggcaccgcacttcgaggatgcagcgcggttgccgtgcttgacgatcttcacgccggctgcagcggcggccacggagcccatggtggacaggttcacggtggcgaagccgtcaccaccggtgcccacgatgtcggtggtcccaccggaaacgttcagcggcacggcgtgggagaccatggccttggcggcaccacgcacctcgtcggcggtcagtcccagctgctgctgcatagcgagcgcggcacccacggcggccggattggcgttaccttgcatcaggtcgtccacgaaccactccgattcctcagcagtaaggtggtctcccccgaccagcttggtgagaatcgacttccatgtgatctcggccatgatgccctccttggcgtttcctacgccgtgtgatgtatgttcgccgctcattgtaatggttcgtcatttcaaggccctgaatcttccatattgcaaaatatggcgctattgctgttttcgtggatgtcggttcgtcgtcgagccgttggtttcgtaagcgtgaggggcgttcccgcgtattctgttttccgaccaaagaaatgaatcacgaagaacgcctgggcaaaagcccattcaccggattgccgaacgtcaaaggcacggttgcagaggatgcgcggatcacggattcgccgccgcgttccgaacccgtgctcgagatccgggtgcgtccacgtgcgggtatgctccgatgctcccgatgcggaaggaggcgccgcgggcatgaccagggcggtggcgtgcggcgtcgtggtcgcttccgtgccgtgggccgagccgggcagccggtccacacgcgatttcgaatcggaacgcgcgtggccgatgagcgtcgcgaaccagaagaccgtaagcggttttccgcacgtcgcgtggcgcgccgccggaagacgccgcccatagggtcgccgaacggttgaaagcgtcgatgccgtctccgttcggcgacctcacgtcgatcggcgtggacgagaccggctaccgcaaaggccacacgtgcatcaccgtggtcgtcgaccacgaacggcatcgggcgatatgggcgcacgacgggtacggcagggacgtgttcggcctgttcttccaaacgttgacgcccgaacagcgcgcctccatcagggtcgtcgccggggacggggcccggtggatcgactcatgcgtgcatgagtggtgcccgaacgccgaacgcgcgcccgacgggttccacatcgtcagttggacgagcgacgcgcccgacaaagtcaggagacacccgtggaaccaggcgcaccgcgacggggacgagaaatccgtcaagcgcatgcgcggcgtcagatacaccgtcctgaagaaccccggcaagctgaccgacagacggtccgaggcgtccgggaacctgcggtacacggaccccaagggccggccctaccgttcatgacggctcagggaacccctccggacgatgcccaaacgaccggccgaccaggccgggaccgaactggaccgccgggtgttccgggcgtcccatagccgtatccccgagatcgtcgaacgcgcccgaaagatccgccgtcatgggcccgacatcctcgggacaatcgaattgggctgttcaaacgccaggctcgaggcgtccgacaacaggatcaaggtcaccatccgcatggcctacggcttccaccacgcgaacaatcccatcgccctcgtcatgcttcgccgcggcggactcgacatacgcccaccacaaccaagaacccaacccacgaaaacagcagaagcctcatatgtattggacatttctgcgcagagagggaggtgtaaccgcagcattacggtgtgagaacgcaaggttacgtagctgggcattggctgtggcgttgctgggcattgaccgtcgagccggcaatcatggcgcaagcgacaatcacgacacgccgttattgacataccgccgttcaatggtattgtaattacttgtgcgcttttgaagcgtatggatcgggcccgtagctcagctggttagagcgcatccctgataaggatgaggtcggaggttctagtcctccctggcccacagaaaaaatgaagcggctgcgagccgctctttttttctcacggggctatagcgcagctggtagcgcatctgctttgcaagcagagggtcgccggttcgaacccggctagctccacagacaacccttggaataataccgattctgagggtttttgcgttcttgttcgagggattctcccagtgcgccatggccctctccatcgaaaaaggggtggtcctgttaaggaccacccctcgaggattcagaccaaccgcgtggtcattgtcgctccgtcttcacggaacggtacacgaaaatccttcgccttgcggcgatatcgcccggacccggaggactacaccttcctctcgggtggaaggtaccggcagataattggctcttccggttttggtgtgtagggggatgcttataggtgggcttgtatggtgtgtctgaagccgccggtgtggaggaggctgcgggtcacgccaaaaccggaagagccgttttcttttccttctccggtggtttcgtcgttgaccgtgttgccggtggcttccttgcaggcttgtttgtaggcttcggctgggctggtgtggtggagggcgcggatgcgtgcagcggcgtgttcgatgtgttcgagcgtggcggatggcgcgtcggtcaggccgtggcgggcgaggacttcgttgcgccacgagtcgtagcgttgctcgcgcaccacgcgtggcttcctccgccccctgacccatgcgtcggcgtacgcccaatcgccttcctcgtagatgtcgcgtgcccaggacgccgtcggacggtcgaacgggtaggggcccgccggcagcggcaacttgtcgaccgtcgggtcgaacacagtgaatcgtcgccgttccctcgcttcgcgttcccgttccggcgctgccagcgcctccgcgacgtccgagtggaacgcggccatgcgctccttggcgccggaggacgtgaacccgtcgtcgggttcgcgcagtccgtgctcctcgagcagcgggtggatgtcgtggtccatgagccagcggagccgggacatgttgaacgcgaggatgaatgcgagcgagattgcgaccatgaggcccatcccggcccccatcagcagtgtgctcatttcagccggctccagcgttcggcgcccgcgcgcgggctgaaacgtccccgccagtcccacggtccgacgaaacgcaaggccaacagaatcggggagcatgtggcgaggaacgcccagaagaaagccaaccatccaatccagtcaggtgtggatctgccggtgtcgacccattgcgcgctcgaccagaacatccatgtcatcgctatggggaagcccgatatcgcgatgaggaacagcgtgccgacgatggggccgccgaacatgtagcgcagcttcgtggcgggcacggaggaggcgaatgccaagtcctccagcgaggcggggacgtaggtgttcggccggccgaacacgagccggcagaaaccccagtacaggaggagtccggccagccacatcacggcgaccgccacgtacgtgttccatgcgtcgcgggatatagtgaccggtctgagaaaagccagcagcgtcacgtcatcggtatgcgtgtggtgcgtcttcgtgtccggggtgagcagccgggcgatgccgtggatcatgaccatcaggccgggcgcagccgcggcggcagcgccgccggccgccgcgccagcccgcgcccagccggaatcgccgccgaaatccagcttgcgcttgaccggcgtcttctccagcgtgtcccagaacacctgcgccccgtcctcaagacgccccaccaacacataccgagtgaacaacgccaacagatacccccacttccaaaacccgagattatccttgaaatgactgcccgggtcatctccaccgcctctgtgcacctgattgtcgtaaagtgcgtctaagccgctacttatcagccatccggctccagtgccaatcgccgttccgacaaatgcgccgaccacggtgccggcaccggggacgatcgatccgacgaccgcgcccacggcaccgccaacggtcccaccgaggccatcaacggcaggcccgagaccctacgcggcatcgccctcggcttccgcaacctcgacaactacgtcacccgcagcctcctccacaccggcggcttcagacacaccatacaagcccacctataagcatcccctctacacaccaaaaccggaagagccggatgattccctgcaagccgatcacgccaatccgacccgacgactaatcagattgaggacggctgaattaagcttgtgccctcatgatacaacatgtcctgcgaccgacgccagacacaacggcagcattctgcccaccatagggcgtgtctttaaccagaaagtaccctcaaatacgttcagcaagatatatgcacgcagaacagcccttccgcattatcttatttgacatagagcatgccccttccattccacagaatcaagcaaataaacgagcggagagactgggcacaccgcaaaacaatggcccaacccctccgctcgtttgttatggaaggaagagggatgaataagtatgtttacttcactgacttgatgaagacgatcagcaccgcgccaatcagcgagcagaccgctgcaagcgggaagagtgcgtgatagcccaccgaggaaattagcgccgccgcaacatcccacgcaccatattcaggacaaatccagtccgttgttgtccttggctttgctcaccatatcagtcaaatcggggtcgtccacagacaccgcgttctgctgactgagcgtcaacgatagcgagccattataggagtcgccgtattcgtccttgccggacacgcttatggcaatcgaattcatcagacgctttctgccgtagttcagatccacggtgatagtcggcatctccggctcttcatccgtgccgaaatcccagttgcgcacattatcgagcgcctgacggtactcatcttcagcatcgtccacgccggcatcctcgatttgctgaatcacccaggatttcagatgcggatactgcgcttcatgactgatccagtaattcacgaaatgctgagacaacgctttgatatcgatttggtacgacagctgcgtattgccggcagacttggcagacgatgtcttcgggaacagctggctgcgcacattcttatcttccagctccacgccgaaatattgttggatgaatttgctggcctcggccttcacctcggcagacgttttcgtgcccttgacccggtcgatgtcgttcgagtacccatcgtcgttcatcttgtccagctgatcgtagaacgtttgctccgcgccggtgatgtcccaagcaccgttcttgaccaacgcatccttgacgttcaatatcaagtccgccacatcactaccaacgccgttccttaagtcatcttcatattggtcggccgggcagtagatgtagtaggggtcgtcgtcatgccaaacgaatttctcggcgaatgcgcctttgtaccaagcgaaggtcgttgcatattcgtctgttttgctagtgaaggacgcggaggattcgttggtggttttgcccagcgaatacatgccagacatccgcacgtcaagagaatcgtcagtgatgctgtgggttctgagttcgtatttggtgctgcgcagagtggacagcgagttgatcgcgtcgaaggtgacgaccagcggattggtgggccggaagcccagcatcgctttgacggcggtgaagttggggatgatgaacgccaaggccgccaccagaatcgtcgcaagcaatgcgcagaaagcggcgatcagcttcttgctggatttgcgctgcggtgccaggacggcggttgcatcagtcgcctgatatgcggcaggagcgggaatcggcaaagccggcaggggaacggttggtgccggctgtggggcagcggacgcggcgtaaaccgatggggcaaccggcgcggctggtatcgatggtggtaccgcagacgccggcacagcaggtgccggtatcgacgcaggcggtacggctggcgatgcggccggtactggtgccgtcgcaactggtgcgctgtctacagacgctccacatgccgggcaaaatcgtgccggcccatcaactctatttccgcagtggccgcagtacgccatcgtgtgcctctctccctcaaatcggtttgattgccatcgcttcaatgttactcttcagcattacgcctcagccagcccctacgcgtaacgatacgagacgcggcagccttaatgcggttgttttgacgcgatgccaacatcgagctctggccaacgttctggtactcggctacatcttgctgcgagccaagaagcaggccatcgctcgcgccgacgaggccgaatggcggcctagcctcgctttaagcctcaggccagcacctccatggggtgataggtggcggtgtggtggccggtgatggggttccatacccgttcggcgaatgcgcgcagacgggcgacgccctcgcacagctcgtcggcatctccggcgtaggagaggcgcacgaagccgcgcccctcctcgccgaaggcctcgccggggaccacagccacgcgctcttcgtccagcagacggtctgcgaattcaccggagtcaaggccagtcaggcgtacgtccacaaaggcgtagaacgcgccttgcggttcgatcagacgcaataccgggcatccggccagaccgtccagcacgatctggcgcttggcgcggtattcctcgcgcatggcggccacgttatcttgcgggccagccagtgctgccacgcctgcgtattgcgccaaggagttcaccgaggagtgcatgagttcggcgattttgccggtctgttcgatgaccgcttcgggtgccagcaggtagccgatgcgccagccggtcatcgcataggttttcgacaggctttccaccacaatggtgcgctctttcatgcccggcaccgcggcgatcgatggtgccacggctgcctctcccccaagcgtttccccgaacgtttccccaaacacgaacggatggtaaacctcgtcggagatggcccaaatattgtgctgcttgcatacttcggcaatacgcgccagttcggcggcagaggttaccgcgccggtcggattgcccggtgagttgatgattacggcgcgggtgcgcggggtgatcgccgcttcgatgtccgccgcgttcacgcgcatgccgtgctccggacgcagcgccacggtgaccgggcggccgccgcacagcatcacttcggcgtcataggaagtgaagaacggcgagggaataatcacttcatcgccggtgcccaccacggctttcagcgccagaaacaggccaatcgtggcaccgtcaacggcttgaatctcggtttcgggatcataagtaagtcccttcacacaggcggagtaatcggccacggccttgcggtattcggggatgccaagcacgttggtgtaccgagtgcggccagcctgtgcggcctcgcaagcggctgccacgatatgcggcgcggccgtggcgctgggctcccccacggtcagtgaaatcgcgtcaggcacgcgctctacacggtcgaatacgtctcggatgccggagcgcgggatattcagggcttcggcggacaggctcgcgggctcggcggtcggcacagcaacccgaccggcagcaggcatagtagcaggcgcagcagcagatgcaacttcggacagagacatgttggaaaacttctgcatatcatccctcctcaatggaattatttcgtcgttctcttatttcaaaaggaattattacatccaattaggactttaaacgtaaacattccaccacacaacagaaaacacaggaagaactactgaaattaccaggcaaaatcggaaagccatcgcattccggcaacaggtacagtgaacacagagcacaacgaacggagaagacatcatgaccgcgattgacgagaccgaccagcgcatcctcaccatgctggaggccgacggccgcgccacgctcgcgcaactggcccaggcgaccggactgtcagtctccgccgcccagtcgcgcgtgcagaagctggagaagcgcggcatcatcaagggatacaaggccatcatcgaccaagagcagcgcggcttgcccatcagcgcgttcgtcaacgtgaccccgctcgactactcagccgaatcctcgattccggacaagctgaacaatatcgacggcatcgtctcctgctattcggtggccggcgcccccagtttcgtgctggtggtgcgcgtggcttcccctaccgcacttgaagaactgctcaatctcatccaccgcacggtgccggtaagcaccgagaccacgatgattctgcagacctacttcgcacactgaccgcgaacccggtaacctgcgcgccgaagacctgcggccacacaccccacaaaccccacaggtcacaaaaaccatacgaccccacggtccagccacaccccacaaaccccacagaccgcacgatccccaacagacacatctgacatcacccaagtccgcctttatgtccactatatgaacgtgcctccggtgtgatgcggcttccatttcgacccgattcacgcatagacagacatccaacaatcgcccgaaaaatctaacaaacggaaacttgagccactccataaccacgccgaaagctttcccgttatccgagcgagactctatgcagcaagggcctgcgcgcatagaataaaaccgtcttaattccctaccaaatcgaggagaatcatgctcactgacgagtacatcaagcgtgtctacgaccaggtcgttgcccgtgacggcgatcagccggagttcctgcaggccgttcgcgaggtcttcgagaccctgcagccggttgtcgagaagcacccggagtacgagaaggccggtgtgctggagcgcatcgtcgagccggagcgcgccatcaagttccgcgtggcctgggttgacgacgagggcaaggttcaggtgaaccgcggctaccgcatccagttcaactccgccattggcccgtacaagggcggcctgcgcttccacccgaccgtgaccgagtccgtcgtcaagttccttggcttcgagcagattctcaagaactccctgaccacgctgccgatgggcggcggcaagggcggttccgacttcaacccgaagggcaagtccgacgctgaggtcatgcgcttctgccaggccttcatgactgagctgagccgccacatcggccagttcaccgacgttcccgccggcgacatcaacgtcggtggccgtgagatcggctacctgttcggtcagtacaagcgcatccgcgacgagtactccggcgtcctgaccggtaagggtctggaattcggcggctccctggcccgcaccgaggccaccggttacggcgtgtgctactacacccaggaagccctgcgcgtgctgcgcaacgactccttcgagggcaagaccgtcgtgatctccggctccggcaacgtggccacctacgccgctcagaaggctgagcagctgggcgccaaggtcgtcaccgtctccgactccaacggctacatctacgacccgaacggcatcaacgtcgaggtcgtcaagcagatcaaggaagtcgagcgcggccgcatcaaggaatatgccgagcgcgttccgggctccgagtaccacgagggcagcaagggcgtgtggaccgtcaagggcgacatcgctctgccgtgcgccacccagaacgaggttgatggcgaatccgcacagaagctcgtggacaacggcgtgaccgtggtcgtcgagggtgcgaacatgccgtccaccccggaggccatcgaggtctaccagaagaacggcgtgctgtacggcccggccaaggctgccaacgccggtggcgtggccgtctccggcctggagatgagccagaacagctaccgtctgtcttggaccttcgaagaggtcgacgccaagctcaagtccatcatggaagagatcgtcgccaactccctggccgccgccaaggaatacggtcacgagggtgacctgatgctcggcgccaacgccgccggcttcgtcaaggtcgccaacgccatggttgcccagggcgtgctgtgacgcttgcctctgagcagtactaagcagtagcgtaatgcccttgcttcccgtgaggaggcaagggcattgctatatgtacaacgagcaacaagtgctatccccaaatacgtaagcccgataacaacttagcttccacctccataaccccggaactcaccaccgtcgatcagcacatggatcagcgcgctggaccatggccgacgtggtcatcaaagccatcaacggagtctcttcaccgcgcgtgatgcacctgaacaccgatttggtggtgcgtgattcggcgtaattgccacgtggctgtcggcaggactctagataccgcgtcacaatcacccagtaatgcatcacgcagtgtataactcttccgcggaaacgaacaccattcgttcatcatccatgtagcgggttcgcgtggactcactcaccggattcttggtgaacagcataagccacgcattacctgcctgatagccgcggactaagccagcacgctgatggagcttttcaatagcctccgtttcgttgaatgaattacgccatttgcattcaccgaacagaatcgttttatcgagcgaatccgcagcaatcacatcgatatcggtttgctcgtgagcaatcggatcattgccccaccatttgccgaactgagtggcaacaaaggggaggttgcccatagcgttgtttcgaataagccattgcaggcaaatcgtctcaaattgttgaccaacataggtatcaaacgctggtccaaaagcgagtctgctcgtaacctcctcgctgatattaccatccaaaatgctcatgttgcgccccacaaagcggaaccaatatgcaaagaagggatcgctcaccacatacattcccttgcgcgatttactcggatcttcaccaaacggcacttttcgctcaattaagcgcaaatcgaccagcgttttcagatatgctccaatcgaatcagatccgacacccgcatgttcagcgataagctttggcgaggaattaccacccgcaatagattgcaatatcgaataatacgatgccggttcacgaagctcctgacgcaacagcatcataggttcctcacgcagtacgcccaagttgtcgaacatcaagcgcagcacattggattcaaagccatcggcttcctgtatacgtgccagataatatggcgtaccgccgaa

SEQ ID NO: 2405 - DNA, 11917 bp, Unknown
  R50_10m  MAG No. k141_9143
gcgccggttatggcggctggcgcaccatcgtctactcgctgctgttcatcgtctgcctactggccgtctccgacgtgattcccctgtgggcgatgtgcgtgatcgtggtcgtcgtgttcctgttcaccgatcggcgcgtattcaaatacgtggattggggactgccgctcaccttctgcatgttcttcatcttcatcggcaacatgaagcgcgtgcccgaattctacgaactggcgcgctcgctggtcggcggccatccgctggaggtggcggtcggctccagccaggtcatcagcaatgtgcccaccacgattctgctttccggcttctgcgaccaatggcgcgatctgatcattggcaccaatttgggcggcatgggtacgctcatcgcctcgatggcctcgcttatttcttacaagaacgtcgtgcgccaatacccgcacaagaaaggccggtatctggccgtctactccgccgtcaacgttctgtttttggccgtattgctgaccttgagctggatcatcgagccgagtctctgagcccagccatctccaccccgctgacgggggctgtcggcgaagccgactggggtggtctaccgcgcgtatacggtgggggagccggtcagtcggctcatggccgactgcgggatgtcatgaatgcggccgatggtggcatccagcgtggatacgccggatacgccgtctgtgttggctgtggtggatgcagaggtgatgctggatacgccgactgcggacgatgatacggccgcaaccatcggctgacgataggcgttggagttgcgggccagccgggcgagcgcagggcgctgcctgcggaacagattgataaacataccgcatactccttcatcgttggccggcggtcttctggccgccgtggtttccatcctgccctcccgtgcttgtattcgctatgggggatagcccctattattccctgaatctgcacgattccccctcatccttgagggtgattctaacggcaaaggaatcggcctaatggccgatgtcaatcagcgcgaagccaccagcgtgacgctgtacggcttgatcttcatcgccagcaatgaagacggcgacggcaatgtgtaagcccgacgttccggcacaatcgcccccgaagcctcgccgcggtatccgatagtggttttcgccgtcggactggcgcttaacgtcgtcacctccaaacgcaccggtcgcgatggcgaggcgcccagcccggccagtccgcgcgcgatttccaacgtcacatccaccggggaatcggaggtattgacgattttgatgtaacggcaggcgtcatccccgtcatgcccggtggcactgacatacagatgtttggcggggcgtgacgcggtctgctcgatggacacggcatatgtcgtgtcgcccagatacgtggaaaacagccgctccacctcataattcaccgtggggttcacatgcgccggattgaattcgataagattctgcgcccaccccttagccggaatatgcgcgagcagcggcgcataggaggtcatgcgcaccacgtcggaattgcgctcgcaaccggtcaggaacgcggcctcgccgagtgccgacttccacgtgttcgcgccctgttcggtctgcggttggccggcaaaatagccgttggctgaatattcgccgaaatagacgccggcgccgcaacgcgggtaagcgtcgaatcgtgacgcttggtatgcaaaccattcgggggagtggtaagaatgttcgtcgacgataatcgcgtcaccggtggcggaatcatgtgccccggaatcggttgcggccaacgctcgcgcatggtcccagctgcgtttcatcgtcggctggaaggggaacagtccggcgctcatcacacacagcatatccgggtatcgttcgtgaatggcctcgctgatcatgtcaaacttggccacgtagtcagccccgaagttttcgttgcccacgccgatcatgtccaggctgaacggttctggatggcccatatcgcgccggaccgcggcccacgagctggactccggatcgccattcgcgaattcgatgaggtccaggtaatcctgaatcacattgttgcggaaagtggccgaattgatatccatgtggcgcggatcgcggccgggcgactggcatgcgatgccggcgaacagagtgggcagcggcttggccttgaggtcctcgcacaggcagaaatactcgtagaagccgatctgatagctctgcgaatagctggaaccatccggcatcttgaacgaccacatcgaatactgttggcgtcgcgcggccagggagccgacggtatccttccagcgatattcattgccgggcgtcacaccttcgacgatgcagccgccggggaatcgcagaaacgctggatgcaacgcctgaatggtttccaccagatcgcggcgcagcttgccgtaacgccatttcgggtcgcccgcgccccaatagtccgcatccatgaactgcaccagatccagatcgaacgtggtgcgttcgccggcgtcaatggtgatacgcagcttgccgtaatcggtgttcaggccggttacgtcggcgttgaaccggtaccagccgtcacggccgatggcgatggcaccatccgacgaatccggactgatcgaaacgccggaatcctgcgcattggcaccatcgtcctgcctcagaccggtctcttccgtatcgtcaagcggatctgcgtccacgatatacgacaatcgagtggtgctggtgagcggcagaccgtacctatcgaccacgccgacggacagcttcgcccgcccatgaaccggacgtaccgcgagactgacggaataggtgtggtcggcgacgatggagaacgcgggctcgcccccgttgtcgccgcctccgttatagccgaggttttccagatatgcagggccggtttcggaaggaacatcggacgtgatgcgagcgtatcggctatgtgcgtgaattggcggggcggggcagtcggtggtcacccgctggccgtgaatcccgcgtatctcactgccgaggctggcggcggaacagttgatgaaatcccagaaacgcagggaatcggcctgtgtacgccatcgttcggcgccggccatacgccacgtgtgatggtcgagatagacgccgtcaaaactgtagttgttcaccatgttggcgttcagcccgccatccgcaccatggttgatgtcctcgaagaacacgccgtacagccgcccgcttgtgtgatgggtggggcttcccacgctaatccgcaccatggttttgattgtagagggaatggagcggaaaggtaaacggaagagttcgctcaccgttcatgttgcggtcaatccaagtcgactgttcgccggtatacagccggtaccctcgaaacaggaatggaaaatacggacgactaggagcgcggctgtgcaatcctcggtgggaatacgtgagcgcatcgaccacgtgtatccgtcgctgcgtccggcggagcgcgccgtggcccagtatattcgggatcatatcgaggaggcggccgacctgaccgtcggccagatggccgacatcgcccacgtcagccagccgacggtgattcgtttcgcccgcaagctcggtttcggcggttaccgtgaactgcggtacgtgttgcgccatccggccgccgagcacaaagtgaccttcaatccgttggctggattcgatctgaatccgtgggatggcgaagatgagattcccggcaaagcggcctatggcgcgaaggcgctgatcgatgagctgcacagtgcgttggaccccaaggcctatcgcaaggcggtcgccctactcgccgaatcggagttcatcgatattttcggcgtggagaactcgttgacaccggcgatggatctgttcaccaagctcggctacctgggactgacatgccgtctcaataccgacgcttacctgcagcagatcggtgccgggcacctgccccacggcgctgtggccgtcgccttctcccattcgggcagttcggcggatacggtcaaagcgttgcgattggcgaaatcgcatggcgcgaaaaccatcgccataaccaatgccatcggcgcgccgctggccagctgggccgacgtgacgttgctgacgggtcgtgactcgcacacgatctatggcaatgcgattttctcgcgcgtggccgataccgcgctcgtggacatgctgtacatgggcgtgattctgtccgactacggccgtttctccaccgcgctcgacgaatccggtcgcatgattcgcgatcgcgtattcgagaactgagctgctgctttatcgcgccttgggctgtattgctctggtcgttgccgctttgttgccgctctggtcgttaccgtcctgaggcatgtgccagcgaatacgtagtggacttggcgtgcgtatgacgttcgatcttgccgctcaactccagctggtccaagagctgcgtcatctgatccttgttcaggccaagcgctttctgcatggttttacggctgagcttcacgccgcggaacgcgaggaaattgagcgtgaactgctccaacgtttgaggcgacggttccagcgttgccgtatcgagcgggcgggtactgacctggtcgtcaccgtccgggcgctcgccgaatccactgccgagaatcagcgtctgcaatggcgcgcagccgatgatgcgtgcgccggccaaagcatctgcggcgttatccgtcatgcgctgaatcgtggggaatgaatacattttggcgcgctgcgcttcgtcagtggtgctgggcgcggcggaagcatcggtatcggtccgatgcaaggatgcggcctcggccgagaccgggatgggcagcaccatcgccaccgaagtggggcctacgcgcagttgcggactgaccgcgctctgcgcgtaggcgtccataatgcgttgaataccggtaccgcagttctcgcagaggcccagatcggcgaacaattcagccaaacgcggggtgcgtggctggcatacgccgttgagcagatcgttgatttccaaaccatcggtcaggccgccgagcgacacgatctccaggcgggaatcgaagatattgatcagtgtggggccggagtacgtgtaatcgcgatgttccagtgcgttgaccaatgcttcgcgcagggctatggccgggtgttggccggattcgttgatgccgttcagcagggcgctggcttggtcgagctggcgcagcaccgagccggtgaatgtgtgacgttcgcgaatggcgtttttgccattgccctcgaaaatggtggccttgataacgaacgggcattggtcggacagcagggtggcaagcgacgattcggtggtgctggtcaaagtgttgttggcgccggtgttgatgatgctgccggcgggggcattgccggcatcggcagagacggatgcagccatgttggtcacaaccgggctttcccaatccctgccttcactggcaaaacgaccctgtgcgtatgtgaaagtgagctcaccactatcgcctgcgacggtctggcccgatgcggcgtgatctacgttgctctccgttgtccccatatcgccgatggtaccggtgcaagccgacgttacgccgaggtgttttacacccctacggctagacttacacgagtttggccccgtagctcagctggatagagcatgtgacttctaatctcaaggtcgacggttcgagcccgtccggggtcacgatgcaataaacccttggtccctcatcgtctgtgggggccaggggcttttgagtattatgccggtctgggtccgtctggagcctgaactgtcgaccttgagattagaagtcacatgctcatcatcaccatccgggaacacccttaaggggtgcggctcctgcataacggttatacactgacttgagatgtgctggataataaccagctatcgcgcgtccgccaatggcgacgaacgaaggaagaagggcccgtgccgcgagcaatcatcgaggtaagaaacctacgcaaggaataccccgtcgaggatgagacggtggtggcgcttgaccgtgtcaatctcagtattccgcaaggccagatctgctgcattttcggcgaatccggctccggcaaatccacgctgctcaaccagttggccggcatggaaaaaccgacgcacggcggcgtgagaatcggcggcgtacccgtcagcaaactcgacgagcgtgagctggcggccttccgccagaagcatctcggcttcgtattccagtcgtacaacctgctacccaatctgaccgcgctcgaaaacgtggcaatgccgctgatgttccgcggcgtgcccaaggaacagcgcgaacgtgcggcgcgtggcgtactcaaacgagtcgggctcggccatcgtctcagccattacccgcgccagatgtcgggcggccaacagcagcgcgtcggcatcgcccgggcgtttgtgaccaagcccgaggtggtgttcgccgatgagccgaccggcaaccttgactccaaaaccaaaaccgaggtcatgacgatgatctgcgcattcgcccatgacttcaaccagaccatcgtgctggtcacacacgatccgcagatggcctcatacgccgaccgcattgtcaccttgctcgatggccgcatcaccagcgatcggctcaacaccgacctttcccgcccaactgttccgtccacgccgtccgccccaaccacaccaactacaccgtccacgccgtccgcccatagaacccaaggaactgaccgatgaagcacctctcccaccacaccatcgccatcatcgtcgcgttgctttccacgctgtcactggcacttgccgtcatctcccttccgcatcaggcgtacgcggtcgacggcacagacggcacaagcggcacgaacagtacgtctcagggaaacgacggcgattccgcgccgatcgccggaccggtgcccaacatcatcatcaccaacttcgcgtatggaggtgattccgtggccgccggatccaaattcaatctcgacttcaccttccagaacaaggggcaggtggcggtgacgaacatggtcgtcaccgtggacggcggcgagagcttcgccatcgcgggaggcacgaacacgttctacgtcgacgcgctgtgggccggttacgccatgacgcaaagcgtgccgatgcaggcgctcgcctccgcgaaaagcggtgcccagtccgtgaccgtgaacttccgatacgagtatgtggacgccagcgcccgctcctcaagccagtctgacgtcaagatttccgtgccgatcagtcagcctgaccggttcgaaatcagtgatcccgtagtgcccgaccaggtgatcgccggccaggaaaacacggtcacgatggaatatgtgaacaagggcaaaggcgatatcgccaacgtcgaggccacgatggagggcgaaggtttcgatgccacgatgaaaacccagtacgtgggcaatgtggcttccggcgccaccggcacgattggttacgccttcacaccgcacgcgtcaggcgagctgaagaccacgctcaaagtcacgtacgaggattccgacggacagaccaagaccaaggaattcccgctcaccatacccgtaaccgatatgcagccgatggatgattccggcatggccgatccgaacatggaccagaacgccaatcagggattgccggtgctggtgtatgtggtcatcgtcgtgatcgccgtggtcattatcgtggtgattgtgctgctcgtgcgtcgcaggcgcaagcagaaggccaagaagaacgatattgatgaggactgggatgattggtccgaaggcaaggatgataagaccgataccggcgtgacggatggtgctgcggcagacaccgctcctatcacaccagtcaccccagcctcatcagtcgcaccagccggctcatcccacaaggcctgaaaggcccgaccatgcgattcggcgacatactgcggctctgcagacaaaacctatggcggcgtaaatcccgtacgattctgaccgtgctgggcgttatcgtcggctgctgctcgattgtgctcatggtctctttgggccaaggcattaacgagcagaacgagaagatgctcaaatcgatgggcgatctgtccatcgtcaccgtgtacaccaacggttatgccggtccgatggacgatggcggctcgtccaagatgggcgataccaagctcgacgacaaggccgtggaatccttccgcgcgatgagcggcgtatccggcgtgacgccgatgatgaacttcccttataacgtgacggccagagcaggcgcgggcggccgttacatctatgattacgtgcagatcatgggcatcgacatgacccagctcgaccagatgggctacaagctcgtcggtggcgagaaaccggtcaaaaaagaccaggtgcttgccggcgaatggttcgcctatggtttcatggacaccctgaagaacggcgaacaacgcaccagcacacgtggcggtcagtattcctcatgcacgtttaaccaggccaccggccagtgcgaggaagatcaggacgaagatccgttcttcgacccgctcaccacgcaaatcagtctgaccaccggcaccaattatcagggcgaccagtacagcatgaacatgtacggcggcggtggcggcggcacaggcggcgcgggcggcggtggcggcgcgggcggcgcaagcggcagcgccgcgggtcagtcggaaaacgtcaccctcgatgtgcgggcttccggcattgtggcgggcgactacaacaagggctatgccacctccgacggtctggtcatggatttgcaggcgttgaaggaactggccgccaaagtcgatccagccgccgccaaaaaagccaccgcctatgatcaagtgctggtcaaggccgccgacctcaagtccgtgcccgaagtcgaatcacagatcaaagcgttgggctacgagacctcctcctatgaagacatgcgtaagtcgttggaagaacagtcgcgcgcgattcagctgattctgggcggtatcggtgcggtttcgctgttggttgcggccatcggcatcgccaacacaatggttatgtccgtaaccgagcgcacgcgcgagatcggcattatgaaggcgcttggctgctacgttcgtgacattcgcgtcatgtttcttgcggaggccggcgcgatcggattcttcggcggattgatcggctgcgtgctgagcggactgatatcgctgggcatcaacgttgtcggcgcgttgtatgcgggcggcatgagcggcggcatgtctggcggtatggtcagcggtgccggcgggggctccggcgaccataccggtggcggaacatctatctggaccatactctggcaggcgatagttggtggcgagaatgtgacccgttattcggtgattccgtggtggctgttcctgttcgccgtgctgttttccacgctgatcggcttgctgttcggcttcggcccggccaataaagccgttaaaatcccggccctagacgccatcaaaaacaacgagtgatcgcctctgtcacctgctccaccgttagtccataacgttcgttcagttcgcccagcgacacgcggtcggtaaattccttggctgcgccgaagttcagcacacgaggattacggctgccgtccgagacatgatgattcgcatagtatgcggtcactttctcgccccagccgccttcaagctgcccgtcttcaagggtgatgacctgctggtggccatcacgcaacgactccagtacgtctgaatccagcgacgtgcactggcgcgggtcgataaccgttgccgtgatgccataatcgtcagacaatgcggcggccgtctgctccgccaacggatacgcattgcccagtccgatgatcgcgacttgcgagcccgtctgattgacccgccaatccagcatgtgacgcgcaccggcatgctgagccgttacgctaacggtcccgcggactgttgcggcagatatgcccccgctggcggagctggcggaggctggcagcgaagctgactgggggcggtcagcaatctgcccacccgtcaccggcagcagcgtcgcatcccgttccgccgccagaatcgcctcgcccggcacccgaatcaccgccggaccagcaggggcgtccgccgaaccggccggcgcggtagcccatgccaaatcagccagatagtcgcgagccgaagtcggcaccagcatcgtaacccctggaatattggagaacatcgtcacgtcatatgcgccggaatgcgtattgtccgaaccggacaagccgcccagaaaatcaagtaccgtgactcgcgaacggttcaggctcatctcctggaagaactggtcgtacgcgcgctggaagaaggacgccgtggtggccaccaccggcgtgccacccgcccgtgcgatgccggcagcgtacgccacggcatgcgattcggtgatgcccgtgtccacgtaatgcgaacccgcgcgttcgcggaattcgtgggtgatgccgttggagcccggcgtggcgggggagatgaccacgagtcctggctcggcggcgaaacgcggttcgagcgcggccatcgccattttgccgtaatgcttgcgcggatcgtccggcttgccgattgcggcatccggattctgccaatgcgaggcctcgcactggccttcatgcggttcgtgatcggacaggttgcagtgatccgaatgccacggctcgctgtggttcacgttatcggtggggtgcacgccggtgggggagtcgagtgagaccggtaaggtcgaggcgttttgttgattggcgtgagtctcctcactgtcatatcccgcgcccttcagcgtgtggatatggaccaccaccggatggtcgatattgcgcacttcctcgaaagccgcgaccagagcggaaacatcgttgccggccgccacataccgataatccaagccaaacgcgttgaacagattcggctgggcggtgccgccggacgcgcgcaggcgggcgagcgggccgtacatgccgccgaaatcgccggcgatcgacatctcgttgtcgttgaacacgatgatgagattgccgccctgctcagccgcgttgttcagtccttcaaacgccacgcccgaactcagcgaaccgtcgccgatcacggcgatcacattgccgatgccgctgttcgggccttccatatcgcgggttttcgccaaaccgcaagccagtgaaatcgaggtaccggtgtggccgagcacgaactggtcgtgtttgctttcatccggattggtgaagccagtcacctcgctgaaacggtccgggtccagataggcgtcggcgcggcccgtgagcatcttatgcacgtagctttggtgggatacatcgaacacgatgcggtcacgcggcgaatcgaatacgcggtgcagggccaccgtggcctccaccatgcccagattggagccgatatgaccgccgtgttggtggccatatgccagcagcgtggcgcgaatctcacggcagagttcggcgagctcgtcgggggcaagggccttgacatcggccgggctggcaatgcggctcagcagatgggagtcgtcgccatgggaaggggtaatgctcggggggatgtcgtgaaggcgcgcggccccctcggcagcaccggagacggcgaaggaatcgcttgaatcaaatccgtttcctgacgcgttgcgcataccctcgaatctcccttcgctagtctttccgaagttgaatgctaacgcccggcattgtccgaggtccacatgacgcatcaatgcccccaacatctccgtaaatgggtgattcgttcgcagcgcgaggtgggacaatgtatgcggtaattccttttgataccaaggagcgcgcaatgaaggccgtatac

SEQ ID NO: 2406 - DNA, 15970 bp, Unknown
  R50_10m  MAG No. k141_9303
aggcggtccacatgaaggcaaaggaaaacccattcaagccaacggcaggaggggaaccgcccctgctcatcggccgaggcaaagttatccgcgatttcgagaaaggtctcgataacggagtcggtgccccagggcgcgttatgctcgtcaccggcgctcgtggaaccggaaaaaccgtgatgctcactgtgttcggagaccgggccaaagcgcgcagatgggatgtcatcgaagaaacggcctctgccggactatgcgaacgccttgttgatgccttacgaaccgggcgaggggcccttgaccacctcactatccgaccatcgttgacttttgctggagcgggcatcggcctcggagaagccgaactatccccgaagcgtatgcccgaaacgttgagaagtgccattgccggacggttggatgcgcttgagaagcgccatgctgggttgcttatcaccattgatgagactcaagcggctgagcgatccgacatgattgccatcgccactgccatacagcatcaaatcagggaacgacgcaatatcgccatcgtgttcgccggtctcccacagatgatttctgatttgttcaatgacgaagtcatcacgttcctacgtcgcgcgaaaacgaacatgctcacagatattcctcttgatgaagtgcgcgatgctttcgccacaacattccgcgcctccggcatgtccatcaccgacgctcaattaagcactgcagccaatgtgacagccggatacccctatatgattcaactggttggctaccatatctgggatgccgcagacatgcgggactcggataccatcatcgacgctgatgttacggcaggtatcgaggaagcacgtattgaccttgataacgccgtgtgcatcccggagttgcaaggcttatccaaaaacgaccgtgagtatctcgaagccatggcagcgtcagatggtccctctcccaccgtgaatgttgcacagcgcatgggcaaaacgcctaactatgccgccacctaccgcaaacgcctccttgacgccttcgttatccgcgaaacagaacgaggcgaagtcgattttgccgtgcccttcctgcgcgaatacttgcgtcggaatcagtaatcggcacaatgcacagtatcgatatattccgttccatataatgacttttcgcattcagatacacaatggacggcctgttgagtagcactcagcaggccgtccattctatttagctattcagttatcggagacacacctcaggccttggcctgagcgccagcgacctgctgggaggccatcacgccgaacaggtagccgtcttcggagaagtattcgaaggtacgaccggcgaagtcgcggcattcgaatctgatatcgttatcgattcgatcagcggctcacgatactgcccttgcatcgctgtgccactgttgaatgtgcccggctggctcacctttgggtcaccgccgacacatccttgatgccgatggttatagagtcgcaaattcacgactggcgcacctgcccacgcacctatcctgtcatttcgagcgcataatttgctaccacatccggtcagggcaatcgaccttaatggcgtaaacggcacttctcaatacgtaaacggcactattcttggctcccctctcagagaggggagccaagaaatatcaagctcggcctcccaggagagagccagaataatgcaccggcaaggcattaggatggagggcatgagcgatttgaacgcgttgaatcttgagcccggcgaagtggttggtgggtatacgctgatctcccggctcggctcaggagctatggggtcggtgtggcgggtgcgcgacgacggcggcaccacctatgccatgaagattctgcgcgactccctgaccgacgagtcagtggcaggctccggctctgcgtccacggccctgcacgaccccaacctcaagcccgatgtcacgccgcgcgagcgcctgcggcgcgaggccatggccttgaagaaggtcaatcatccgggtgtgtgcggcatcgtggatatggaactcgacgatacgttggcgttcatcgtcactgaactcatcgagggcaagaatcttaaggatgatgtggccgccaatggccggtatgtgggcgacgatctggaacgcttggcccgcaagctcatcgaagccaccaaagccgtacatgcggccggcatcgtccatcgcgacatcaaacccaccaatgtgatggtgtcggccgccggaccggtattggtcgatttcggtatcgcgatgggcgagggcgaaagtcacgtgacccgcaccggcctagtgatgggtacacccggattcatcgcacccgagattattgacggtgccgaatccgacgacgccaccgattggtggtcggtggcgtccgtgctcgcttttgccgcaaccggcgcgcctgtgttcggcaccaagccgatgatggcggtacttgagcgcgaggcctcgggcaacgcgaatctttccggactaccggccggcacattggctgccttccgttctgcactggacccggatcgcagggatcgttgcacgccggatcaattgctgaatgccatcgccttggatgcgttgaatcccaacgcttggcagggcgagcaggcgggaccgttcgccgcgggagccgtggctggacaaccggctgcgatcgttgccgaagccgcggaggcgatgcccccttttggcgcggccggcggcgttgaccgcaataatccccgaaccatctggcgcgcggccgaggaagccgctgaggctcccaccatggccgtgttctccggcaataagggcgataacggcgatggcgaaaccgccgtattctcgccggctggcgccgctaccgccacgctgcccttagccgatatgccgccacgtccgccggccggtgcggagcaggccacgcaactgttgcccgacgctgctgccgatttcaccgacgacgccggcacacaggtactcaccggcgcgaccacaccgatgccggaccaaaccacaccaatggccggcgccaccacaccaatgaccaacaccgattcgactccggccccgaccacgccgctggccgagcgcaccaccgtactccccacgccgcagccgtcatcattccccccgtccggcaccgcccagagcagctgggatcccgcaagcaaccagcccacagcggtggaccccgccattcgcccggcattgcagcgcatcatcgaccaaaccgcccaagcggcccccaccgaaaccatggtccaaaatcctcccatgcccaatccggtggacgtgaagcgaggggaatatctgcggcgcggcaccccgccattgatcctgctggcggcgccgctggcggcactggcggcaaatgctccgctcgtggccatcatcgcggccactgcgttgttgtggctactgctcaccctggcctataacaccgaaccccagcttgagcgcgagggcaaacgcggcggcgagcgcaaaaactccgattcgtggattcgcgtggcgacttttccctggcatctggtcaaagccctgctgctggccattccccgcatactgctgctagtcatcatctatatggcgggaaccgccgtggccaccgcggctctggcactgcccgttcacaccatctcctggtatttcaccgcggattggggtattccggtgccgttgctcaatgatgtgccgttctccgcttccgggctggcgctgggcggtttcatggccatcggctggctggtcactgtgttcgctccacagtcgatgatgattcggctggggggcggcgtactgcgcgggctcaaacacagtcgcccggcgggcgcgccatccaccgaagtgggtggggctccacctgctccagtggcgccggcgcccaagggcggcgggcgcggcaccgtgctgttcaccatatgggccatcatcaccgtggccttgtgcgcgatgccgattctgggcatgccgatcaactggatgccgttcgcctagagcggggcggaatctcacacatcagccatccgcacacatggccgttgtgtatccgatacgttcgttccgtcacacttttacagggaattcacctcagatcagctctgggcgcagtcctcctcaggcccggtcattatgatggggcccaaacattgaagcgattgcaaggggatagctatgtcagatccgaagcgtcaggccaagcgtgccacacgcgctgagcgccgagcggccgaggaggccgcccagcaggcacgggccgagcaggcggctaaggaacgtaagcagcagaccatcatcggctgcattgtggtggccattattgtggtgctggtggccatcgctggattcgccgtatacaaggctatgcggccgtccaacaccagcagcagtagccagcaaagcaacatgaccgtggacgaggcctatagcaagctcaagaaagtcagtacccagccggccaacgccgatgacaaggccggcttcgtgatctcgagcaaggggtacggtcagaaggccgaaggggcgcccaccgtttccatctacatggagccgctgtgccccggctgcgcctcggtgaaccgccagcttgacccgacgctcgtcaagctgatgaacgccggccagctcaacatcgatttgcacttcctcaatttccaggacaacaagagctccgacaactactccaaccgcgcgttcaacggtgccatctacattgccgagcatgatgacaatcccgatcacctcatgagctacctctccaacatctacgctgaggatttccagccgggcgaattgtccaattacgagccggtaagcaacgccaagctggagaagcaggccgtcaatgccggcgtgagcgaggatgtggccaccgcggcattcagtggtaagaacgaatacgtcaagtggctcaccgcctccaacaactacacgatcctacgccccgaactgttcaacagctccggcgcgttctcctcccccacgctcaccatcaatggcgaatactgggatctgaagcagctcacgctggcggacaccagcatggtggacggattcctcaagtccatcggcttggactccgatcaggtgggcgtggaaggccagatgccatcgatcggcgccaacaagaagccgatttcgctggccgattaattaccggcgcggctcggcctgaattgaccactcgagaactaccggtatactagagatttgttcaaaacgatttacgcgttaagaacaatcgcctctttagctcagatggccagagcggccgccttgtaagcggcaggtcgtcggttcgatcccgacaagaggctcgacgcgtagaaaagtggcgtattatatgatacgtagatttttctacgcatataattcttaccttgggtaagtactccaggagccttcccccaactatgggcttcctggaatgagggcggagcgtcccccaaccagctccgcgccttcaggggggcgggaacatccccttctctcccgccccctttttcttttctttttttgagctcagaacaatctgacgagcaggaatggtgacggtggccggtgaaaccgcagtacgggccggaacaaccgttacgatgggtggcgtaatcgttcatccagcaggaagagtatggcaatggcacggcgttggaccccgcagcggtttgttacactgcgtcgcatccgcgtaatcgcctgtatcgcggcgaccagtatcgcgctggctggatcattcgcgttcaccgcgcgtaaatccgtagccctgaacatcaacgggcaaaccacccaagtcaccacatatgcgatgacggccacccgtcttctggaggaacaaggggtggatatcaagacccacgatatcgtcactacctcgtccggcgaccaactcgccaatcatgccgtggtcaccgtacagtccgcctaccagaccactatcaacatcgacggcacgtccgttcccttctggaccgtggccaccagtgccgaccagttgctgggatttttcgaggaaaaccagaacaacgccacaaaaatcaccgtcgacatcgacaatgtgtacaaccagctcaccggcggactggtcatcaatcaggatggcccggtcaccgtcattgcggacggcaagacttccgtggcccccaacggcaaactgcctgcggcctccattcttgactccaaaggcatcgtgctgaacaaagaggaccgtgtgagcgtcgaaaaggacggcgataccactatcctgcgcgtacggcgcgtgacgcatggcgaggaaacacgcacagccgtagtgccatactccacacaaacaatcatcgactccaatctgcctgaaggccagtcggagatccgccagcaaggcgtcaatggcgagaaaacccaggtgtataacgtcacgtatgtcgatggcgtggccgaatcggagacgctgaaatccgaaaccgtcaccacgatggccatcgaccagatcatcgccgtaggcgccgccaagtctgataccgataaaggttccgacaaaaaatccgactccgccgataacggcaaggccgattccggttccaacaatcagcacgagtcgtccggtaacaatgccaacagcacaggcgacaagaacaacagcagctctggcaacaacacgaacaccgataccaacaacaatgccggcaacaccggcggcaacaactccggtaacaccggcaacaccggcaattccggtaacactggtaattccggtaacaccggcggcggtacgaacaacaattccggctcttccggctccgattcaggaacaaccaccacgccctccggccgactctggcacgccaccgtagcccaggctcaggcctatgccgccggtgccgccgcgcagcgcgggtggacaggcaacgactgggattgcctggtcaaactatggaaccgcgagtccagatggctgtggtatgccgaaaacgcgagctccggtgcctacggcattcctcagtcgcgaccagcagacaaaatggctgcgttcggcgccaattaccgtgacgatgccgccgtacagatcgattggggtctgtggtacatcgcacaaacctacggcagcccgtccaaggcatggcaacattccgaacaaatcggttggtactgatcggttacgaagcccacaaggaacacacgcttatgaacgacaccattcccgccaccggtcacctgttaggtgccgccgatatccgtcgtatcgcggccgatgccggcatcagccccaccaagaaattcgggcagaacttcgtcatcgaccccggcacggtccgtcgtatcgtacgagaggcgggagtgaccgctgccgatcatgtcatggaagtcggccccggcctgggatcgttgacgctggcgattttggaaaccggcgccaccatgaccgcagtcgaaatcgatccgccgttggccgaacgactgccgggcacagtcgccgaattcatgcccgaagccacgtcacgactcaccgtcgtcaatcgggatgccttaaccgtcaccccggagaacgtgcctgatttcagcgatgacgcatcgtttacgctggtcgccaatctgccgtacaacgtggccacgccgattctgctcacgctgttggagcgtttcgacaacctcggctcgttcttggtgatggtgcaaaaagaggtggccgacagactcgccgccaagcccggttccaagatctacggcacgccgagtgtgaagctcgcctggtatggcaccgccgaacgggtgggcaccatcggccgcaatgtgttctggccggctcccaatgtggattccgcgctcgtcaaattcacccggtatcaggccgatgacccggctgccccgggaactgcgaacagcacagacgacggcacacaacgggaactcgtatttcgtctgatcgatgcggcattcggtcagcgtcgcaagaccctgcacgcggcattgaagaccattgcgccttccgaggcattctccatcgccgacatcgatccgacccgtcgaggagagacgctcaccatcgccgaattcaccgctctggccaaggccatcgaatcgtgtggagatggagatgaggcacaatgagtccggtaatttcacatccacgcccagccgctgcccgacatcagttcgatgagctctcccccatcaccattacggtggattgcccggctaaaaccaatctcaccttggaagtggggcctgctcacgacgagtggggcggacgccacgaactggacaccacctactgtgcaatcggcgtatacgacaccgtcaccgcaaccgccaagcaacccggagcgggattctctctggagctcgaaggcgcttatttgggcgacttggcctcctcacgcagcgacatgcgccgcaaccatgcggtactggccctcttcgccatggcccaggcggccgagcgcgagccggatgtggcgttgaccatcaccaagcgcattcccgtgggtgccggactaggcggcggttcagccgacgccgcggcgaccatgctggcggtcaatcgtctctgggatctgaactggcctatagagcgcctgcgcaccattgccgccacgttgggcgcggatatgccgttctgcctgaccggtggccttgcatacggcaccggtttcggcgaacgcatcacggatatcgcccccggcagccgcgatgagctggcgctgatagaacagggattcagcggcgaagtattggtcggcgcgtaccagtcgcaactcagcactcctgaggtctaccacacctttgacctcgtgggagccgcagaaggcgaccgcaatcatctgcaggctgcggcaatcagcctgcatccccgcagcgggcaggccatcgacgccgccacgcaggcgggtgccagccatgcattcgtctccggatccggcccctcagtggtcgctttcgccgccgacgaggcagcggcacaacgcattatcgatgtgtggcgcgatacggctgtggtcgatcgcattattcgagccaaatctcccgcacaccccaatatcggcgtcagacagtgacgctaaggtagcaaccagccacccgacccatgaaagaagtccaccgatgacgtatcaggttgatgaacgtgaagcccgcaaggcgtacgtgcgccaccgccagaccatcgtcttttccatcagcggcgcggtattggcagtagtgctggtcatagccctactgttcaatttccacgttttcggcctcggcgaagtggagactccggcccgccagccgaattacggcaacgcggcaccgtgcgcggtcaaggacagcagcggcaaagcgcaatacgtgtccaacgcttcggtcggcatccgcgtgatgaacggcacctctcacggccaattcgccaaggccgtgggcgaggctttggccaatcgtggattcagcgtgcagaaaatcgataactattccagcaccggcgttgaacgcaccaccatctacttcggcaagaacgccattaatcaggcgtatacgctgatcggcaatttcaccgacgccaccatgatcatgacggctcgcgaggatcaactcatcgatgtggtcatcggcgccacgttcaacgatctgcaggacaccaaatcctccccacaatccggtaagaccatcaccaatatcgagggttgcaaggccgccgatagcatgaccaagctgcccgccgacaccaaacacgacgcatacacggcggagtaaggcgcatacagcttcatcttcgcgaaaaaccgtacgctgacacgtattcagcgtacggttttttggtatcggactagtatcggactactgaatctcggcgtaccagcgcttgagttcttcgacggccacatcgtggtccaccggaccgttatccaagcggtattccagcatgtgcttgtaggcgcggccgatcatcgggccgggctccaggcccagcaactccataatttcgttgccgtccagatccgggcggatcgcgtcgaagtcctctttcttcttgagttcgcggacgcgctcctccatctcatccatggcctgggagaagatcatcgccttgcgcttgttttgtgtggtggcgtccgcgcgcgtgagcctgttcagccgctcgtacaggtgcccggcatccttgacataccggcgtacggccgagtcggtccacggctcgtccacatagccgtggaagcgcaggtgcatattcaccagttccgagacgtcctcgaccagatggtggtcaaaacgcagcgccttcaaacgcttgcgggtcattttggcacccaccgcgtcatggtggtggaagctcactttgccgcccggctcgaaccggcgggtcttcggcttgccgatatcgtgcatcacggcggccaagcgcagcgtcaggtcgggggcgggcaccgggccgtccgggccggtttccagggcgatcgcgcgttcgagcacaatcatcgtgtgctcgaagacgtccttgtggcggtggtgttcgtcgatctgcaattgcagggccggaatctccgggaagacgatgtccgcaagaccggattcgaccaacgcctcaaggccggcgcgcggacggtcggagagcagcagcttggtcagttcgtcgcgcacgcgctcggcggatacgatgtcgatgcggtcgcgcatcgaggtaatcgcctcggccgcgtccggcgcgatacggaagcccagctgggccacgaatcgcacggcgcgcatcatacgcaacggatcgtcgtcaaaggactgtcgcgggtccaccggcgtgcgcaacacgcccttggacagatcactggcaccaccgaacgggtccacgaattgcaggtcgggcacgcgcagggccatcgcgttgacggtgaagtcgcggcgggacaggtcgccctcaagcgtgtcgccataattgacctcgggcttacgcgagtccggatcgtacgtgtcggagcgataggtggtgacctccaccttgacctcggtgccgtccgggcggcggcgcatggcacccagcgtgccgaacttgcgccccatgtcccagaagccgtcatgcccccaccggcgcagtatcggctcgaactgctcaggccgtgcggatgagcagaagtccaaatcgtggctccttctatggagcagcaaatccctgaccgggccgccgaccaatgccagctcgtaaccctgttcggcgaacagtcgaccaagttcgatggcttcgggccatacttcgaaattcaatgggcaccttcccgcgtgcgacgtttttctgccctaccagcataccgttaccccacctgcacacggggttgagtaaggtggagaatatgattacgcccgccgaccttgcccgcatactggggcaaacaccagattcggcggatagccatacccaagaccacctgctgtatacgtccgaaactccgcatcattccgccgattcgggcgattctcccgatgccggcggcaccgcgagccactccaccaatcaggccgttcatcaagacgaagtagacgcagtaccgactgcgcaacattccggtgtgcccggcacgcccgcaacgcccgtcacgcccgcaccatccgaatccgaaatatcggacgccgccagcgacatgcccgcaccgaagccgatgatgcccacaccggccaccgtcttcggcatgcatgccaccgtcaccatcgccactaccagcggcactatcgaagggcaggccgatggtatcgccggcgaggccggtgccgagacgattgccgaggtcgggccgattatcgccacggcacaaacgtccgtaaccatcgtcacgaacgattccgcggcgaccgcccacgcggtcgtagatactgccgttgcggtcgccaaggccgccgccgcgcataccgcagcgataccgactccgcgcgacgtgctgatgccgcctgcggcacgtaccgcaccggccgcaacgccggtcaccatgccggtctcagcgccgtctgcagcaccagtgaggcccgcaacgtcagcgcatcccacgccggccacggtcttcggccggcatccgtccgcggatgttgcctcgccggaaccggcagtgccagtagaaccggtgacgccatccagcccgactccggccatgatgccgcaacgccgtacgtcggacggtccgaccacattcgcttcactggatgcccaggaactgccggtcgtacgcgaatattcggcaggcggtctgattttcgatgaccagaatcgcgtggccattatcgcccgtcattcccgctccggccatctcgaatggtgcttgccgaaggggcatatcgaaaaaggtgagaccccgcagcagaccgctgtgcgcgaagtgcatgaagagaccggcattctgggcgaggtgatcgattccatcgccaccatcgactactggttcaccggcaccacgcagcgcgtgcataagctggtccatcacttcgcgctcaaacagaccggcggcgaactgacggtggaaggagacccggatcatgaggcggaagacgccatctgggtacgttttgaagatttggatgacgtgttgagctatcccaacgaacgcaaaatcgcgtggctctacgccaggaagaagaacaggcaggcaaacgagtgaacctacccggagtcttacgacattgcacacgtctggcacacgcactggcggctggcgtcgccgttgtggcgatgctggccgctccattgaccgtttacgcgaacgatacgacggacacgactgattcatccgatacgacggacgcaacgggcaatcagaccgagaatcagcccaagcagagcattgccatcacgcaaagcacccccatcgtcacctccaaatcgggctatcatgtcaccgcggtcatcagcaatacggacagcacggccacgtcaagcggcacactgcacctgaccaccaatacgctgttcacctttgtctcgcgcaccgatattcagaattgggccgagaacaacgcccccatccccacccccaacgagttgggttccgttgacgtgccatcgattcccgccggcggcactgccaccgtcaccatcgaggtgaacgccaatcagcagacccttgcctccatagggagctgggggccgaagccgctgatgctgtcgtatatcgtcggcaatcggatactcgccgatttgccgagttttctgacccgatcttcggatgggctcaacaccgcgacgacaccggccatgaacctgaccgtggccatgccctacaccgccagcggctggcaggtcgataacaaggccatcagcaatcgcattgccgaaaccaccacttcctcgacatcaacatcgtccaagtccaacagcacggacaaggccgacaagtccgataacgccgacgccggcaacgcggccaaagccactgatacgcaagccatatccttatccgggcaggatgccgataccgcgcgatcccttgggcagacattcgccaagcaccgctcgctgcaagtgatcgcggatcctctgtattggcgtcagtccgcagtgcaaccgtccattgccggcatcatgcagcccgccgactttgacatcaccgcctataccgcgctgggtgataccgcggcctacgaaaaggccggcatcaccactgaacagtggaacgccaagcaggcggccgcatggtatgccgccggaaacgactccgaaacaccctccgcgtacgcatggcagggcaacaactgttggacgttggatgcgctgaccgcggcacgcgagcagggctatgacacggtgattgccgatgcctctttcgatgccgaccagactgaagccgtacacacaggcacctacgtggtggatacgcctgccggcgatgtcaccgtgctgaaggagcaatcgaccttgggcatgctggccaagggccaacccaccagcacggacgcgcaggccgagtccagcgatgccggtcggttggcccgactggtcgctcagagcgcgttctaccagatggaacagccttatacatcccgatacctgcttatgacgttctcccgcaccacggaggccggctggatcgatcaggtgatgagcgccttcgagcaggcgtcctggttgaatctgacggacctgaagaccatggccgaggccgatccgtacaatgtcagcgattcggtcaatcccgacaaggccgatgatgccaacaccgccaatacccggtcggcattgagacagttggccgacagccggcatgacatcatgcgcatggccacctccatattgaagaacgagattgattccgacgaggtctcgtcgttggccccgcaggccctggcccggcaggatgccaatgacaccgtctcgcacagcaacgatccgacgcaatggattggctctttgctggtgctgcatgacgatatggcgctgcgatccatgtctggctccccccagccgacagccacgcgaaaagccatggtcagagccgcgaaaacactggccagcgatcttctgaacggcgtacgcatcaacccatcggaatcaatatccgtgttcagcgaatccgcgaaaatgccaatcaccgtcagcaatgaccttccttatgccgtcagcgtgcaggtcaactcgctgactgactccatgcagatcgtcacctcgcgaaccactgacatcgatattcccgcgcatagcgacgctcaggtgaccttcaccatccgcgtttccacttccggctcatcgacggcccatgtgtcgctgagcgaccgggaaggcaacagcttcggcaacacgcaggataccgcgatcaccagtgtgatgcgcgtcagtgatgccagcggtttcattatcatcggcttcgccgtgctactgtgtattatcggcctgtggcggcagttccatcggaagaaggaccccgacgaatgagttcaaccgtaggtcgtaattccctgatcatggccacgggaaccgctgcttcccgtgtgaccggtcagctccgcacgattcttctcgctgcggccatcggcaccactggattggcggccaacgcctatcaggccggttccatgattccccaatccgtgttcacgctggtgtccggcggcatcttcaacgccgtgctggtgccccagatcgtgcgcacgttgaaagaaaaagacgcccaagaacgactgaatcgtctggttacgttggccatcggcatcctgttggccatgaccgtggtgatggcggcggccagccctctgcttgcccgcctgtacgtgggtagcgacgatcaccagatgatagccctgaccacctcgttcaccctgtggtgcatgcctcaggtgttcttctacggcctgtatacggtgttgggtcagatcctggccgccaaagaccatttcctcacgtatgcgtggagctcaaccggtgccaacattattagttgcgccggttttactggttttattctgctgttcagcaaggccaatgaacagcccctcgaattctggaccgccgacaagattgcgcttaccgcaggcacctggactttgggcgtggccttccaagcgctgatactgttcctgccactggcccgtatcgggttcaagtacaaacccagcttcgggcttggcggctttggactcaggtctatgggtcccgtggcgttaggctctttgggtgtggtggtcaccagcgagatctgcggcattatccttacccgtatcgccacatccgcaccgcagcgcgcccacgaactgacgggtgccagcctgttcagcgtggcaggcaacgcgacctatcagaatgcgtacacactgttcatcctgccctattcgctcatcgccgtatcggtatccacggctatgttccccaaaatctcccgttctgtcgcagctgcgaatctggatgaggcacggcacgatctggtgagcgcgctgaacaacgtggggctgctgatcatattcttcgccgccgacatggtcgtgttccccgaaccgatcatccgcgcattgcttccgtccgtctcgatggacgagaccatgctgatttcc

SEQ ID NO: 2407 - DNA, 25683 bp, Unknown
  R50_10m  MAG No. k141_9561
acctgtttgccgtcagcaccggcggtctcggcgaagttcacacgggcattgtcttcgataatctccggtgcggtgcggcgcacgaattcgacaaccaccacggtcaccagaccctcgaccacgctggctacggccaggtgcgggatcagcatggcgggaatcgtcacgttaaaggtgaacgggaagtagagcgcctggccgtcagcggctttgaacagcagcggctgcacgccgagttccagcgccacgcagaatgcggcgagcgtgatgccgatatagccggacacgaattcggccacgcgttccttccagccgtcgggcagcaccttgcgtagcaacacgtacagtccgtaagccacaaacggcagcacgaacgccatgttgaagcagttggcgccgagcgtgatcaggccgccgtcgccgaagagcagcgcctgcagcagcagggccaccgacacggcgaccgtcgcgtactggggaccgagcagcagagcgatcagcgcgccgccgacaccgtgcgcggtggtgccgccaggcgtgggcacgttgaacatcatgatgaggaacgagaacgccgcgccggcgcccaggtaggccatcttctccggcgtgctgttgcggatcacgtagcgtaggcacagcacccacaccggaatcatgatgacgtagaacaacgccccggtggacggcgaaatgaaattatccggaatgtgcatcgccaatgtgacggtgtcaggtacttcgattatatccaacttccctctttttgttgatttcggagctcgaccacaacctcccgctccaggaacgtgatatgtaatatcacaactgtgattcgtctaatgcacaaccatgcaaaatagcttgcaattactagcgacacaccgtgtaccatatatccggtttccgtgttttcggatatttttccgctatattttttgcatatttcgatcattcgttacaaagtgacgcaacaggctctctacactgtggcatgaaggacgtggggattctcacgccacaagcaattttctccaaggagaacggatgatcgccaaagaaatcaccggcaacatcatcagtcagcagtacagcgacggcaaacttaatgtgtcgattgccttcgactggttcgaaaccgataagaagcgcatgcgcaaggtggccgaggacggcaccgagttcggcatcatggttggcaagaccatcaaggatggcgatgtgctcgccgaaaccgaagacaagcgctatttcgcacgcattaaaaccgcacagctgattgagattccggttaactcgatgaaggaaatgggacgcctgtgcttcgaactgggcaaccgccacctgagtctcaaggtcgagaacgaccgcgtgctggtgccgtacgaccatccgaccatggaatacacgaagaagatcggttatgaaccgcatatcatcgagggtgggtttgacggcttcctgatcgtcaaggcccacgccggcaccggcacactgattccgggcaccaacaagaccacgggcgacgtggccgaggaggagcaggaagccgaggccgacaaggaattcccggccgaggaggccgccggccatctggatgtgcatacacacgacgcaggtgagggtgagcccgccgaatatgagatgaacggcgtgctgcaccgcccggacggctcccacagccacgacggcggccgcacctggcacacccactgatagccccatgaacatcaacgaaaccgaatcgcgacgtctggccatgctgcaggtgtgcgacagcgtcttccccgtgggcgcgttcgcgctgtccaacggcatggagaccttcgtacagcgcgacttcttgcgccgtggcgccgatttcgaggagtatatgaagaactacctcgaagtcgcaccgtacaaggaaatcgggcagatggtgctggccggcaagtacgccaccgattcgcgagtctcccgcaaagggctggccgagcgactcatcgaacttgacgagctggcctcggccctgcaatccgcacgtgaaatccgtgaaggcagcgagcgcatgtgtacccgcctggtcaagctggccgagcagatggatgccggccaggcgcagacctcggatgggcatcgtgggttcgccaagccaagtcctgccgacaatgccaccgcatccgctgcggattcgcgcgaaaacagcatcatcgccgtgcacgagcatcacaccgaacgccaccagctgcacgatgccgccgacggcctgtacggctcgccgtcgctcgacctgtatgccgggctgattcgcgagcgccgctgccgtggcctgcattcgatcgcgatgggcctgtacgcggctgaccatgcgaacgacgtgcgcgacgcggccatcatgtatggatattcgctgttgagcgcgcttaccatgtgcgccgcgaaggcgattccgctcagccagtacgctggccaagtcgccctgcatgattcgttcccgcgcctcgtgcgcgcggtgaatatcgcgatgacgttgaagcccgaggatctcggcatctccggagcttacctcgacatcgccgccatgcagcatgaaatcttgtactcgaggctctacatgagctaattatcctggctcccctcaaggaggggagccaggataacctcacccgcaaaccacatacctaactaattcccacataaaggagaaaccccatgtcatacgtacgcatcggcgtcgccggaccggtcggttccggcaaaaccgcgcttatcgaacgcctgacccgcaagatggctgacgaatacagcatctgcgtggtcaccaacgatatctacaccaaggaagacgccgagttccttatcgagcactcacgcctcgcgccggaccgtatcgtcggcgtggagaccggtggctgcccccacaccgccatccgcgaggactgctcgatgaacctcgaggcctgtgaggaaatggcccgcacccacccggacgtgcagatcatgttcgtggagtccggcggcgacaatctgtccgccacgttcagcccggacctggccgacgccacaatctacgtcatcgccaccgatgagggcgacaagatcccccgcaagggcggccccggcgtcacccgctccgacctgctggtgatcaacaaggccgacctggccccgttggttcacgccgatctagacgtgatggcccgcgactccaagaagatgcgcggcgaccgcccgttcatcttcaccgacctgatgggcggtgccggagtggacgacgtcatcgcatggatcaagaagagcgtgctgttcgaggacatgtgatgttttggcccgcccgtatccaaaaacggacgggccgaaacataccgttgcaccaagtgcggcataattgcccatgtcatcgtcaggcaccaatcataagaaggcagcgattcgtccatgggcagtagcacttttcgtctatccactgcattccgccacggacgtaccaaaatcgacgatatttatttcgaggcgccgttcaaactgatgaccccgttcaccaacggacgtcattcggatttcgtcgtgatgctcgcctcccctggcttcctgaggggcgatgaagcccatatcgatatcgacttcggcccaggcaccgattcgaccatcaaaacgcaaagctacgagaaggtgttcgacaccgcggacggctcggccgaacgcaccatcgaactcagggcgcgtggcaatgccaaagccgtgttcctgccgttcccagtgattccgttcaagaacagctcattcatgaacctgaccaccgcgcatatttccgccgagtcagcattcgtgtatgcggatgtggcgacatgtggccgcgttgggatggatgagcattgggccatgaaacgttttacgaatcgtatgcgcgtatatgtggccgaacccgaagccgtgaccaaggccgccgcagccgaattggcgcaacagcacgcacatcgccgaggccggccttccaaggcggaagccgccgctgcccaaccgcgcgaacatctggcctttgctgaccgcatgctgttggaacctgatgcttttgactacaccgaactcggcatgtggcgcgaattcacccactgcggcgttctctacgctcatctgcccgaactcgaccctagcgacgctgtacaagatgccgcaactaaagaagcatcctccgccgccatccgcgagcgcatcgagactgcccgcatcgccgccgaagacgcgctcatcactcgcatccatgaacacgcagacgccatcggcttcaccggcgagctcggcgtgagccgcgtaatcaatggcatctgcttgcgtgtactgaccacccgaggcgacgacgccttcgacctcattcgagatgtggccgatttcgtgaccgatttcgtggccgaaggctaaaaccaagtggctctcccctttgaggagagccaccagttctctcagaacaggaagtaccgctgggtaagcggcaactcgtacgccgggtcagagtggaccggttcgccgtccaccgtcacttggaaggtttcgggattgacctgaatgtcggcgagcacgtcgttgaacttcagatccttcttgcctaccgtgcggcagccatgcactggtaacacctggcgctgcagctccagcttgcccttgatatcgtcatccacggcggcctgcgaaacaaacgtggcgcaggacttgccaagcgcacggccgagcgcgccgaacatatcgcggtagtagacaggttccggggtcgggatagaagcattcgcgtcacccatacgagagtaggcgatggagccacccttgatgaccatttccggcttcgcgccgaacatggacggctgccaaagcacgagatccgccatcttaccgacttcgatggagcccacgtattcggaaatgccgtgggtgatggccgggttgatggtgaacttggagacgtagcgcttgacacggaagttgtcgttgcggttgttgtcgtgttcgtcttcggggagcggaccgcgctgcttcttcattttgtcggcggtctggatggtgcgggtgatgacctcgcccacgcggcccatggcctgcgagtcggagctcatcatggagatgatgcccatgtcgtgtagcacgtcttcggcaccgatggtctcggggcggatgcgcgagtcggcgaaagagatgtcttcgggcacattgcggtcgaggtggtggcagaccatcatcatgtcgagatgctcgtcgatggtgttgcgcgtgaacggcatggtcgggttcgtggaactcggcagcacgtttgggaagccagcggcacgaatgatgtccggagcgtggccgcctccagcgccttcggtgtggtaggtgtggatggtgcggcccttgaacgcggcgatggtgtcttccacacaaccgccttcgttcagagtatcggtgtggatagccacctgcgtgtcggtttcgtcggccacgccgagtgcagtgtcgatgacggccggggtggcaccccagtcctcgtggatcttcaggcctgcggcaccggcgcgaatctgctcacgcaacggttcggggctggagtcgttgcccttgccaaggtaggcgatgttgatgggcagcgcttcggcggcctcgatcatgcgggtcaggtggaaggctcccgggttgcaggtggtggcgttggtgccgtcggccggaccggtgccgccgccgaccatcgtggtcacgccaccggcgagggcagtgcgaatctgctgcggggagatgaagtggatgtgggtgtcgagtccgcctgcggtgacgatgaggccttcgccggcgagagcttcagtgccggagcccgcttcgagaccgggggtgataccgctcatggtctgcgggctgccggccttgccgatggcgctgattttgccgtctttgatgccgatgtccgccttgtagatgccggtgtagtccacgatgagggcgttggtgatgatggtatccggcgattcaacgtcgagctgcacggagctttggcccatgccgtcgcggaatgatttgcctccaccgaacttcagttcatcaccgtagtgcgtgtagtccttttccacctcgatgatgaggttcgtgtcaccgagtcgcacgcggtctcccgtggtcggcccgaacattcccgcataatccttgcgcgtaataatcttcatgtcaaaagtccttgctgtttttcagctccccttgtcaggggagctggctcgcgaagcgagactgagaggtagtccgctccccgctggcgggagctgtcagcgaagctgactgagggtggcccttagctcagattcccgagaatccaagctcatgcgccttcttaaacgcggcctcccgcacctcagggtcatccaacttcccctcaaccagtgcgctgaagccgtgaatctcacgcgtgccaccaatatcaatcaaccgcactcgatgcgtttcacccggctcgaacctcacagccgtaccagccgcgatatccaaccgcttgccatacgccgccttacggtcgaacttcaggtacttattaacttcaaagaagtggaagtgcgaaccaatctgaatcggtcgatccgcagtgttcaccacgtccagctcgatgtcttcggaaccttcattgagttccaaatcatcgtcagccagcagatattcccccggcaccaacttctcggtggattcgatggggttatgaatagagacgagcttggtgccgtccgggaacgtggcctcgacctccaccacttccagcatctcggccacgccatccatcacatcttcaggcttgagcagcgtgcgaccgtatgccatgagctccgccacagtgcttccctcacgcgcccgctcaacgcattcggcggaaatcaacgcaatcgcctccacatagttgagcttcacgcctctggctttgcggtctttggcaagctgccccgccaagtacagcatcaacttgtcagtctctcgtggtgtaagtctcataacatcctctgttgttgactggagtttttcaggcacaccaatgtgagccctaacatcgcccaataataagagcgttataagaacgggacgtttctcataacgctctatggccataaacgggggtcgaattaatcacactctcatggattccttggcggcttctacttggtcggggccgccttcgccggtggcgatgaaacggccggaggccaggacgtagtagcggtcggcgcgctcgacggcgaattggaccttctgctcaaccaagaccacaccgatacccttgtcttcggccatcatgcgaatggccttctggatttcggcgacgatattgggctggatgccttcggtcggctcatcgagaatcatgagcttggggcgggtgatcagcgcgcgggcaatcgaaagctgctgacgctggccaccggacagcagaccggcacgtcggccagcaaattccttcaagaccgggaacatttccacggcttcgtcgtaacgggccttggcctctgaaccgtagcggtcggcgaccacgtgcaggttttcgtccacggtcatggtgccaaaggactgctggccctgcggcacgaacgccatgcccttgcggatgcgttggttcggtgcagccttggtaatgtccttgccctcgaaactaatcgaaccggacgaaacgggcagcaagcccagaatcgccttcaacagcgtggtcttaccggcaccgttgttgccgacgatgctcacccattcgccggcggccacgtcgaaactgatgtcgttgacgacggtcactttgccgtaaccggtgttcaaatcctttacttcaagcattgccatgattattcactttctacggcgtcgtgcatattgatgttgaggcgcgttgtatcaccctcaatatgcactgaaaaagcgcattccgggatgcgatggttgttgtcagtgcggtccatattgcgcttcttcctcttacctactcccctcagtcaccttcggtgacagctcgtccgcaattaaggacgggccttgcctgcaacctgctggttcgactatcgtctcgccttcggctacaaacagcccactgggctgtttgcttaacgcctcggcctcagggaggggagacagggagttagttttctccgccgcccaggtagatgcggactacttcttcgttgttttggatgtcttcgaccgaaccctcggcaaggatttcgccctggttgagcaccgtgaccgaatcggcgaactgacgcatgaaatccatgtcgtgttccacgatgatgaccgtgcggttcttgctgcatcgcttgagcagctcaccggtctgcacacgctcggtcggagtcatgccggccaccggctcgtcgagcagcagcaggtgcgcgtcctgcacgagcagcataccgatttccagccactgtttcttgccgtgcggcaggatgcctgcgggcttgtttgcatccacagtcagattgcacacgtccatcatgtattcgatgttctgcgaaacgccgcccatcggctggaacagctcacgacccttcttgcggaagccctcggccagctgcagattctccaacacggacagctcttcaaccaccgatgcggtctggaaggtacgcccgacgcccagcttgacgatgtcgttcggcttgcggcccaacagctgctcgccacggaattccgcggaaccagtggccggcaccagtccggtaatcgcgtcgatgatggtcgttttaccagcaccgttcgggccgatcaggaatcgcaaatcgccgtgctgcacagtcaaatcaagattcttgacggccacgaatccatcgaactcaacgtgcagtccacgaacttccagataatcgctccactggccgccgcgatcatccagcaccgcaagctgatcgtgcagcttcgtacgctcttcaacgatttcggccttcatctgggccgcttcgtcgcgcatacgcttggcttcgtcgcgcatctcaatcatttcggcgcgcaactgctccaaatcggcctgcgatgcaggtgcgggagccgatggattcgagctcatgttcttctcctcactcatgcgttcaccgcctttgcagtagcagtaccggtaccggcaacggcaccagcaccagcaccagccgaagctccaaccgaactctttccgagcccgatcttctccttaatccaaggccatacgcccttgaactgtcccaagcccttcggcacaaaggcaatcaccagaatgaagatcaggccttcgatgtacgtccacgcggacggatacgcctcagacagctgcgtttccgcaaagcgcaccagcagcgtgccgaccaccgggccgagcaaagtggcacgtccgccgatcaccacgccggcgagcatcaggatggacggcgtcacgccgatatcggacggcgaaatgatgccgaccactggcacgaacattgcgccaccaatgccggcgaacattgcagccaccgagaaggcgaacaccttgatggaggcggggttatagcccaagaacttcatgcggttctcttggtcgcgcacgccgataatcaggtcgcccataaacgatttgcgaatccagtagacgataagcaccatggccagcgtcaggaacgcgcagatgtagaagatcatctgcttgttggcgttatcagtcaagtcgtaaccaaagaatcccttgaaatcgttgagaccgttggtgccaccggtggttttcgactggccgataagcagcacggcgaacgcggcaaccagcgcctgcgaaagaattgcgaagtaggcgccacgcacgccacggccgaacacagccagaccgaggattgcggcgataatgcccggtaccgcagccacgccaatcacggcgatgaccggattgcggaagagttcccagaatccaggaaccttggtgatgccgtactgggacatgaagtccggcacttggcccacgccaatgtcctcaagcttcatgtggatagccatcacgtacgcgccgagaccaaagaacaggccttggcccagcgtcagcataccgccttggccccaagccaggccgatgccgaccgcgaccatcgcgtagcacaggtatttggacagcaggccgaggttgtacacgctcagcacagtcggagaaaggaagatcagcgccacggcaatgaccacaccgatcaaagccttatatttcgtggcgtattcgctcaaagtcatcttcattgtcgtttccttacccttctgaagcactcacgcgaggttcctggagcggatggagaccaagccctgcggcctgaactgcaggaacaccaccacaatcaggaacacggcaacctgaccaatcgaggcagaggtcggcagttcgatggacgactggcacaagcccagcacgaacgaggcgataaccgcgcccttgagctggccaacgccgccggccacaacaaccaggaaggcctgcacgatgaaggtcgtaccgaagttgaagctaatcgagttcagcaggctcagcgccacgccagcgataccggcgatgccggagcccaggaagaacgtcacatggtcgaccatcttggtggagatgccggaaacctcagcgaggtcgcggttctcggaagtggcgcgaatctggcgacccagcggcgtgagcttcaggatcgcgtacagcgcagccacgcagataatcgacagaataaagatgaacagtcggcctgcagagaagctgtagccaaagatggtcaccggattggtcagcgcttcaggagccgaagcgtagaccggagtggcaccgaaaatatcgcgtgcgagctgctgcaataccagcgatacaccgaaggtaaccagcagcgtatcaagcggacgattgcgcatacgctccagcagcaacacgtccagcagtaaaccaagcaaaccggctactacgaaaccgaccaccagcgccacggccagggacactgttttattgccgatgaccatgctcatgacgtatgcggtgtatgcgccggccatcatgaattcgccgtgggcgttgttgataacgcccatctggccgaaggtcaacgacaacccgagggctgcgagcagcagaatcgatccgttggacagacctgccacaatttgtggaaataacatacccatgttgttgtgtcctcttctctcagttgctctcgacgctggcgctcaggctcttggcccagctgtaggtcttcaggtacgggtccggcttgatgggaccgtccgacttccagacggtgtggatgagcttgtctgagccgatcttgccgatgtatgaggtcttgtagatgtggtggttttcgccgtccaccttgaccttgccttccggtgcattgaaggtgacaccgtctgctgcagccttgaccttgtccacatcgaacgacttggccttctcgaccatgcccttccacaggtacacagatgtgtacgccgattccatcgggtcggaggtggggcgattggctccgtagcgcgccttgaagttcttcacgaacgtcttgtttcgcgcattgttcagcgtctggtagtagttccaagcagtgagctggtccttgacgttgtcaacgccgatagcggaaacctcttcctcggcgatagacatggaaatcaccggcgtggtggcggctttcaggccggaagccttgtattccttgaagaatgcgacgttggaatcaccgttcagcgtgttcaccaccgcatccgcgccggagaacttgagcttgttgacgatggtggtgaagtcggtggagcccattggggtatattcctcgccgaccacttccatgccattgccctcggcgtacgccttgaccacgcgatttgcggtctgcgggaacacataatcggagccaaccaagaacagcttcttgtagccttgctccttaaggtaatcaagcgcaggcacaatctgctggttcggtgcagcacccgagtagaagatgttcgggctggcttccatgccctcgtattgcagcgggtagaacagcagcgcgttatccgcctcgaacacaggcagcatggccttacgcgaagaggacgtccagccgccgaacaccgcggccacgcattccttttcgatgagggtcttggctttttcggcgaacacagccggctcggacttgccgtcctgctgcactaccttgagctgcttgcccagcacgccgccctttgcgttaatctcatcaacggccatgtgcagcgaatcactcaccgtctgttcggaaatggccatcgtgccagacagcgaattcacgaaaccgattttgatggtgttgcctgaggtgtccacacatgatgaggtgtcgcttgccgcagtcgcgttgttctcttgggcctctttctcggccacggtgcgaccccagccacaaccgctggtggcaagcactgcggcaacaatgcacaccgcagcacccatcttcagtctttgcaatcgagtcatatggctcttcctccccacatacgactacattccgcgaacgttgcccgcccgcggaatgtctacgctgattgccgtaccgtgccctgatgcctgatatcgtgctgaaccacttgccgtatatcgacggctggcttccggccgactgcactatacgatggcagtgcctgcgtgaatttccgttgcctgaatatttcatatgcgtctcatacataacgctcacgttacaaaatcaacggtgttacgcggcccgccgtcgaacgctgtttacattggtgtgcgatacgcgcgcgactgccgcccaagtgacttccccgcgaactacgggtaggctggggagtatggaacttcacgttttgaatcatccgctggtcgagcacaagctcaccgtgctgcgcgacaagaacactccttcctccactttccgcgagctcgtctcggagcttgtgatgctcgaggcctatgaggccacccgcaacctgtccgtagttgccgcaccaatcgaaacaccggtcgctccgatgaccggtaagaagctggccaaaccgcgtccgatcattgtgccggtgctgcgtgcaggtctgggtatgctcgatggcatgacccgtcttatgccgaccgccgaagtcggcttccttggtatgaagcgcgacgaggaacaccccactcagcaggtcacctatgcgaaccgtctaccggaggacctgtccggtcgtcagtgcttcctgatcgacccgatgctcgccaccggtggcacgctggttgctgccactcactatctggccgagcgcggtgccaaggacgtgaccgcgatcaacatcatcgcggcgcctgaaggcatcaagttcgtggaagagcacatcgatccgtccatcgacttcaaggtcgtagtgtgcgcggtcgacgagaagctcaacgacaagtgctacatcgtgccggggttgggcgatgccggcgaccgtctctatggcgtaattgactgattttcctggctcccctcagagaggggagccaatgtgatgggctttttatgcaaatcgacattattgcgccgggacgcgtgaaggaacgatatcttcgcgacgccatcgacgagtattccaagcgactttcgcgctactgcaggctcaacatcattgaagtggcagatgagaaaacgcctgaccacgcctccgaaggcgttgaccgacagatcaaggccaaagaaggcgaacgcatcgccaagcatctgaaggacggcgcgtttgttattgcccttgccatcaatggcaagcagctgtccagcgaagaattggccgccaaaatcaacgaccttggattgcgtggcaccagccatattcagctggtcatcggcggctcaatcggccttgacgacgcgattctgcgtcgtgctgattttctgctgagtttctcgaagatgacgttcccgcatcagctcatgcgcgtgattctgctggagcagatttatcgcgcttataagatcaacgctggcgagccatatcacaaggaaaacgccatacctcatggggctggaaatcccccatggggcggtaattgccccatggggcggtaaaaccctcatggggcggtatgccaaaatggcttaattccgcggtttcacatattcttcaaaccgccccatgggcaagttaccgcccgatgagcctgtaaccgccccatgagcacatcaataacgccctcaacctcacactgcgtcggggacgaacgcttcgaagatgtggcggtcgaagtagggcgcgcactgggcgagttcatcgctgctgcgcacggtccatgaaaccggcatcgcacccatcgaacgagcgagcctgacttgcggcgaagtgccaccggtccagtcataggccacgaaatcaggacgagacagccagtcgaacgccagtaagccggcggcccattcagccgcaccattcttgcttagcttcgccggccagctcagctgaccgcggcacacctcagggtgatgctccttataccaattcaccgcgcccggatggaaggattcgatcacgtacgggccgtcatacgcctcaagcaaggcgtggcccttttccatgagctcttcgctacgctcatcccaagccctgttgttgctgaccttgtattccacaatcagcggagcccggccggccaccacgtccagcacatcggagaacagcggcacatgctggtagtaccccttcggcgcggcggacggcgtgaccaccagcggcgggttcgcgtcggcacccggcaacggttcggccttcaagtcaccggacttgccgttcgggaacagcggaatacgggtcagttcgtcgtacgtcagatcttcgatgcggcgcggatcgccggccacgcgcagcaaatcggcgtcatggaccacgaccacttgaccgtcgagcgtaagctgcacgtcgagttcgatgccatagccagcctcgcaggcggcggcgaatgcggccagcgagttttcaggagcgatcggaccggtcatatccgcactgccgtagccggccttgacagccatgcgacgggcaagcgacacataatcatcgttttcggcgatggatcgctcagtggtatcggcttgggcgctgaccgaattatccccaccataatcagcgatatcggtatagccgaccaaaccagaacccgcatcgtgcaagccacgatgggcataccataccttcggaatggagggcacgaaattacgacgcttgtcattgaacgtgcgcggggccacggcccacacggcagcaccggcggcggccacgcctgccagcgccacgtttctccagagcttcgacgacattggaatccttcctgttgggctgtctctagcctaacgcttctgccagccattgtggagtggttggatcgtccggtttcagcgcgcggtccaggtggttggcacgcagcggctcccagctgaaatctgccagcagatcggcgggtttgcaagggattggagtgggttgcagacgcagcaaccaggcgcagtatccgatgatttgctcgggggttacgttgcgggcgcgcaaggctcccatatccagcgaacgttcgcgcttggctaaacgccgaccggccgcattgtcgatgagcggcaggtgcgcatactcggggtgctcggcgagaggcttttccgtgttgccgcattccggctcaaagccgccagccaacagacactggcgaatccacatttgcagcgcggtggagcgcagcagatcacggccgcgcacgatatcatcaacatccatatcgaggtcatccacgaccacgaccagttgatagccgaacagtccatcggctcggcgaatcacggaatcgcctacctcgcgggccaaatcgtagtgctgtggactatagacacggtcgttaaagcatgcgacaccatcaacgattccggcatcgccctgctgttccggcggcacggctcccgacagcgcagcggaatcgtcaggcactgtacgttgcttttctcccgctgccggtttcggcatggcgatacggatggaatgctggtcgccgcgagacagacgggcacggacctcgtcgggatggtcgtgcagcaggcggcggcacgtgccggggtacaccatgaagccgtcgccctcgttgggggccgaggcggcgcgaatgtcggcgcgcgaacagaagcagggatacagcacgccctgcgagcgcaggcattccagcgcatactcgtatcgttcggcgcgctgggactggaacatcggttcgccatcccagtcgagcccgagccaatgcaggtcgtccatcatgagccggtcggcgccggcgaccacgcggggcccgtccacgtcttcgatgcgcatcatcatgcgttcgccacgcgaacgggccgaaagccatgcacccaacatggcgtacacgttgccgatatgcatgcgccccgacggcgtcggcgcgaatcgtccggtcaccggtcttcctgaatcccgtccacgctcacggacggatcgtcgccgcccgaacgtgcggtgaggtccagatgctcaccaccggtctggtcgaccagcacggtgtcgccgtcgtggaccttgccggccagcagcatacgggccagctggtcacccacttcggtctgtaccaggcggcgcagcggacgagcgccataagccgggtcgtaaccggtgttggccagccattcgcgagccgagtcggtgacgtccagcgtgatgcggcggtcggtcaggcgctgagccaccccggccacctgaatgtccacgatgccgccaagctcctcacgcgtgagcgggtggaacatgacgatgtcgtccagacggttcaggaactccggcttgaagttcatgtggacggcgtccatcacggccttcttcttggcgtcggcgtccatgtcctcgttcacgaggaactgcgagccgaggttggaggtcatgatcaggatcgtgttcttgaagtccacggtcctgccctggccatcggtcaggcggccatcgtcgagcacctgcagcagcacgtcgaagatctccggattggccttctcgacctcgtcgaacagcaccacggaatacgggcggcggcgcacggcctcggtcagctggccgccctgctcgtagcccacgtagcccggagccgcaccgatcaggcgcgagactgaagccttctccatgtattcggacatgtcgatgcggaccatggccttctcgtcgtcgaacaggaagtcggcgagcgccttggccagttcggtcttgcccacaccggtgggaccgaggaacaggaacgatccggtcggacggttcgggtcggagatgccggcacgcgaacggcgcaccgcgtcggacacggcggcgatggcttccttctggccgatcacacgcttgcccaggtagtcctccatatgcagcagcttctcgttctcgccctgcatcaggcggccaacgggaatgccggtccagtcggagacgatctcggccaccgagtcggcgtccacacggtccgggaccatcggctcatcggccgggttggccgcgccggcatcggcagattcggcatccgcgctttccgcggcggcgagttccttctgaatagccggaatctctccgtacagaatcttcgaggcctcagccagatttccctcacgggtgaacttgtccgcctgcacacgcaggtcatcgagcttggcacgcaggtcaccgaccttgttgtggccggcctgctccgcatcccaacgcgccttgaggccgctgagcttctcacgggtgtccgcgagttcggcttgcagcttgcccagacgctccttggatgcaggatcctcagccttcttgagctgcatctcctccatttcaagacgggtcaccttgcgctgcagttcatcgatctcctcaggcgaggagtcgagctccatacgcaggtgggcagccgcctcatcgaccaggtcgatggccttgtccggcagctgacggcccggaatataacggttcgagagggtcgcggcggcaaccagcgcgtcatcgccgattgtcaccttgtggtgcgcctcgtaacgctgcttcaggccacgcaggatggcgatggtgtcttccacgctcggctcgcccacgaacacctgttggaaacggcgttccaatgccggatccttttcgatgttctcgcggtactcgtccagcgtggtcgcgccgatcaggcgcagctcgccacgggccagcataggcttcagcatattgccggcgtccatcgagccttcggccgcacccgcgccgacgatggtgtgaatctcgtcgatgaaggtgatgatctggccgtccgcgttcttgatttcgttgaggacgctcttcaggcgctcctcgaactcgccacggtacttcgagccggccaccatggagcctaggtcaagggagatgagcttcttgccttgcagggtggtgggcacgtcgcccgccacgatacgctgggccaggccttccacgacggcggtcttgccgacgccgggctcgccgatcagcaccgggttgttcttggtacgacgggagaggatctgaatcacgcggcggatttcctgatcacggccgatcaccggatcgagcttgccttccttggcggcggccgtcaggtcggtggagtacttctccagggccttgtacgagccttccgcgtccgggctggtgaccttcgcgccgccacgcacgccgggtacggccttgcgcagggaggctgcggtgacgccgttcttctccaggatttcggccgactggttcggcttgctggccgcgatgccgataagcagatgttcggtggagacgtattcgtcgcccatctgctgcatttccttctcagcctgggcgatggcggcggtcagctggcggctggcctgcggctgcgaagtgctggagccggatgcgctcggcagtgcgaccaaagcgttacgcacggcggcgccgatggcctgtgggtctccgcccgcggcctcgatgagggagcgcaccacgccgttttcctgacgcagcaacgcatccatgacgtgcagggtctcaacctgcgcgtttcctgcggcggacgcactctgaatcgcgtcgccgacggcctcctgggccatagtggtgaacttctgttccatatcgtattcctccatatcatgcggcccgcgcggagcggctcgcgggcttcgaaagccccgcaagcgccaccgcagaccgcaacttgtcgttgtctgatatggtcaaccgacctggaacccattctattcccaaaacttgagtgcaggtgactcaagttttggattttggtggggagggtgaacagtagccccctctgatgagggagctcacatctatttcaggaggccgacggcagcttcggcggcggataggatttcgccggagaggatggcgttggctacgccttcgatttgcggggtggtccaggtatcgcgtacgtcggggccgatttcgttggcgtactggcgcaccacgcggtatacggcggaaccggccgcacccggacggtacggcttgcggaagtcgaaggagcggcaggagcacagcagttccacggccagcacgcgcgcaaaggccggaatcgaccggcgcagcttgcgggcggcggcccagcccatcgacacgtgatcttcctgcatggcggagctcggaatcgaatcgaccgaggcgggcacggcgttgcgcttcatttcggagacgatgccggcggcggtgtactgggcgatcatgaaaccggagtccacgcccgggtcaccagccaggaacgccggcaggccgcggttgcgcgccacgtcaaggaagcggtcggtacgacgctcggagatagaggctacgtcggcagtcggaatcgccaggaaatcgagcacataggccagcggcgcgccatggaagttgccgttggactccacacggccgtccagcgtgacgcacgggttgtcgatggcggaggcgagttccacgcccgccacggaggccgcgtattccacggtgtcgcgggcggcgccgtgcacctgcggggtgcagcgcagcgagtaggcgtcctgcacacgcacggtggagcccgggcggccggcctcgatcagaccggagcccttgagcaggcggacgatgttcgcggcggaatcgccttggccgcgatgcggacgcagcgcctgcaagtcggcggcgaacacgcggtcgttgccgagcatgccttccacgctcatcgcggcggcgatgtccgccgtcttgagtagcaggcgcagatcggtgatggccatacacaacatgccgagcatgccgtcggtgccgttgaccagcgccaagccttccttctctttcaaatcgacgggcgtgatgccggccgcacgcagcgcttcgccgccgccgatcttgcggccgtcagcgttgcgggcctcgccttcgcccatcgccaccaaagcgcaggcggcgagcggcgccaaatcaccggagcatccgagcgaaccgtattcgtagaccaccggggtgatgccggcgttcagcatatcggcgtagacctgcgcggtttccgggcgcacaccggtgcgtccggtgcacagggtgctcaggcgcagcaccagcaggccgcgcaccacctcacgctccacttccggtccggcaccggcggcatgcgagcggatcagacttttctgcagctgcgcgcgctgttccttggggatggaagtggaggcgagcgcgccgaatccggtggagataccgtaatgcggcacggtgtcgtcggccaaatgatcgataaccgcgcgacttagcgccatctcatgcttcgattcgtccgaaatcgccactttggcaccgccgcgcgctacggcgataacgtcctcgatgctcaatgccccaacgcctacggtgaccgtctgctctgccatgttttcctacctctctatcgtgccgagctccacttggtattggatatattcatctcgccagcatggcatatcaacgttacgggactgtccacaatatgcaccgccccgcgccagcgccgcgcgaacgctcctatactcacggctggtttgttatgcgcctgaccgccgccggtgctgcggcgggtgcttgtgggataagagaagaacatgatttttcaggccggttcgctgctgctcgttatcatcggtgtctacatactcaaacatgtccacattttcggcgagcgtgattacaaaatcgtgcagggtctggtattcaatctgacgcttccttgtgcgattatcctgtcgttcgccacgaacaagcacgacatgcgcatgctgtggatcgtgttgttcggcttcttcgcctgcgcgattccgctgttcatcgtgtatttcggttctcgcggcgacgagaagaactaccgcgccttccagatgctcaacgcctcgggcctgaacctgggcgcgttctgcctgcctgtggttcagacgttcatgggcccgtccgccggtctgccgatcatcatgctcgatatcggcaacgccaccgtggccacggccgggtcactgaccatcacacgcacgctgctgcatatggatgacaatttcaagtcgctaccgctcatcctgcgtctgcgcaatattgccagggacttcctaagctcgatttccttcgacatctacatgctgatgctggtgttcatgttcctgcacatcacgatcccacagcccatcgttacgctcatcaccccgttcgccaatgcgaacgccttctgcgcgatggccatgatcggactgatgatggagattccgaacaatcgcaaggacaaggtggagttgggcaaggtgattgtctggcgcatggtattcggcgcgattatagccgtggccgcctggttcctactgccattcgacatgaggattcgcgagatcatcgtgttgggctcgttcgcccctatcacgatcttctcaaccaagttcaccgattcgctaaccggcaacgccaagctcgccggcttctcgctgacagtgacggccatcatcagcttggtggtgatgaccgccctgcacgcacttctgccgggagcgtaagggggaattacgggcccagacacgaggggagccaaaaagagcaatacttcttctatgtgatatcaatcactgactaagctgcatcaccgactatggttaatcatcatgagaccagttcgccctacaattcaagttctgttgagcatgattgacaataatctcttcaactcagagaaccctcaacaactcattgaacagaacatgcggacggaagcagtaacaccgttcgaaggtcttgatttcaccgcattcgacgtcacactactcaatatggctcgtcaggctttcgctggtgacaaaatcgctgccaccaagcattcggaatttagcgctgtggcaaagcgcccagtctatgaaataaggaacaagcaaaccggctggcgaggcatcgtcattcttgaccaatatggcgacccgtggatggtctattgcggatcgcatggggatttccattcaggcaattgcaaatcaatcattaaggcttccaacgccagcaactatatgcccagcgaagaagattatctggttcggaaacgagaagaagaacgtcagcattttctggattttgagcgacgagtcgttcaggagatgcttaacaaaattcgtgcaggaatttatgcgggccaaacaacttcccagtccgaagccctctcagcgctggatatcccctatcagatttcaggagcccccgtaaaggccagtattcagattcagcaagatgacgatgacgactcagcaactgtcaatcaattcgttgaattgacccttgattttccggtcgaggaacaggacaacagttctccatacgcccgacttcaccgcatcctcttgagatgctttaacgccatctgccagcccaaagaccccaatcagccagcagaaacgtcgttgaagacatacagcgacggtcagcaaagacgcgcaactatgtcagcattcgtgctgctggaaccagacgacatcaagcgcatcacaagcccgaacttcctcgatgattccgaatcgttatacaagacgataggcgacaccgagccagaatctatgctacatcgcgtacccaaagagactctgaccgacgcatatgttgaaggcaccctcatccgttctctgtgcgggaaatggttcgtgccaaccagagatgaatactcaggacttcctgcatgccccgattgccaagacatactggaagtcaaggagtatctgagacgtaattacacgcctgagcaatagtcatgacttgacgcataccgggtaaatcgcacagacaatagattcactacgattcgcctgagacaatcctcactctgcgggagaaactgcggcactactcgctttgatcgcttcacggcgatgctctgcaactaaatcacgcatacgatttcgacttgtctcagacaccggagcgacttcgtcaaccgcatcggcaatatcctttgcccgagaattgattgcgtgggcgtattccttacgtcccgcatcacgattagccatgtacgtccgcaaagcaagtaccgtaatccgatgatgactgcccaccatatgagattcgagcagtcctgacttcagcaaacgagtcacatagggccgactcacgccaagaatctcagcagcttgagcaggggataattcttcgtccttgcgaaccaccagtacattatcgtcaataatgccatccaaaattgcagcgagtacagagcctttttgcaccagctctcggcacgccttcgcctgatccaaatcgcgttctgtaagctgttcacgttctattactgcagtcataatgcacatacctcatttcataactgaaataagtgtaacatatagcttggtgcaacacttagatttcgcgaaaaaatcatctgtacattagacagatgcatatatagatgaaatatatgaaacaaagcacgaaggcccggacatcccccaaataggaaaatgaccgggccatgcgttcgtcagtcgaatcacgcccgaacgattacgttgcgcagatcaccgatgccttcgacgtgcacgatggtctcgtcgcctgggtcgaggtggccggaggcgttcggggtgccggtcatgatgacgtcaccaggcagcagcgtggagaacgacgaaatcgcggcaatctgctcggggatgccgtgaatcagattcgcggtggtgccagacgccatcggcacatcctcgccgttcagcgtgaaggaaatcttggcgtccttccagtcgaggtcgtcacgcatcacaatccacgggccaagcgggcaggaagtatcgaagcccttggcgcgcgtccacgtggggtcgatgccctgcaggtcgcgcaacgtcacgtcgttcacgcaggtgaagccgagcacgtaatccatcgcgttttcaacggacacgttcttggcgatacggcccatcaccacggccacttccggctcgaagttcatgtccttggagcaggccgggtacacgatcggatcgtcggggccgatcaccgaggtggacggcttggtgaagatcaccatgtcctccggcgcgtgggcgatttcggagtgtccggcctcgtgcatgaactgggcgtgggcctcgtagttcttggccagaccgtaaaccttggaggggatgaccggggagagcaggcggatgccgtcgccgtcgaccgggtaccggttgccggtaggcttgacctggtcgccggccagcggatggccgtcaagttcgatgaggtagtccttgccgtccgtttcgtccttttgtacgaaggcgtagcgcggcgaatcattcaaagaaaaacgtgcgagtctcatgcctgtaagcctactccttggcggttccttccgcagaagcatccgtccaaggagcaagcagaccggccttcaatcgaccaaaacgcacgttcgctgggattgctacttttcggtccaggttttgtcatacagcgactggccgccttgcgtgtgcatgatgacgcgcaatgatgccttgccgctggaggtcttgcacatcgagcccagcagattcgcggtggattgataggtgctgtccatagcatccagtgaggaagcgacggtatcgcctagcgaggcgtagctgtcgtcgagcacgtactcgtacaccaaggtgtcaccgtcgacacggtagttgaaggtgatgccggtatctgcaaacgtatccgcttcggattcaatggagtccttgaattccgaatagtcgacgaaatcctgaatcgaatcgtacagcccataatcgccgtcggttagatcgtcatgggtttcgtccaacgtgtcgtccagcgcatcgtcaagattatcttgagctttgctcttatcgctgctatcaccgttgcccgaagaggactgactatagaaggaatcggttttcgcctcatctatagccttgctggtgtacgagacaccgccgacgatcagcgcgatgaccagtattacctgtatcaccatgcccgccgcactgatgatgatgccggcgatggccaagcccttgcccttgccgccctgtttcttaatctggttgaggcccacgatgctcaggatcagaccggggagtgagacaaggaacgagcagataaaaccggcaatagccaggccgttgtacttctggttcgcttcaggcggcacactgccgtaagaaccagaccatcccggctggccgttcggttggccgccttgcatatacgggttatagggcgtttgcggaggcacggccccgccgcccggataccgagcactgacgctgccgtagaccggaggaaccgatccgcctgccg

SEQ ID NO: 2408 - DNA, 9614 bp, Unknown
  R50_10m  MAG No. k141_9588
cggcggcggccaaactgtgccgttatgagagcggcaagctcaggttcaaatccaatccgcccgagctggtgccgatcaatcagctggatgattacgccgacttggatgcgttgcaggcacgtatagacacgctgttcgagagctaccggcattccctgtacgacgatcgccgttgggtgttcgatcatttgcgctatcaggacgcggcccgcaaggtggtgggcgtgggctcggtgggccagcgcgcgtggacgtcggtgtggatcgcgcgtgatatcgacgatccgatgatgattcagatgaaggaggccacgtattccgtgctcgagcattactgcggcgcgtcgccgtacgccacgcacggtgagcgcgtggttcaggggcagaagctgattcagaatacggccgatgtgctgttgggttggtcgagctttatggccgaggatggccgaccgcgcgactattacgtgcgccagttgtggaatggcaagggttcgattgatatcgacaatctcaacgcttcgggattgagcgatctgtcgcgcatgtgcgcatggtcgttggcgcatgcccacgcccgcaccggcgattcgatcgcgatcgccaattacatgggtggcaccgacgaattcgatcaggccattgcctcgttcgccgtcagctacgccgaacagaatgatgaagactacaccgtcttcaaaaagctcctcaaatccggcgaccttccttgctgagccgttaagcggacagcccagtgggctgtccgtaggcgaggcctgagtgaagcgatagctgagcaaaggtagcttaacagtctcgctaaggcgagtcctttgcctacttcgcgactgcgagcgcttcctggagcgtgaacgcacgtgcgtataacgacttgccgaggatggcggaatcgacgccgatctcggccagttccttgatggcgcgcaaatcgtccagcttggagataccaccggaggccgtgaccttggcgtcggtgcgttcggcgacttcacgcagcagttggatgttcgggccggacatcatgccgtccttggccacgtcggtgaccacgtaacgcgagcagcccacggagtcaaggaacttcatggtctcaaacaggtcgccgccttcgcgcgtccagccgcgcgccgccagtgtgtgaccgcgcacatccagaccaacagccacacggtcgccgtacttcttgatgaccgaagcggtccaatccgggttctccaaagcggcggtgccgatgttcactcgggcggcaccggcctcaagggccgcgtccaacgaagcgtcatcgcgcacgccgccggacagttcgatgttcacgcggtcgccaagctcatgaacgatttcacgcagctgatcgcgattgttgcccgtaccgaaagcggcatcaaggtcgaccaggtgaatccattcggcaccggcctcaacccaggtacgggcggcctcaaacggcgaaccgtaatcggtttcggaaccggattcgccttggcgcaggcgcacggccttgccatcgcgtacatcgacggcgggcagcagagtcaacgacataagaagagcctttcttcagttacttatacataatttgagctctctcgtcagaggggagcttcatgctttttacagcgtgacgatccagttcttgaggagctgggagccagcgtccccggacttttccgggtggaattgcgtggcggacagcgggccgtgttcgtaggcggccacgaaacgcgaccggccgtacgagcaccagctcacgcgttcgggcgcaccgctcagatcaatgtcgaagcgggacgtatccgccggcttcacttccatcgcggcgtaggagtgcacgaagtaaaaccgttcattctccacgccgttgagcagcaccgaatcgggggcggcctcgatcgtgtcccatcccatgtgaggcaccacgtcggcgtccagcaggttcaccgttccgccgatcagcccgatgcccgcggcatgggccccgtgctccagaccgtgttcgaacatgatctgctcgcccacgcacacgccaagcaccgggcggccggcgcggatgcgatcatagatcacacggtcgccgtcgaccttcttcagtccttccatgcatgcggcgaacgcgcccacgcccggcacgaccagaccgtcggcctccaacgactgccggtagtcggaggtgagggtggtgtcgacgccaagattggcgagcgcacgcaccatggaacgtacattgccgaaaccgtaatcgaaaacaaccgctgtggtcatattctctcctatcccctactggttggttggcgtctattcgatgcgggagccgcgtccgccacgcccacgcttggtatggttggcgagaatctgcatcgcctggtcatggtcgagtccagcggaatccaccacttcgaacccttgggtcttgagttggttcagggttacgatgccgagcatcaggtcctcgacgaagcgcggtgtggaggtgaacagcacgggcggcgcgaaactctgtccggcctctccctgcacgtacatggccacttcgagcttgtcggcacgattgactgcaagaatcacggccatgccggataccacggtggtcaggtccttggctgcggcttccgggccgtcgccgtccagattcttcagcaccgcgacggccccctgattggcaccgacgcatgcggcggagatgtccgacagctggcagaacgcggccaacagttcggcggaggcaagacgggtgacgatcagcgccaccttcgccttgttacccaacagtccagcgagttcgttgtcgaagccgagcgaggggtcgaccacgtcggccatggcctcattcaccgcatcagcgaccgacccggtgacgtcgtcggtcataggctggccggaatcagcggaagccttatcagccgtatcatcattcgcgtcggaatcggacttcgctgaagcagcgtccgccgttttatcggcatcactggtatcactggcatcgccggatgccgaatcgtccgcgaattctttctcgaatccggcgagcgcggcctcaagctcctcgtcggagaagtgcgattcgtccggatcgaacttgtcgtcggccatcacagggctcccttggtgctgggcacgccgtctacacgcgggtcgatttccacggcgaagcgcagcgcacgggccagcgccttgaattcggcttcggcgatgtgatgcggatcacggccggcgagcacctgcatgtgcaggcagatgccggcgtggaaggcgatggattccatgacgtggcggaccagagagccggtgaagtggccgccgatcatgcagaattcgtagccttcgggctcgccgctgcacacgcagtacgggcggccggaaatgtcgaccacggccttggccagcgcctcgtcgagcggcacggtggcgtcggcgaagcggcggatgcctttcttgtcgccgagggcccgcttcagagcttcgccgaacacgatggccgtatcttccacggtgtggtgcacgtcgatgtcggtgtcgccgtgggcgtggatggtcaggtcgatcagcgaatgcttgccgagcgcggtcatcatatggttgtagaacggcacggatgtatcgatatcggttttgccggtgccgtcgaggttcagttcgaggtcgatgtgtgattcgctggtttcgcggacgatgtgcgcggttcttgccatcatgtctcctgtgtgattcgtcatattggattgcggcgggactcgaatcgcttcgggtctcgccgcaatcggaaagaaacgtcccttatgctgcttccactatacgaagcgcttcaacaagggcgttacggaaggtttccatctcctcgtcggtacccatgcacacgcgcagccaaccgtccggtccgaccacgcggatgagtacgccgcgcttcaggagctcgtcgaagatggcttcgcgcttgtcgaagtgcccgccgaacagcaggaagttcgagccggattcggccacttcaagcggctggtccttgtaggtctgttccttgagccatgcggcggtggcctcgcgggtttcgcgcagatgctcgacacggctcagctgttcatcggtgtgttcgaaggcggccagtgcggcggcctgggtcacggcggacaggtggtacggcatacgtacgatgcgcacgcagtcgatgatgcccttggatgcggctaggtagccaactcgcgcgccggcgaaggcaaaggccttgctcatggtgcggcttacggccaggttcgggtggtccttgatcaggctcacggcgctcggggtgccgggcttgcggaattccacgtacgcttcatcgatgacgagaatcgggtgcacgccctcacccgcgccggccacttcggcggtttcgcaggcggcgagaatacactcgatatcctccatcggcaacggggtgccagtcgggttgttcggactggtgagcagcaccatcgagggcttgacctcggcgatggcctcaagcaccttgtcgacgttcaacgtgaagtcggcgttgcggtgggcgagcttccaaccggtgaaggtgtcgcgagcgtactccgggtacatggagtacgtcgggtcggcaccgagtgcggtgcggcccgggccgccgaaagcctggaacagctggagcatgatctcgttggagccgttcgcgccccacagctcgtccacgtccagacgggtaccggattcacgggccaggtaatcggagaatgcctgacgcaattcaatgtgctcacggtccgggtatcggttgagtgtgggggcgatttcacgcacacgcttggcgatggtgtcgcatacggccgggtccggcgcatacgggttctcgttgacgttcaggcacaccggcacgtccagctggggagcgccgtacggctcctcaccgatcaggtcgttgcgcagcggcaggttttcgggaatcgagctcatcgcagaccggctcccttctcctgctcgcgcagggtggccttgtcatacggatccttgacgaagcgggagagcacgcactcgccgtgggcgggcaggtcctcggacaccgcgaaggcgttgatgcgggcggcgagagccttgaggccttcctcgtcgtattcgatgacttcgaccggcttcatgaacgtgtgcacgccgaggcctgcggcgaagcgggcggtgccgccggtgggcagcacgtggttggagccggacatgtagtcgcccagcggcaccggggagaacgggccgcggaagatggcgccggcgttcttgatgcgcttgacgaccgcatccgcatcctcggtctggatctcgaggtgttcggccgcgtaggcgttggccgcgtcgatcgactggtcaaggccgtcggtcagcacaatggcggactgggtgccggacagggatgtgtggacgcgttcggcgtgctcggtcttcggcacgcgatagttgaggttctcctgtaccttgtccgcgatgccggtggagtcggtgaacagcacggagccggcaagctcatcgtgttcggcctggccaatcaggtcggctgccagcaggctcgggttggcggtcttgtcggcgatgatgccgatttcggtcgggccggcgaccgcgtcgatgcccacgaatgcggagacgagcgacttggcggtggccacgaagatgttgcccgggccggtgatcttgtcgaccgggtcgcacagcacgtcgccgtcctgcggctcgctgcccttggcgccgtaggcgaacatggcgatggcctgagcgccgccgaccgcgtacacctcgtcgacgccgaggatggcgcaggtggcgagaatggtcttgttcggcagaccctccgcatcatcgcgcgcaggcggggtggcgatggccagggattcgacgcccgcggcctgagccggcacggcgttcataatcacggaagatgggtagacggccttgcctccgggcacatacaggccgacgcgctggatcggaatccaacgttcggcgacgcgagcgccttcggccagatcggtgtagaagtccttcggcacctggttggccgccacggcgcgggcgcggcgcacggattcctcgatggcggcgcgcacttcggggtcgagcgtggtcagggcattctggatcgcttcggccggcacgcgcaggttcttcggacgaacgtggtcgaacttctcctcgaagtcgcgcagggcagcggcgccgcgctccttgacatcgtccagaatcggacgcaccagatcggtggcttcggaagtacccattgcggcacgcggcatcgcggcgagcagttcggcacgggacagtttctgaccacgcaggtcaatgattcgcatgatgttctcactcataaagccccatcgtaccaatgtgagggtcctaagcgtcgaggaacgcccatgttcacccgtatcgtgagattatcgtgcgtgatgtggattcgtgatgcaggttattgacgcacgccaaatgcccgagcggtctcatcgataatcggcatgtcatgtacggcgacgtgactcacttcggaccatcgcggaccaatggctaattgctcaaccaaggcttgcactgcgtcgctactgccttgtgcttccagctcaaccgagccatcgcggcaattgcgcacccagccctgtacaccaagtcgacgtgcctgagtcaccgtaaaataacggaatcccacgccttgcaccagtccggtgaccgctatatgtttgcggaccaaattcgctgattgcctcatgatgctcagttcctaatccatcgttcgcagcatcgggtagaggctcaggaatcgccggtatgcgtcggcatatgtgcgtgcggtgtcaggattcggctggtatacagtgcattcgcatactgattgcagcaggtctggtacattgaataccaacgaggccattgccactgctggcagaatatcggcattggcgaacacttcgatgggatgctccaacacatcggccagaatctggcaccacgcattttctctggctccgccgccaatcagggaaatctcgctgggtttggcgtcaaaactttccataccttgacgaatggagaaggccacgccctcaagcgcggcacgcatcatgtctgccttggtggtgtctggatcgaggcctacataggccccgcgaatattcgggttcattacggggaaccgctcccctaccagatagggcaggcacatcacaccgttggagccgggtttggatgtttcgataagctgatgtgcttccgcgtaatcaccatcggcgaatacgccggtaacccatttatgcacgtcaccggcgttgaggaatggcacggcattcacgaagacttcttccacaccaaatgccagattcgcagcaccgggcttgccggtgaacggttcgggcgaaacggtggcgatccaacctgaggtgccgatattgatgttgtattgaccagggcggctgacaccgctggccagcgtggtggcacccgcatcgccaatgcccgcgtataccgcagttccggcggagaaaccggtgcgttgtgcagcggattccgtcactgtgccaatgttgtcttgcggattgtgcaggtgtggcaacatggccatgtcgattcctgcggcctcgcacaattcggcatcccattggccattacggatattcatggcaccggctgtggaacaagccgccacatcgcccacgcattcgccggtcaattgggcgatcaagtagtccttggaactgatcaatacatgacgaatgcgcgcgtacgtttccggctcgtgttcacgcagccacatcaacttgggcaacggcaagcagccttcgagccggttgccaacggtgttcaggaaacgttctactccaccctgatatgtcttggcgagttgcttggcctgttcctcggctcggccatccgaatacagaatggcattgcggacgggattgagctcgccgttcaaagcaatcacatcctgcatctgaccgctgaaaatgatgccacgaatgcgagtcacattgaattctgactcggattgccgcgcctgctcaatcatgtgcctggaggccgagcagaaagcttgccaccattgatcggggctctgttcccgatagtcgccgttgataataaggttaagctcactactcgcactggctacgatacggccttgcctatcaaccaaggcacccttcaacgccgtggtccctgcatcgaatgcagccacatattcctctgccacgtgctctccccttcaatctgggtcgtgattctactggttattatcgtagccgcttactcgttgcattcattaggtcgatttcacgttcattaggtcggtatgccgtaagacggctcttcaggaatggcgtaatgactgggttctgatgccgaagaccctggacccattgacctaatgaatgcaataatgacctaatgaacgagaatcacgccatcattacgcaattctttgcccgcgaaacgcggctcattgcatcgtcttgtttctaaaataggaaattgaatgaacactacgaatagtgaggcattatggcaattcaatcgacaattatgctgaacaacggcactgtcatcccgcaggtgggcttgggcgtattccagacaccggatggtgatactacagtgaacgcggtgcagacggctctggagaatggctaccgccatatcgataccgcaatgatttaccgcaacgaagcctcagtaggtgaaggtattcgccgtgctggtgtgccgcgcagcgatttcttcttgaccaccaagctgtggaatgacgatattcgcgcacgccacggcaaggatgcattccaagaaagcctcgaccgcttgggcgtggattatgtggatctgtatctgattcactggccggcagacggctggcagcaggcctgggatgacttgcaggagatttatgcctctggccgtgccaaggccattggcgtcagtaacttccaaaagcatcatattgatgagctgctgacccacagcgatatggtacctgccgtagaccagattgagtcttctccgcagttcaccaatcaggaacttatcggacatctacgcgccaaaggcattcacactgaagcttggagtccgctcggcggtaccggcggcaacctgctgagcaacccagtattggccgagatcagtgccaagtacggcaagtcacctgcccaagtggtgattcgctggcacatccagcgcggtatcgtcgtgctgccgaaatccactcatgccgagcgtatcaagcagaacttcgaggtcttcgacttcaacctatcagtcgatgatatgaccgccatctccgccatcaacacaggcaagcgcaacggtgctgatcctgacaatttcaatttctagacctttatcggtccagatacgcaaagagggaactcttcgtcattggagggttccctcttctatatgctttcgattcggccacaccctaggtgcgagagcctatgtcttgttggtttcggatatagggaaagccccttggggcgtgtgctccgaggggcttcctgtacgtgtggtgcggcggcgtgctactctcccacaccctgtcgggtgcagtaccatcgccgtgccaggccttagcttccgggttcggaatggga

SEQ ID NO: 2409 - DNA, 4795 bp, Unknown
  R50_10m  MAG No. k141_9719
aatccggctcaatcgaacaggacgccgacgtggtgttcctggtccaccgccctgacttctacgacaaggaagaccgccccggcgaggccgacatcatcatggccaagcaccgtaacggcccgaccgaaaccttccacctcgccttcctcggtgccacgtccaaattcaaggacatgccgcaggactacaacagcaatcagggggtgtgatgatggcaagcaacgtttcacgcgatgtttcgcaagaccaatcgtccgtggtgcagacccgcaaaccgtggtatgcgttcgccaccgtggccgcaggccgcttcgtgcggtttgcatcccgcgtcaccaaacatggcggttcggctttgcccggcaaagtcgtagaaaagattgaccccggcttcctgacccgtacgctcgggcagttgccgcttggcgtggtattggtgtccggcacgaacggcaagaccaccaccacccgcatggtcgcctcgatgctctccgatctgggattgaaggtgttcaccaatccgaccggctcgaacttcgtgcgcggcgtggtctccgcactgctcaccgaagtcactttcggcggcaaattggacgcggacatcgccgtactcgagctcgatgaggcgtacgccgtccacttcgtcaagcaggtcaagccccgttatgcgttgctgctgaacgtgatgcgcgatcagcttgaccgattcggtgaaatcgacaccacggccaaactgctcagccatgtggctgcggcgactaccggcactgtggtactgaaccgcgaggacccgcgtatcgccgcgctcgccgcgaaggccccggctggcaccacagtgcgatacttcggcctcgccgacgatttgcgccactatttcccgtccgatgacgacatggccacgaccgtgtcggtggaaggtatggccgggccgctcccttcagtcagtactcccctcagtccgcttcgcggacagctcccctcggagaggggagcttccgcaggcacggcagaactccccgccgacgtgacacttaccgccgtgggcgaccacaaggccaccttccagatggacagccaggactacgccaccgacgtcaaacttgaaggcgtctacaacctgtacaacgcggccgccgcgctcgccgtggtacgtgcggtgatgcaagacaatgccgccgcatccaaggccaccgccgcagccaacgcctgcgccgtgtccgccgacgagctcatcgccgccgtttcccgcgtcacgccggctttcggccgtggcgaggtcatcgacgtcaacggttccccggtcgaactgctgctggtcaagaacccgatgggcttccgcctctcgctcgccagcttcgacccggccaacgcggacaccatgatcgccatcaacgacgaatatgccgacggccgcgacatgagctggctatgggacgtggacttcacctctttgcgcgcgtccggtgtcgccatggtctccggcgtgcgcgcctgggacatggcattgcgcttggggtatgaccaagtgccagtcgccgatacgaacaccgacctcgaacaggcggtcaccgcattcgtcaacgccaatcccggcacacgcaagcacatctactgcacctacaccgccatgctcaaaacccgcgccgtactgggccgcatcaccgaagtacgggacgctggcgtgggcaagtaaccaccctctagcgcccgcgcgccacctcccgcctgcaggaggacatggtgaggaataagacttccccttagcgggaagacatcgacaaggagaacgtgacatggccagaacaatcgatgtggtgtccctgtatcccaaagacatgaacatctacggcgattccggcaacgtgctgactatccgccgccgtctggaactgtacggttacgaaccggtcgttcaccagtacaatcaaggcgacgattggcccgaccaggtggaccttattctgggaggcggcggccaagacaccggccagaagaaaatcatcgacgacttctaccatcgcgccgacctgctgcgctcgcttgccgcagacggtacgccgatgctgatgatctgcggcctgtaccagctgttcggcgagtactttgaaaccgtggacggcacccgtctggatggcatcggcgttatcggtgcttataccgtgggccagaacgtgcgtatgatcggcaatcttgttgagcattccgaccagttcggcgatgtgattggctacgagaaccactccggccagaccctcctgcgcgaaggcgttcagccactcggcaccgtcgatcaggacggccgaggcaacaatggcgaagatcataccgagggcgcgcgcgtgcacaacgtgatcggcacctacatgcacggctcgttgctgcctaaaaaccccgccatcagcgatttccttatcgaaaccgccgtgactcgtcgttacggtacgttcgatacgtccgatcagacccccgaacaagccaaggagctcgcccggatcgatcaagtagccaccaacgcgcgcaaggctgccgccgaacgtcctcggtgaattctcggtgagtcctcggtaagtaccaatcagcgaaaaatcagtcgaaatcagtctgagggtctagtacattgccctgttgtttgcgctaggcttggtggtacgagacatggcaccaggccatgtcggacctcgaaggaggggtatcatggctgattttgatcttctgggtgatggcctgcgcaaggtcctgctggcgggcatcggagcccttgccaccggatatgagaagagcagcgagctcgtcgacgaactcgtcaagaagggtgagattacggtcgagcagggcaaggcgctgaacaccgagctcaagcgcaaggtgagcgagacggtggatgacgccaagaaggccgccgccgaagccggcgacaaagctgctgccgcagccgacaccagtgccgccgacaagcccgccgacgagggcaaggccgagtgaccaagcccacacgcactacgccggaatcagagtcgaccccgctttccagcagggtcgaccctattctgacgcctgcgaaagccgaacgtgaggcggcggcgaaccggtccgtcgacacgtcggacacgctcaagcgggccgttaccaaggcgactccgagcgtatccgacgaaacgctggcactgttcggacgcaggaacgatttcgccacgcgctaccatctgacgcgccgtggcaagatcaaacgactggggcagatcaccagaatcgtcgagcaattcgacgtgctgcacggcctgactccggtcaagatgcgcctcatgttcgaggcgctcggccccacgttcgtcaaagtgggccagattctgtcgatgcgctccgagattctgccgcaaagcttctgcgacgaactcgccaaactgcgcgccgacgccgacccaatgccgtattccacggtgttggatgtgcttgccgccgaatacgggcgtcccgccgacgaggtgttcgcgcatatcgatcccaagccgttgggctctgcttcactggcgcaagtgcatcgcgccacgctgaaaaccggcgaagatgtggccattaaagtgcagcgcccgggtgtgcgcgaaatcatggcccaggacgtctccatcatgcgctccatagccaaggccgccactaaggtgattcgcacctcacagatcgtggacctgaagggcgtggtcgaggagctgtgggacaccttcgaatcggagactgactttctgatcgaggcccgcaatctcgccgaattcaagcgtttcgccgcccgattcaaatacatggactgcccgacggtgtacgccgaactgtgcaccgagcatgtggtggtcatggagtacatcgacggcatctccgtctcccacccgggccagctcatcgacgccggttatgacttgaaggagatcggcaccaagctcgtcgacaattacgccacacagattctcgacgacggcttcttccacgccgacccacatcccggcaatatcctcatccggggcggccagatcgtacttatcgacctcggtatgaccggtcggctcgaccagcgcacccgtgcagtcctcaaagaaatgattttcgccgtcgccaaacaggattcgcccgctctggccgaggggttgctgcgatttgccggcaccgaggccgatccggaggactatcccgcgctattggccgatctggacgtgatcgtcaaggaattcggcaccgtggatctggccgaactggacatcgccgccttcctgaccgcgctgacgcagatggccggccgccacaacatcgaggtgcccagtacggtgaccaccgtcggccgcgcgttggttacgctcgaaggcttgctggacgagttcattcctgatgtgaatatgatcgaaattatctccgaccatatcgccacgtcgaaatcgctgaagaacgccaccaaagacgagatcaagtcgctgggcgttgaggggcatcaggctttgcatgccacgctcggcaccatgaccgaactcaagaccgtggcccgtatgctgacccgtggtcagttgcgcgtcaacatggaactggtcggctccgaagagccgttccagctgctttcggatatggcgaatcgtctgacgatggccctgattgtggtcggtttgttcgttggctcgtcgattgtctactacgccggcatgaagccgattatcttcggcattccggtcatcggcttcatgggctacgtcgtggccttcgcccttggcgtatggatcgtcatcgacatctacttaaagggccgcaaaaccaagaagcg

SEQ ID NO: 2410 - DNA, 7644 bp, Unknown
  R50_10m  MAG No. k141_9737
actcaggcctcgcctacggacagcccactgggctgtccgcttaacggctcagcacgggaggtcgccggatttgaggagtttcttgaagacggcgtagtcttcatcattctgttcggcgtagctgacggcgaatgaggcgatggcctgatcaaattcgtcggtgccacccatgtaattggcgatcgcgatcgaatcgccggttcgctcatagtcactaccatagtgccgtgccggcatgggcccgaaccatgcctgacatgcggaccggggcatgttgatgaaatctcgcgactcgcaggtgacaaacagtgagatgttaacgcccctcgtaacacggttatggaacgataggcgactatggataaacagcaggagtttgcgctgcgcacggtcgaagaacgcgacgtgcgctttattcgtctgtggttcacggacgtgttgggaacactgaagtccgtggcgattgctccggccgaactggaagccgcgtttgaggagggtctcggcttcgacggttccgccatcgagggcatgacccgcgtgtccgaagacgacatgatcgttcaacccgatcccgcgacgttccagatcctgccgtggcgcggtggcccgcaaggtaccgcccgcatgttctgcgacattctgaccccagacggcgagccttcgctcggcgatccacgtcacgtgttgaagcgtacgctcgccaaggccaaggacaagggcttcacgttctacgtgcatccggaaatcgagttctacctgttcgaaagccaggacgactggtccaaggccccgaccccgatcgacgagggcggctacttcgaccatgtgccgcgcagcccaggcatggacttccgccgcgccaccgtgaacatgctcgagcaaatgggcatctcggtggaatactcgcaccatgaggcggggccaggccagaacgagatcgatctgcgatacgcggacgcgctcaccatggccgacaacatcatgacattccgtacggtggtcaaggagatttccttggagcgtggcattcacgccagcttcatgcccaagcccctggccgacgcgcctggttccggcatgcacacgcacctgagcctgttcgaaggcgattccaacgccttctacgaggccggtcaggagttcaacatgtccctgaccgcccgccagttcgccgccggcatcctgtaccatgcggccgaaatctgcgcggtcaccgaccagtacgtcaactcgtacaagcgcctgtggggcggcaacgaggcgccgagctacatctgctggggccacaacaaccgttccgcgctgctgcgcatcccgcagtacaagccgggcaagggcaactccgcgcgcatggagttccgtgcgctcgacccggtggccaacccataccttgcctactcggtgctgctggccgccggtctcgatggcatcgataagcagatgcagctgggcgaacccaccagtgatgacgtgtgggagctcaccgacggcgaacgtcaggctatgggcattcagccgctgccgcgctcgctggacgaggcgctgaagatcatggagaaatccgacttcgtggccgacgtgctcggcgaacacgccttcggctacttcctggacaacaagcaccaggaatgggaggagtacaaccagcaggtcacgccttacgagctgaagaagtatctgccgaagctgtaatcgcaagcgttgcacatgtgccgaaccccgtcgatgattggtcatcggcggggttttctatagcgtgtcgtggtggtgggtagcgggcagaggtgggaatagtgttgtcgctgagttgatacgaaaaacgattgacgtaaccgacgaatcagcttgtagtacgagcgagagcactcaagagagcacccatgacgaacacacctgcgaacaccgcgcgcaccgaccgcttcttcaatctgccggtcaccatcctgatcttcgccagcttcatgctgggcatgagcgaattcgtggtagtgggcatcctgccggacatcgcatccggacttaaggtctccgaagtgaccgtgggtaatctggtggccatcttcgcattcgtgtacgcgccctgcacgccgctcggatccgcattatccgcccgattcccgcgctttctcacctatctgacgttgatgggcgtgttcctcgtcggcaatatcctgtgcgccttcgcgccgaactatccggtgctgctcatcgcccgactgctcatcgcctcggtgtccggcacgctggtggccatctccatgaccttcgcgcccgacgtgaccaccgacaaataccgcaccaagttcattgcttgggtattctcgggtttctccatcgcctctgtggtcggcgtaccggccggcacttgggtggccaatactttcggctggcgtgtcacctttgccttggtttcggtgctcaccgccgtgctgatggcatcgatggcagtgtctctgccacgcaactcacatccggcgaagatcggtttcctgaggcaattccgtctgttcttcgaccgccgcatccagctcggcgtggcggatgtggtctttggcgcagccgcctcctacgtcttctacacgtatctctcgccgatcatgcgcgacgaaatcggtgtgcccgaacgctatatcagcgtcggcttggtggtctacggctgtgcctgcctgtggagcaacctgtacggaggcaagctggccgatcggggcaggggggtcgagccgctgacccacattcgaccgatctactgcgtgcaggccgtctgcctgtgcctgctggctttcgcctcgctggtgccggccggcggcgcactgctgctggtggcgcttggcatgctcatgtacctgcagaattccgcttcccaggtgctgtatatggatgtggcctaccaatcccatcccggttcggtgaatctggccgcctccctgaattccatgtcgttcaacatcggcatcgccatcggctccgcggtcggcggcctggtcaacgacctccttggcctgacctggctcggcccggtcggcgcgattttcgcgctgctggcagccggcaccacgacactgctgcgtccgtacgtcagcccggtcggggaatgacgggtggcgtgacgcgcgggaacgaagggtttttcccgcatgtccccgcggcatgccttatccgccgattgccgtccattgataacctgctatccaaataaccgataaggccacagcatgtcatcctgctgcgaaaccttaatgttaggacaccggctgcagggggacccggctcacgggcgcccacctgcgcggattgatgattatcggtatgttcagcgtgaaaatggggatgacaatatgacggatgcgacggcgaaagccgcgccgaaggcggaaagacggcggcgcgttctccgttccggcgctcgctcatcgatagtggtcggcggcgccatcgtgctgttcttcgtgctgctggcgccgctggccgggccgttgtcggccatcaccggcaacgacccgtacgccgagcatcccgaggccttgggtgccgggtcggtgccggccggattcggcggcggcatcagtgcccggcactggttcggcgtcaccccgctgcgcggcgtcgacctgttctccatcgtggcgtacggctcacggatctcgctgggcatcggcgtcgtctcgtcggtcatctcgttggtcatcggcgtggcgctcgggctgctggccggctatttccccgggttggtcgatgcgctgatctcgcgcacgatggacgtcttcttcggcttcccgttcctgatcttcgcgatcgcgctgtcggcggtggtgccgcagggcttcccgaggccggtgctgctgacgctagtgctcggattcttcggatggcccggcatcgcgcgtcttgtccgggggcagacgctgacgctgagcaagcgcaatttcgccgtcgcgtccaaggtgatgggcgcctcgcctgcccatgtgctgtggcatcagatcctgccgaacctcatgccgctgctcatcgtcaacatcacgctgtcgattcccgggcgcatcggcgccgaggcgggcctgtcgttcctcggcgtcggcatgaacccgccgacgccctcatggggccggtccatctccgacgccgtgcagtgggccctggtcgacccgatgtatctgatcttcccgggcgccgccctgttcctgctgaccttcggcttcaacctgcttggcgatggcctgagcgacgccatcgacccgcgcaagggggtgcgtgcatgagaatcctgcaatacatcggcaagcgcgtggcgagctcgatcgtcgtcatcctgctcatcacgctggcgctgttcctgatcttcttcctgctgccgaccaatccggcgcagctgtcgtgcggcaagccgtgcacgcccgagcagctgcagcgggtctccgccttcatgggcaccgataagccgtggtacgagcagatgggcaattacgtggcgggcatcttcgtcgggcgcaccttcggcagcggcggcggcgccgtggtctgctcggcaccatgcctcgggtattcgttccgtctcaacgaatcggtgagccagctgatcctcgaccgcttcccgatcaccgcgtcgatcgcggtcggcgcggccgtgctgtggctggtcatcggcgtggcgaccggcgtgtgggcggccctcaagcgcgatacgctgatcgaccgcacgctgctcgggctgtcgatcgtgggcgtttcggcaccatcatacctgatcggcctgctgacggtgatcgccttttcgctggtgctgcagatattccccagcggcgggtacgtgaacttccacgacgaccctgtcggctggttcacgcatctgctgctgccgtggctggtgctggccgtgctcagcgccgccggctacaccagggtcacccgcacgcagatgattggcgagctgagccaggactacatccgcaccgcccgctccaagggcgtgcccgaatcggtgatcatcttcaagcacgcgctgcgcaacgcgctgctgcccgtgatgaccatgttcggcctcgatctgggcgggctgctcggcggcgcggtgctcaccgagaaggtgttctcgatgcaggggctcggctcgctgctgctcgattccgtgtcgaacctcgacctgcaggtgctggtcggcgcgacgatgttcgccgccgtgctggtcatcgtcgccaacctgatcgtggacatctgctacagcctgctcgaccccagggtcgcgctcggcacgaagtagtgcggctgcggccgcaacacgcgatacttgccggtctgctccacggaccggcaccgatagagaggaaaaccatcatgaagaacaacgcatggcgcgtattcgcggcgggggcttgtgccgcggtactggcgctgtccggctgcggcgcgtccaacgacaacgccgccaccggctcggcgagcggcaccaccgtcaagggcggcacgctgaacgtgctgctgtccagcacggagatggatctggacccggccaagagccagggtctgccgaccaccacgaacggcaacatcttccgccgcctgaccgcgtggaagatcaccgacaagggcgagacgaaggtcgtgcccgatctggccaccgacaccggcaagtcgagcgacgacggcaagacgtggacgtacacgctcaagaacgggctcaagttctccgacggcacgcccatcacctccaaggacgtcaagtacgggctggagcgttccttcgccgactcgctgaccggcggcctgagctaccacaagacgctgctcgagggcgcgcaggactaccacggcccgttcgacggccaggagctcagctccatcgagacgccgaacgacaagaccatcatcttccacctcaacgcgccgttcggcgactggccgtgggtcgtctcgctcgccgcgttcacccccgtgcccgacggcaagggcccggcgtccggctacggcaagctgccggtggcctccggcccgtacaaggtcgagtcgaacgaggccggcaagcaggccgtcttcgtgcgcaacacctactgggacaagaagaccgatccggtgcgcaccgcgggccccgacaagatcgtgttcaagatgggacaggacacctctgtggccgcccagtcgatcatgcagggcaccggtgaaggcaagaactcgttcctgtccggattcgtgccggccgcgcagctcgcgcaggcgcaggccaacccgaactacaagaagctgctgaccaccagcggcgacggcgcgctggaatacctcgccatcaacacccaacacgtgaagaacgcgaagattcgccaagcgctgcagtacgcggtcgacaagaaggcctaccagacggcttccggcggcgagatcgccggcaacttcgccaccacgctcattacgcccggcatcgagggccgcgaggactacgacctgtacaaggccgatccgaccggcgacgtggacaaggccaagcagctgatcaaggagtcgggcgagcaggccccgaccctcaagctcatcgccacctccgctcaggccgaaaccgcctcctcgatccagacgagcctcaagcgggccggcgtcaaggtggacatccagacactcaacgacgatgtgtattccgatacgctgaccaacgacaagggcgactacgatctggccatcagctcgtggcagcccgacttcccgtcgccctacgccaacatctccccgctgttcgactcctcgcagatcggccacggcaactacaacctggcccgttacgcgaactcgaaggtcgacgagctgatcaagaaggccaccgagaccatcgatcggaccgaggccggcaagatctgggccgaggccgacaagacgatcatggccgacgcgccggtcgtgccgctgatctattcgaagaacacgttcatccacggatcgaacgtgaccaacttcgtcatcggcaacttcccggcgtacccggactacacgcaggtctcgctcgccagcgcgaactgagccggcatccgcatccggcgcgcgccggcggcatggtccgctggcgcgcgcgccggacgcattccaacgcttgtgcatccaaggagcttccaatgagtgaaccacgcgcgatcgtgaccgtggacggtctggccgtcagcttcgacgagcgggaggtgacccacggcgtcagcctcaggctgttcccggggcgcatcaccgctctggtcggcgaatccggctccggcaagtcggtgacggcgatggcgctgccccgtctcgatccgtcggtggccagcgtgaagggccacgcgtacctcgacgacgcccttgtggatgacgggccggactccggtccgggcggcgacggcaaggacgccgccggccgcggcatcgatctgctggccgccgacgcgccgctgcaacgcatccgcggcgaatacatcggcacggtgttccaggaaccgtccaccgcgttcaatccggtgttcacgctcggcgtacaggtcgcggaatcgctcaaataccaccagaagcagctcagcgccgccgagcgcaaggccaaggtgctcgaacagctgcgcgaggtcgggctcgacgacgccgaacgcgtgtggtcgtcgtacccgcatgagctgtcgggcggccagctgcagcgcgtga

SEQ ID NO: 2411 - DNA, 3168 bp, Unknown
  R50_10m  MAG No. k141_9755
gatccggatgcgttcctgtgccgacaagtgggaatacactttcctcatgggcgcaacaccttctccagttagaacctgaacacttccaaccatagagcgggtgttgcgcttctatctagaacccgggttcggcccggggcaaaaccgaaaaacgtagaatgaaagggcaacgttccacctactgaaagaaggaacattatgacacttgcatttgttgtgccgggccttgatgaagcggccagtgagaaggccatcgccatcctgcagaaccgactgagccaggagcaggaggccgctctggtcctgaagcacgcacactggaacgtgaccggcccgaacttcatcgccgttcacgagatgcttgaccccgaggtcgaggccgtgctggctcaggccgacgagaccgccgagcgcatcgccactctgggcggcaccccggacggccgcgcggacgccatcgtgcgcaaccgcacgtggaagtcgttcgacgccgagggccgcgtgggcaccgaggagtatctcaaggcgctgatcgagtactatgacgccttcatcgccgacgaccgcaaggccatcgccgagctggacgagctggatgtgatcagctccaacatcatccaggaccacgtgcaggaactcgaaaagttccagtggttcatgcgctctcacctggcataagtaaaagcagtattccgtggctcccctcaaagaggggagccactttcgtctcacgtgaaatagagagtctccacatacataagttggaaaagtgtataaaactccccattttgaggttggaaaacgtagccaaaaccgcattcttatggttggaaaagtgtaaaatatgcgctataaacagttggaaaacgtgcccagcatagatgcaaggcctacaaatgactggagattctcatgctgcgaagaaaaatcgagacacagctggaagcttggagatccgcgccgaaacgcactgcactgctggtcaccggagcccgtcagattggcaaaacctatatcatcaggcactttgcccaacagcattacgaccatatcgccgagctcaatttcatcgagaaccctgacctcgttgcattattcgatcggccccgggatgccaaaaacctactgatgaggctggaactggccgtaaatacgccattagtacccggcaaaaccctgattttctttgacgaggtccagcgttgcaaggaaatggtcaccgcaattaagttccttgtagatgatggtcggttcgattacgcgctttccggctcgctacttggagtcgagctcgaagatatacgctcggtaccggtcgggtacctgaccgagctggatatgtatccactggatttccaagagttctgctggtcgcagcatatcggcaacgacgtattcgatatgcttgccgaatgctttgccaagcaccaggaagtggatgagttcattcatcaaaggctcatggagctatactccaaatatctggtcatcggcggcatgcctgccgcagtcgactcgttcgtggcaaacggcagcgttgcggacgtgcgcactatacaagagaacataaagcgtgaatatcgccgcgatatcagccaatacgcgcgcaaagaagaccggctgcatatccgcgctatctacgatttggtgcccagcgagttaaataacccaaacaagcgctttaccttcgccaaaatcgaaaagaacatgagattccaatcggttgcttccgatttcgattggctggtcaatgcggatgtagccgtcgccgcgtacaacgtggacgaaccgtgcacaccgttggagatgagcaaggaacgtaacctcttcaaactcttttacaacgacgtgggtctgcttaccggctcgtttctcaagaaaaccgcgctcgacgtactcgacggcaaccctgatatcaactacggttcaatctatgaaaatgcggtggcccaagagctacgcgctcacggatttgacctgtactactacaacagtaagaagcttggcgagctcgatttcctcatccaagaccgcaacgatcacgtgctgccgattgaggtgaagtccggcaaatcctacaaacgccatcgcgcaatggacaacgtgctcgcccaccctgaataccatctcaatacaggctatgtgcttggcccgtgcaacgtctcagtcgaagggaatgtaacctacctgcctgtatacatggccggcatgttccataacgaatgacgggccgcacacttagtcaacaagtacatgtcggtcagatggttcggactggtcagagggcccgctctgatcagttaggtcggtctgaacggactggctgggctggtcggcctgagtagcccgtttggaccgatccggttcgcccttgctggccttcacactgcttcagctccagctgaagttcgctgatgcgccgttcgagttcgtcgatgcgccgtacttgtggcgaagtgagactgaggggagcctacaaaatgctcacaggccgagggcaccggccacggccatggcctcgtgttcgggatcggcctggccgatgtgtacgttgacgtgaatttcgtcatcgcccggctcttcgagaatgtcggactgggattgcatcatgctcggcttcatgaagtggccttggcggtgggaaaggcgttccatcacctcgtcgaatgtgccctgcatgtagacgaacaccacgccttgacggcgcagcttgtcgcggtagatcttcttcaacgccgagcaggtgaccacggcgggctcgccggcggccacgcgctcgccgatccacgcggcgatggtgtcgagccaaggccagcggtcttcgtcggtgagcgggtgtccggcggccatcgagatggtggcgcattcggaccatgcgaacgaatccgatcaggccatcagccacatcaccggcactgaagcctgacccgtcatcgtcacagcaccacgcggcggttgaggtcgcggcgcagcgtcttccagccgggtaggtaggcggtcatgcggcgttggaatccggcgccatggccgctttcccacagatgcgtcatctcatggaccaagacgtattccaggaattgcggttccatcactcccaattgaaggttcagacggatgcggccggttcgcggcgtacacgatccccagcgcgaggccatgacccgtagc

SEQ ID NO: 2412 - DNA, 10426 bp, Unknown
  R50_10m  MAG No. k141_9788
atctcactggcctccaacagtccggcaccaaccagctgaggcaatagcgtgcgtgcgaacagggcgatgtcatcgccggcaatgacctgcccctcgccatcgggttcaaacaggtctcccaatagtcctcgcaacggaatcaatcgtttcgggcaacggacgaatcggcatcccgctgcgcttttacgctgagaacccgccatcatggcggataccgcaccggccggattagtggaggcgagcaacagccatacatccttgccaccatcaatcacggtttccaccgccggcactccggcaagcaggtatccggcatccggaccatacgtattgaaatcacgccgcgcaatgcgcatgagaaaatctggctcgccaccatcaaccggcaccgatgcaggctgcccggagaaccatgtgttcaacacgagctgtacgcctctgccctcacgtacggacagcaaccgggccacttccggtgctgaaagtgtcaggtgacgatcgatggcgatatgcccgtaataccggtcctgctgctcggccgcacgacgcacggccatcgcgtcgtcaaggaagcccagcagtgggcgcgaatcatcgtcgaacatatccggcgtatgggtaaaggcaagcttctgcccataatccgtatagtcgccgttcgccatggtaagcacaaattgcggaatcgatttcagtacatagctggacccattggaagtcgatccgatcttgaactccacgctccacacgccatcgatgaaactcaatatcggaacaagctgcacctgccccaagcccacagtctcactatcgccctgatacccgccgcctcgggtgccggcacgagagccgtatccgctattcgtacgtcgtccacctgcgccatttcgtctttttgcagtatcgaatcggcgcatgagcgcattgcggcgacgcgctttggcttgagcatcttgcctatcgacgtgctccatatagtcgatcagcgtccgagacggcctcacagccccggcacggtacccttcaaaacgctgcggatcatcgcagaatatgaaggcgagcgcaatcatgtgcttgcacatgccaaagccacggccgtaagccgggcatgagcacttgccaccgacggcttctcccgtatcgaggtcgaattgcacgctggtacgatacctactcgatgggctggtggtgccacgtagaataccgtcaagctcggcatacccggttcgatgattttcgctgtataccggattgataaccatggtggccgctttgcgcgcaatgctacgggcacgagcgagcacggcattcgacgatgacgattccacatcgttgcgtaacgcaaggatagggacggcatgggcttcggcacgcttcgcagccccggcgaaatggccttcgtcctcatcgtcgaaccatacggaacgtccttgcctgaaacgatagggcatcaccgcatcggcggcggacaaactgtccgttccaccaaacgttacggctctactgccggcagcgcctgcgccaccaagcattccatctgcctcgccagagataccgcctataccgctgctcttgccggcaaagagacccctgtcctcattagtgtcatctgtgtcatctgcgccataccgatcatcgtcgtaatcggcaccttcgtcgcctccccttttccaaggattgcgacggcgcaacgcatggccccaggaaacgccggaatcatcatcctcataaggcaggaggtcatcgtcatccgcattatcgggaacatggccaaatacaccataccctttgctcatgggcgagcctcctttccagcgaatgcatttcagtccaacacttctatcctagacgaggcgcgcggtagccttaatgtatggatgcagacaagccggcgcaacgcaaatcctatgcagggaacaccaccctcgaaatcttcgaggtgctgtggcgtcacagctactttggacatggcctgaccgtgcggcaaatactcgatgaacttgcccgtaaacaccagctggaagatccaagcgagctgccgaccgagaaaaccatacgaaatcagctcaaaaagcttaccgccacggaatttctcggcagacatatcgggcatctcaccgaaagcgaccttgccggcatcgaatgcaagaatccacaacccggctggtatcttgacgcattcctatccaccgccgaaatgcgactgctgctcgacagcctcaccttgtctcgcatcagcctcgacaccatggacgatctcatcggtaaaatccgcgaactcgcaggtgccgctgggcaagcagtaggttatcttgagcacgtggccacctacacgcatatcaacggcgagttcctatccaccatcgaccaactgaatcaggccattgaagaaggccacggcgtaaccttccaataccgtgattacggcccggacggcaccctgataccgcataaaagccgtacgggcgcaggtcgaattacctacaccgccgacccttaccagatggtgtacaagaacggacggtattacctcatctgccatctacatggcgaggataatctccgcattttcgtggtcaaccgaatcgccaacgtcagcgccaaaggcaggaacggcacagttccactggaaaaaccagcgccggctgattttgacgcagtgaacttcatgcgtcaccgcccgtatcccgtagccgatgccccgattcgcatccgcatggccgtacgagacgaatccatgctcaacaatgtgttcgaatggttcgacgaccctcagatcaaacattcgccggacggcacacagttcgaagtcatcgtcgatgctcccgaacgcgccgtgttctggtgggcattgcagtattcctgggatggccgcgtagtgattcttgagcccgattcgctcaagcgcaaactctatgatgccgggcgtcgcatggccacagcctatgctcccgaatgatgcagcatcacatcgcacacctccttgccgagttgttcaccagcgaatttcaccggagaacctatcatcccatcgccaatcacgttcggtaattttttaccgaacaactcgatttcaagccattccacgaactatggcccccgcctagccgtacttgacgctaaggtggaaccatcacatgccgcgatgcacatgcaacgcaaacgcaacgatatgtaaggagcaactatgagcgaagagcgtaccgcatggggatggggtctggccagcgtagacgccgccggcaccaccctagacgtctggtaccccgaactgaatctcggtgaggcaccggccgaggccgatcgtccaaaccacaatttcggcactctggctcacgatgaagccgacgcccgtggcatccgccgcgtgccggtattcgtcgtcagccagttggacgagccgatcagcaacgccgcggacgcttacctgaaactccatctgatgagcatgcgcatggccaagccgaacacgctgaaccttgacggcatcttcgcccaactcgccaatgtggtgtggaccaactacggtcctttcgccgttgaggacttcacactacgcaaggccgatgtcgaacgcgcctccaccgaagccgctctcgctttcgctgctcaggccggactgcctgccgcagctcctgccaccaccgtcaacgtgttcggtgtggataaattcccgcgcatgatcgattacgtagtgcccaccggcgtgcgtatcggcgacgccgaccgtgtgcgcctcggtgcttacctatcttccggcaccaccgtgatgcacgccggattcgtgaacttcaatgccggcacgctcggcgtctccatggtcgaaggccgcgtttcgcaaggtgtggtcgtgggcgacggttccgatatcggcggcggtgcctccatcatgggcaccctctccggcggcggcaagctgcgcaactccatcggcgagcactcgctgctcggcgccaacgccggtatcggcatctccctcggcgataactgcaccgtcgaagccggtctgtacatcaccgccggcaccaagatcagcatctgggacaaggccaaggccgccgctggcgaaccgctggaagtggtcaagggtgctgagctctccggcaaagacaacatcctgttcatccgcaactcggtgaatggacgtatcgaagcccgctaccgcaaggtgggaattgagctcaacgccaagctgcacaagaactgaaattgaaataatggagcgttatcttcgttgctcctcggtcgacgtacttccgtacgccttccctcggtgcgcttcgataccgcacacattatttcaatttcagaactagcactgctcgttcttatgcagccgtcacagcatagctggtttgcgctgtacatatagaaagcgcttcactggaatctccagcgaagcgctttctcaaaccaataatcaccgctcgtccatcggcacgaaatcgcgctcgaccggaccggtgtagacctggcgtgggcggccgatcttggtgttcgggtcggccagcatctcacggtactgcgcaatccaaccgggaatgcggcccagtgcgaacagcgtggtgaacatggccggatcgaagccgatcgcccgataaatcaagcccgtgtagaaatcgacgttcggatacaggttgcgcgatacgaaatactcgtcgttcaacgcaatatcctcaagctcggtggccacatcgaacaacgcacgctcgtcggacggcagtttctgcgtatcctcgcgctccatgattttctcaagatacttcttggcaatcgccgcacgcggatcatatgacttatacacacggtgaccaaggccggagatcttctggccattctccttggcatccgtcacgaactcggccacagacttgccggaatcacgaatcgccttcagctggcgcagtacggcctcattcgcgccaccgtgtaacggtccggacagggcattgacgccagcggccaccgccgaatacagattggcgtgggcggaaccggcgatacgcaccaccgaggtcgagcagttctgctcgtgatcggcgtgaataatcagcaaacggcccaaagcatgcacatacaacgggtcagattcgaacggctcgtacggcacagcgaagcacatgcgcaggaagtcgtctacatagccgcgcgcgtaatcggggtacagcatcggctcatcgcgacgacggcggaagatgtacgacacaatcgtgcgggccttggccatgatgatcttggcggcctcatcgagctggtcggtgtcggagatatcggtggtgtccggatagaacgtggccagcgcattgatggcggaggcaagcacgctcatcggatgagcggagcgcgggaacgaacccatgaaggtacggaagtcttcgccaaccatcgtcttgtggttgatgtccgcgcagaactgctcatactcagccctgctcggcagctcgccgtggcgcagcagccacgccacttccagaaaatcggagttctcgcacaactgctcgatggggtagccacggtagcgcaggatcgaatgcttgccgtcgatgtaggtgattttcgattcgcactgtgcggtggtgaggaatccggggtcgagcgttacccagccgtcattgcgcagcttggaaacgacgatgccatccggccctgcactagccttcaccacgggcaggttgaacttgttcgaatcgacatcaagttgtgccgttgccattcgcgcaccttcctcttcatgaaccacttaccccaaacattaacgttcacgcgttcgcgaacactagtgttcggtactctatgtcttctgtgttaccgctggcgaatgccggtcgatacacgaaagccgaagtgcgctcatgctatcaaagcaaacgcacttcggcttgttacgtctcgaattcgcgggaaaaccgcaaacatatagacggttgatgagatgccgatcgcccatcacaggccaatcaggcacccgccatacgccaaacgccaatcagaggttggtgcgatcggtgaagatgatcgggccgttctcggtgatggcgatggtgtgctcggagtgggcaccgcgcgagccgtcggaggcacgcagggtccagccgtccttcggatcctggaagatctcgtcggtggtcttgaggaaccatggttcgatggcgatgaccaggccttcgcgcagcttgtagccgtggtgggcgcggccgtcgttcggtacgtgcgggtcgccgtgcatgatgtggcccacgccgtgaccgccgaactcgaggttgatcgggtagccgtattcgcgcgcgatgtcgccaatggtgttggagatgtcgccgagacggttgccgggcttggccacgtcgatggcggcggcgagcgcttcctcagtgcacttgatgatgcgcaggtcttcggggtccgggtctttgccgaccacgaagctgacggcggaatcggccacccagccatccacggagatggcgagatcgagggagacgaggtcgccgtccttcaggctgtaatcgtacggcacaccgtgcagcacggcgtcgttgacggaggtgcagatgtagtgggcgaacgggccggtgccgaagtcaggagcgtagtcaacatagcaggattcggcgcccttgcggtccacgatcttcttgtggacgaactcgtcgatttcgagcagattggtgcccaccttggtggtctcctgcagttccttcagaatgccgccgacgaaacggccggccggcttcatttcctcgatttcacgaggggtcttcaattcgatcatgaggttctttctaccttgttgagacttgttctcaactctagcccagcccggggtcaaccgccagagcatcacccgtggtctgcctagggtccgctagtagcctatcaacggccaaggccgagaaaaagcgcccggcagatacataatctgcacgggcgctttggattgattgtccggagattgattgtctggagcgcgagattacttgcgacgcttgccgaaagtgaacgcgcgaatcaccgaagtaatccccatcaccaccatggcacatccgccgaagataatcatgaatacggcggagctcagcgggctcatcagcaccacgaagccggcgataatcgagatgatggcataggcgatggcccagccggagcgcgggatgcgccatgattcgactagagccatcacgccttccataatccaaccgaaaccgaccatcagggtgatgagtaatgccaaggtctgaccggtcataccgtagtttcgtacgactacgacgcctccgaaggtcagcagaatgccgacgaacacgtccagcacacgccagccgcccggcagacccggctccacgagagcgctgacgatgcgcaccacgccggaaatcacgaaatacacgccgagcaacaatgcggccaaagccagcgtcttgttcggcaccaacaacagcgcagcgcccaaggcgatggcagccacgcccaccacgccgtaaatgacgcgaatcttggtcttggccttttccggcagccattcctcgatcaggtggaatggactgaaattgccgacataccagttggtctgctgccagccgggttgactttgatcgccccatggaccattcggctgcccgtccgcttggctattcgattggccgtccgcctgataccgccgaccgtccggaccccatgctggctggccgttcgggccatagttcggattgtaggcgtacgggccgtagtacgggttctggttcggtccgccttgtggctggccgttctgcgcctgctgattctgagtgtcttgcgctcccggcgcaccttgcggaggatattggccgccatgattgctgtcatacgcgccatactgcggttggcccggttggcccgccggattcggctggctcggctggctctggttgggctggcccgtctggccattccactgaccctcgtttggattgctcatcgtaactccttaactcaaggtccatattcaggttccacataccatgttaggcaagttacctaatttgaaccatcactacagttaggcaatccgtctagttcactgacagcgcaatacccataacgcaatatctgcatcaccaacgcttctcccccgccgcgattaggcttagggccatgaccaacgaaaccgaaacgctgacgtcgggcatcgacccggcatcgttctcctccgtcatcaagccgaccaatgacctgttccgctacgtgaatggtccatggatcgacacctaccgcctacccgacgatcgttcgcgctacggctccttcgacaagctcgccgaagacgccgaaaaccaagtgcgcgacatcctcgacgccgacgactgcccggccaccaaatcgcaggctctgtatcattcgttcctgaacaccgacgccatcgaggccgccggccttgacccgatccgcgatgagcttgacctcatcgattccgccatcgacaaggccgctctcacgcgcgtgctcggcaccatcaacccagccggcggccccgacctgttcggcttggccgtttacggcgaccccggcgacccggaccgcaatatcgcccaccttgagcaggccggcctttgcctgccggacgaagcctactatcgtgaggaccactacgtccccgtgcgcgaagcatacgtggcaatggtcgccacccagctggtgaacgccgggtacgcgcccgccgccgaatccaacggtggcgatgaactgccggccaacaccggcgatgacgagagcaatgctcccaccacggttcccagcgaagccgcgcttgatatggcccgccacttccttggcgtggaaacgaaaatctccgcaaacccttgggacaatgtggccacgcgcgattcggtgaagacctacaaccccaccgattacgccgatttggccgccacgctgaagaacttcgatctcgcttcctggatcgacgcctggcagaccgcctatgacgccaccaaggccgccaaggctcagccgatcgatttcaagtctgtgttcgcgcgcgtcattgtgcacgagccgagcttcctcactggtcttgatgcgttctgggccgaggctgatctgaccgaccttaagctgtgggcccgtgttcacatgattctgggcttcgcctcctccctgtctcgcgacttcgacaccaccaactttgacttctacggcaaggtgctctccggtgccaagaagcagcgcgatcgttggaagcgcgcggtgagcctggtcaacggcgtttgtggtgaagatgtgggccgcgaatacgtgcgcctgcacttccccgaaagctcgaagcgccgcatggaagagctggtcgccaatctgattgacgcctaccgcgtgtccatcaccaattccgattggctgggcgaggataccaaggccaaggctctggagaagatctccaagttcacgccgaagatcggctacaccaaccactggcgcgattattcggcgctgagtgtctccgcggatgcgctgcccgccgagaacgccaaggccgcgaacctgtacgagaccggctaccagctggccaaggtcggcaaggcggtcgacaaggacgaatggctgatgaatccgcagacggtgaacgcctactacgagccgagcatgaacgtcatcgtgttcccggccgcgattctgcagcccccgttcttcgacccgaaggccgaggatgcggcgaattatggcggtatcggcgcagtgatcggacacgagatcggccatggcttcgacgatcagggttcgcagtatgacggcgacggcaagctcaacaactggtggaccgacgaggatcgcaagaacttcgaggcccgcaccggcgcattgatcgcccagtacaacagctttgtgccgctgcagctggcagagaagtacgctgacgagtctgataaggcgccgcacgtgaacggcgcgctgaccatcggcgagaacatcggcgatttgggcggcgtgaacatcgcgctcaaggcgtatgcattcgcgctcggcaaggcggcaggtaagcccgacgccgaagaagacggctcccccgccgccatcaaggcactgctcgataccgcccccgaaatggacggattcaccggcctgcagcgcttcttcctgagctacgcctccatctggcgcaccaagaaccgcgacgagctggccgaacagtacctgcagatcgacccgcattctccagccgaattccgcaccaacggcatcgccagcaacgtggacctcttctacgatgcctttggcgtgaccgaaggcgacgccatgtggctcgcgcccaaggaccgtgtgagcatttggtaatccccgttatgtaagagaaaaccgctgtgcttgcctcgattacaggcgaacacagcggtttttcatgatgtatggttggcactcagaattcggattcgccgggatcggaagattcggcgaaacc

SEQ ID NO: 2413 - DNA, 2917 bp, Unknown
  R50_10m  MAG No. k141_9944
gcttggtcacattctccgtttcaccggtcgcgtcgacttcggcaacgccggcaacatcggaagcatcggtgacgtcaatgtcatcgacgtcgttcgtgctgttgttctggtcggtcatatcactccttgctggcggtatcatcgccttcgacgggctcgccgtcagtttcctcatgggtcctgctattttcctcgccgccctcgacgtgcgccggttcgacgacgatggtggacaccttcttgcggcgtccggcggagtccacggcggtcagtcgcagaccgcgcgtcacggccgaagcaccgacaatcggcacgcggcccagaatcttggtcagcaggccgtacacggtatcgacatcgtcctcatcaatgtcgatctcgaagatctcctccagatcggcaatcggcgtacgggcgggcatcttccacttgttgtcgccgattttctccggctcggtacgctgggtgcggtcgtgctcgtcttccagctcgccgacgatctgttcgatggcatcctcgatagtcaccatgccggcgatgccgccatactcatcgaccaccacggccacatgttggcgggaacgctgcatctcatggaacaggtcgtccaccggcttggattcgggaacaagcagcggctgccggacgatggattcgaccgtgcgttccatggccgccgggttgaaggcggtggcgcgcacggcgtccttcaaataggccacgccgatcaggtcatccacatcctcaccgatcaccggcacgcgggagaaaccggagcgggagaacagtttcagcgcggaagacagtgtggagtcgcgctccatgcagatcatatcggtgcgcggcaccatgatctcgcgagtcaacgtatcagacagggtgagcacgttgcgcaacatttcggagacttccggatcgaagtcgttggactccaccagtcggtcgatggcggccttgccctgctcgagctgaatcttctcaagctcctcgtcgtcggacagatcggagtccttggagcggcggcccggccccttggaaccggacttgtcgccaccgatgcgtgcgaacggcgtgagcttggtggccaacgacacgatgcgcgagttggaaatcatgatgtcgaccggcttggtcatgccggcggtgcgcgggcggaccagtacggagaccacggctacgataatcgcgaacaggaatccggcgagcagttcaacccacagttccgcaccccacagggatgcgatggaagacaccagtacgccgtcgagcacattgcaggcgatgcggaagaacgcacagctgccggcggtggcgtaacggtcggcgatgagccgttgcacgcgatgaatcttgtcgatcttcttcatcttgaggaactggcttgcttcggagtcggtctgcacctcgaggatgagattgttgaggctggctcgcgttacgcgggccacggcgccttcagcggcggccatggtcagcgaaagccagacgaacatggccgccacaagtacgagaatgacggtgacggcgatcagcgtggtactggaatactccataatgttttttcggtgtccttgaatgtccttgaacggtatagaataatccgaatttggtgtgattgatttggaagtttatttggaatcgaggtcgcggccagcaccgtgcgcggcgtcgtacagggccagcgcgtcgggtgtgccggcgggcagcgtggcctgcacgttggcatcgtggcgcagggcgaagaaggtgagcagcagctgtcgctgcaggccgaacatctggcgctcctgctcgggggtcacgtggtcgtagccgagcaggtgcaggatgccgtggatggtgagcaatagcatctcctgcatggtgctgtgcccggctgcagcagcctgttgggcagcgacccacgggcagatgacgatgtcgccgagcactccttccatcacggttttgccgtcgcctgggcgcagctcgtccatcgggaagctcatcacgtcggtcgggccttcgaggttcatccaacgcatgtgcagttcggcgatgggatcgggatccacgaacatgatggtcaggtcggactgggtgctcacgcgcatctggtcgagtacccaaatacccaaatcggagaagaccttggggtcgatgacccactgggtttcattggtgacgtcaacgctcatcgtctgtctcactttggttggttgaatccgcttgctggcgggcatcgaagtcggtatggttgcggcggcccttgcgttcgatgtcgcggtggtcgccggcgatggcggagtgacggtcgtaggcggccacgatctggccgaccagctggtgacgtaccacgtcctcggttttgagatgcacgaatgcgatgtcgtcgatgccgcccaggatgcgttcgatggtggccagtcccgagcgcggcacggtaaggtcaacctgcgagatatcgccggtgatgaccatcgtggtgttgaagcccagacgggtcaggaacatcttcatctgctgttcggtggtgttctgagcctcgtcgaggatcacgaacgcgtcgttcagcgtacggccgcgcatgtaggcgagcggcgccacttcgatggagccgtcgtccatgtaccgcttgagctggtcggcgccgagcatgtcgccaagcgcgtcgtacagcgggcgcagatacgggtcaaccttgtcgttcagcgtgccgggcagaaagccaaggctttcgccggcctccacggccgggcgcgtgaggatgatgcggcgaatctgcttgtcctggaaggcacgcacagccttggccacggccagatacgtcttgccggtgcccgcaggcccgacgccgaacgtgatggcatttttgcggatggcggcgagatattccttctggcccagcgtcttggggtggatgggacggcccttggcc

SEQ ID NO: 2414 - DNA, 3253 bp, Unknown
  R50_10m  MAG No. k141_10025
caccggagcggtttcgggaccggtcaaacgggtcagagctttggtgatcttcatagcctcagtgtatccaccgtttgggcgacaataatgccctgatgttcgcccatcgagtaacgtcccataagtaatgcatatagcgcagcggccatgccacgtgttctgatactctacgatgacacggcaagggggccgtggcaggtatgttcggcccccgaaatcgtacatgggcggctaagaccgtttatgcgcaggagaagaaacgagaagcaaaggaaggagcgcgtccaatgacattcgattggtcgttcgtgcagcgttacgcgcctttcttcgtcaacggcacattgatgaccttattcatatccgtgtttggcatattgcttgccatcgcggtgggtctggtctgcgctggcgtggaaatcgcgcgtatcccggtcgcccggcaaatcgtgagaatctacatcgaactcagccgcaatacgccattgctggtacagctgtactttctgtacttcggcctgcccaaactcggcgtagtatggtccgccgaaacctgcgcgatagtcggcctcggattcctgggtggttcctacatggccgaggcgatgcgcggcggattggaagcggtgcccaacgtgcagcgcgaaaccgcatacgtactgggggctgacctccacgcaaaccatcacccgagtcattctgccgcaggcggtgtccaccgccattccaggcgtagtggccaatgtgatcttcctgttcaaggaatcgagcgtcgtctccgccattgcgctcgccgacgtgatgtatatggccaaagatctgatcggcatgtactacagcacctatgagtcgctgttcatgctgattgtggcgtatctggtgattctgctgccgatttccatctttggcacatggctggagaggagattcgattatggacggcgctgaaatactgctccagccgggcgtattcccacgtctgttgcaaggcctatgggtcaccgtgtggatagccggcgtatccgtaggcgcgtccatcccggtcggcctgttggtgggctggctgatgacgctgaagaaccccgtgatccgggccgcgatgcgcatctacctcgacttcatccgcattatgcctcagctggcgttgctgttccttgcctactacggttttgctcgatggttcgattggaatctcgatgccaccggtgcctgcgtgctggtgttcatcctgtggggaggcgccgagctgggcgatctggtgcgtggcgcattgcagtcgattcccaaagtgcagtacgaatcgagctacgtactggggttgagcccgtggcaggctttctcccgggtgattctgccgcaggcagttcgccgtatgctgccggcatccgtgaacttggcgacacgtatcgtcaaaacaacatcgttggccgtgctgctcggtgtggtcgaggtcatcaaggtcggccagcagattatcgacgcgaaccgattccaattcccgaccggaaccttgtggatttatggcgtgattttctttatgtacttcatcgtgtgctggccgctgtccattgtggcccgccgactggaaaagaggtggtcgaatgactgaacccgaaacgacctgcaagggtttcgaggtggatcatctgatcaaacagtatgcgaatgccgacaagccggtgctggacgacatctccttcaaggtggagcatggttcggtgctcgtggtgctgggtccttccggctcgggcaagtcgacgctgctgcgcaccatcgccggtctggaaccgattcagggcggcacgatttccatcaacgatcaggtgatcgataccggaaaacccggcacggaacgagccggacgatccgaccggtccagtgaactgcgcactcgtatcggcatggtgttccaaagctacgatttgttcccgaacaaaacggtgctcggcaacatcaccatggcgccggtgctcgtgcagaagagagacaaggccgaggtggaggctgaagcaatccggttgcttggccgtgtgggacttgccgatcgcaaggactcctggccgcacgaattgtccggcggtcagcgccagcgtgtggccatttgccgtgcgctggttctgcatccggaagtactgctgctcgatgagatcacggcggctctcgaccccgaaatggtgcgtgaagtgctcgacgtggtgctcgaactggccaagtccgggcagacgatgcttatcgtcacccacgagatgcagttcgcgcgagccatcgccgaccacatcatcttgctggatggcgggcacatcgtcgaggaatcgtatgatgcgcaggcattcttcgaacacccgcaaaccgaacgtgcgcagcagttcctgcacaccttcgaattcgagtgattcgattgtgccatatcgacgtacttgagaagaaatatcaataacaacaagagaaggagaactcaatgagtatcaaggttgggagatcattcaaagcactgattgccgcaggtgcggcattggtaatggcggcatccatggccgcatgcggtccgtccgcaggcaccccgagcgaagcgaagtcctctgacacaggcaccagctccagcgccaacgccaaggcccgcagcctcgacgagatcaagaagaacggcaagatcaagattgccgtcttctccgacaaggcaccattcggctacgtggacaaggacggcaagtaccagggctatgacgtctacttcgccgaacaactggccaaggatctgggtgtgaaaccggaatacacgtcggtcgatccggccgcccgtgtggatgtgctcacctccaacaaggtcgatctggtgctcgccaacttcaccgtcaccgaggaacgcaaggagaaggtcgacttcgccaagccgtacatgaaggtggcgctcggcgtggtctccccgcagaacgcgccgatcaccgacgtcggccagctggacggcaagaccctgatcatcgccaaaggtaccacggccgaaacctggttcgagaagaacgcgccgaacgtcaagctgcagaagtacgaccagtacgccgatgcctacaacgcgctgttggacggccgcggcgacgccttctctaccgacaacaccgaggtgctcgcctgggccaaggccaacaagggattcaaggtcggcatcacccaccttggtgacgacgacaccatcgccccagcggtgcagaagggcaacaaggaactgctggacttcgtgaacgatgagatcgtcaaa

SEQ ID NO: 2415 - DNA, 9162 bp, Unknown
  R50_10m  MAG No. k141_10169
ccgccgaactgcaccaccagcacctgaagtgcgaacatcagcgcgaacacgccgatcatcaccttattgcgtagcagattggcgaacaggctggcgttgcccagctcgcggctgttgaaggcgttgaacagctggaatactacgaacagcgtgaacagaatggtcgactgctgaacagctggaataccacgaacagcgtgaacagaatggtcgactgctgttcggcggtgccgcccatgaagttcgtccagcttcgcgagcttctcctgcagcggcgtcataccggtgttggcggctttggcgctcggcacgctttattgcggtttgggccgagcccttcgccgcaatgctgtctactccctcatgggactattcagttgcaggaacagaatctgacaagccacatggattttcccattcgccggcagcatggcgattcccgccttcctagaaaattcaagcaacacgccgttggcccattgccggatgttcaaccgagattcgcatatcttgactcatacggcaaaactgttatatttgatgtagaacaaatagaacagttcttgagaggggtggaattgaccgtgattgtggaaatcgatcagcgcagtgacgtgccgatttacgagcagctgcacaggcagctcatcgcagccatcgcgggcgatgagctgtcgccaggtgactcgttaccgtccgtgcgctcgctggccgtggaccttggcatcaacctgcacacggtgaacaaggcctatgcgctgttgcgtgacgagggatacatcgttatgcgtcgtggtgccggtgcaaccgtcgccgagcatgacggcgggggagaagcaccgaaccgaactgccgaagcacaggatgagcggatgggcgaggaactctatcgccttgccttggcctacagggcgcgcggcggtgattcggccgcattcctcgatgccaccaaacggcaatgcgaacgggcatacggcgtgcgctcctcgcagagcgttactgacggtgcaacaaaaggaaatcaggggagataacgatgaataatacagtcgtgtcgatgaacatcgcgttgtgtgcgtttttactgttgccggtgatagtgaccgccggcctggcaggggttccatgggttaccgaccggcatgaggtgttcggtgtcacagtgccggccgccgcccatgtcaatacgcgcattcgcggatttaaagtcgcgttttcgggaattacggtggcgcttggcgtatgcgccatactggtctcgctggccgtttggcaactctgcggagtcgacgcggcgttctggactgtgtccatcgcagcggtggcgattgcgatatgtggtttcgtgctgcagcagatgtttcgccgcaaagtactatccatcaaagtcgatcagggatgggaggcgtccagtgcccgccgtgcagcattgataggtgagcgggacaatcccgacccgatgagcttgaagtgggaattgctgcaagtcgtttgtctcgctgtcaccattgctgtcgggttgctgggctatgaccggatgccggagcgggtgccgattcatgcggatatcgccggcaatgtgaacggttgggccgagaagagtccgatggtgatttggtacgccgtgctcgcgcaggtggtgctggcagcggtgatggtggccagccatgccgcgatcatctacgccaagcacccgattgatcccgaccaccccgccgccacagggtaagcctatgttgtgttctcgcgggtctggagcatctacgtgctggtcatcggactgctggcagccggtggattgggcctaggcgttcagcttgtcaccattggcgtgctggatatcaatctaatcggcatcatcggcatgttcatcgccgtggcggctctggtcggcgcgctgatgatcggcgtgtattacgggcagaacggggcgcgcgtctatgccggtgttcggcacagtgacggcggtgacatttcggacgataatgccatgccgtatgacgatgacctgcactggattggcggcatcatctacatcaaccgtgacgatcctgccatcatgatccccaaacgtttcggcgtcggctggaccgtcaacctcgcacgccccagcgtgatcatcggcactatcgtgctgttggcaatcgccataggactgccagtcgccgcgatactgatgtaaacgcaattctgatgtaaaaaatggctccccgctctgaggggagctaatgtgctggtatgttttacagcgcctgggcggccttctccacgtagtcctccatgccgtcgatggccacgacgtccttgaaccgcacgtcggcggtctcaagaccacgcagggcggccggggcggtggtgccggtctcgtgggccagcacatccatgcactcgaagtcggtgccggtggcgtcgaagcccaatgcctcgttcaccacgcgcgggaacttgtaggggctggcggtggagagcagcacgcgcggggtcagcgggtctcgcggcatctgctcaagcaggtagtagccgcaggcggtgtgcgggtcgatcacgtagtggttctcgtcccagcagtgcttgatggactcgcgtacctgatcctcatcggcccaaccggtgccgaagatctgacgaatcttggccagcagttcttccgggatctcgtacgtgccccacttgttgaggtcgttcatcagcatggagatcagacgggtgtcgccctcggacaagtagtacagcatgcgctccaggttggaggagatgaggatgtccatcgagggggagatggtctggaagaacgggcgctggcggttgtaggtaccggtggtcaggaagtcgaacagcacgttgttcttgtcggaagccaccacgaggtgcttgaccggcagaccgagcagcttggcatagtagccggcgaggatatcgccgaagttgccggtcgggaccacaaactcgacctcatcgccgacgttgatcacctggtcggcgagcagctgggcgtaagcggagaagtagtagacgacctgcggcaccagacggcccacgttgatggagttggcggaggaaagcaccacgtgcgaattgccggcgagacgctcggccagggcacggtcgccgaagatgcgcttgaccgcggactgggcgtcgtcgaagttgccttccacggcggccacctgcacgttggagccggcctgcgtggtcatctgcagttcctggacctgggagaccttgccttccgggtagaagacggtgatcgcggtgcccggggcgtccgcgaagccggccagcgcggccttgccggtgtcgccggaggtggcggtgaggatcatgatcttctcgtccgcgtcgccatcggccggcgtggtgtgcgccatgaagcgcggcaggatctgcagcgccacgtccttgaacgcggaagtcggaccgttgaacagttcgagcacgtaatcgtcacccaggggcttgagtggggtgatgcgctcatcggaccactgttcgccgtaggcgtcggcgatgcactggcccagctcctcggccgtgaagtccggcagcagcgcgcccagcacctcggcggcgatctgctggtacgacttgcccggcagggaggccacgtccaccttggtcttgcccaacgcgtccgaaacgaacaggccgccgtcatcggcgatgcccttacgaatcgcctgcttggcggtcagcgaatcggtggtgctacgggtggaatggaaggtggttgtcacgatgaatccttctgcctgaaagggatgatgaatccacaccagtttagcgtgggccgtgggcagaagggccgtccgtctcgcatagccgaccggtcaaaccggcgaaaatcaccattgccatcgaacggggaccggccatatcatgaaacaggccggctacaaaccggccatacagtaaggcggcaacggcgaatcaattgtcgcccataccaaaggagcacccatgaccgcttcaccccttgcgcagaaagcgaccgatgctttcaacgcgccgatctgcgaaaccgatcctgagatcgccgaactgctggactccgaactgggccgccagcgcaatggccttgagatgatcgcctctgagaacttcgtgccgcgagcggtactgcaatgccagggctccgtgctgaccaacaaatacgccgaaggctaccccggccgccgctactatggcggctgcgaatacgtggaccaagtcgaaaccatcgcccgcgaacgcgccaaggccctgttcggcgccgaatacgccaacgtccagccgcactccggcgcccaagccaacgccgccgtctaccaggcgctcgtcaagcccggcgacaccgtgctcggcctggccctcgaccacggcggccacctgacccacggcatgaaaatcaacttctccggccgcttctaccatgccgaggcttatggcgtgaaccccgagaccttccgcatcgacccggaaatcatccgccagcgtgcgctcgaaacccacccggccatgatcatcggcggttggtccgcctacccgcgcatcgaggacttcaaggccttgaaggagatcgccgacgaggtcggcgccaaattctgggtcgacatggcccacttcgccggactcgtagccgcgggcctgcacccgagtcctgtgccgtacgccgacgtggtctcttccaccgcgcacaagaccttcggcggcccgcgctccggcttcatcctcgccaagcaggaatacgccaagaagctcaactcctccgtgttccccggccagcagggcggtccgctcatgcatgtgatcgcgggcaaggccgtgagcttcaaggtggccggcacccccgaattcaaggaccgtatgcagcgcacgctcgacggcgccaagatccttgccgaacgactactggccgatgacgtcaaggccaacggcatcagcgtgctgacaggcggcactgacgtgcacctggtgatggtcgacctgcgcaacagcgagatggacggccagcagggcgaggatctgctcgccgcctgcggcatcaccatcaaccgcaacaccgtgcccttcgacccgcgcccggcctcggtggcctcgggcctgagaatcggcacgtccgccctggccacccgcggcttcgggccgaaggaatacgaggaggtggccgacatcatcggcaccgcgctcgccgccggcccgtccgccgacgtgaccgcgctgaaggcccgcgtcgacaagctcgccgaagacttcccgctctaccccgacctggaccagatccactgatttgctgattcactaatccaccgtggtgtaccggttagtgatgattcgctgaccggagcgcatcacgtcaccggcttcccgcctgagacggaggggagccggttctgtttgcgattcaaaacgtcagacatcccataacaagcgggtcggagtaagcaatcagccgcgttgtgagttacgcttgactgttatgagcgatgaattgagtcctgaggtgttcgacgcggtgtgccgccaggccgatcaggccgcacgcgcgcaggagcgtcttgcacaggcaaataccgaagccaaaaacgaactgctgctcgccattgcggatgcgttggacgggcacgccgcggacatcgaagccgccaacgcgctggacatgctcgaatccaaggaaaacggcatggatgcgggcaagcttgaccgcctgctgttcgacgtgccgcgcgtggccgccgccgcccaaggcgtgcgtcatgtggccaccttgcctgatccggtcggcgaaatcgtgcgcggatacaatctgcccaacggtctgcgccttacccagacgcgcgtaccgatgggcgtcatcggcatgatttatgaggcccggccgaacgtcactgtggacgtggccagcctgtgccttaaatctggcaatgccgcgttgctgcgaggcggtcacgccgccgaacgcaccaatgctgccacgctgggcgtcatcgccccggtgcttgaagcacacggtttcgaatccgcactggtgcagtccgtcgaccagtacggacgcgccggtgccaccgccatgatggaggcgcgaggccatatcgacgtgctcgtgccgcgaggaggagcgggtctgatccaagccgtcgtgcgcaactccaaagtgccggtcatcgaaaccggtgccggcaacgtgcatatctacatcgacaagtccggtgatctcgccaaggccatcctgatcatcatcaacgccaaaacccagcgcgtgggtgtgtgcaatgccgccgagaagctattggtccataaggatgtcgccgccgaattcctgccgcagatcgccgccgctctggccgaggcgaacgttgtactgcaggccgacaccacgtcgtatgacatcatctccggcgcggcgatcgagggccttgacctcaaccgcgccaccgaggaggattgggacactgaatatctggccctcaagatgggcatcaaggtggtgccggatctgggcgcggccatcgaccacatcaacacgcattccacgggccacaccgaatccatcatcgccgaggattatgcggccatcgaggaattcgccaagcgcatcgactcggccgtggtcatggtcaacgcctccactcgcttcaccgatggcggcgtgtttggctttggtgctgagcttggcatttctacgcagaagatgcacgcacgcggtcccatgggattgcgggagatgaccaccaccaagtggatcggttacggaacaggccaggtgcgcgcatgaacgaggacggcaacatgaacactacggctgacacggcaaacaaggcaagcgaactgcggcccgacatcgacctcaacgatcccaagctcggcctgaagatcgcggccgaacgtctgagcattgtccgctacgtgttccttgtgcagatcgaggatggcatcgcctccgccgcccagcgtgcgtcgctcgaatacgcggacgccgtgctcatcggctggcccgagaccgattcacccgaagtcgtggacctcaacgatgcccagctcaagatcgtgcgcgaacacatggaactcatggaaggctacatcggcaaatacagccagatggagcacgacggcgacctcgacggcatgaccgacacgctcatccgcatcaccgagcgcgtggccgaggtccgccgcctctaccagccggacttcccgctgcccaccttcgccgagattcgtcgcgtggtccaagacgaatgggatgaagacatgggcaagatcgatcccaaggaagacaatccctccgccggcgaaatcgaagaggaaaccgaatcagccgatgacgccgccggcgagggcggccaggcatgagtggtgttaccggcagccacaaaacggctgcgtcagttcagtccgaaaaaacagtggaatccgccgagcccgccgaaatcattgccgtcacccaaggcgaaaccgaacggcgcatgtccgacctgtccgtaccggccggggccagcagccacggcaaaggcaggctttccgcacgcggcaactggcatacacgcctgcgcgtcggcatcatgggcggcacgttcgacccgatccacaacggccacttggtcgccgcctctgaagtcgcctgggtgtatgacctcgatgaggtgattttcgtgcccaccggccgacctgtgttcaagctggacaagcacgtcaccaacgccgaggatcggtatctgatgactgtgatcgccaccgcatccaaccccaaattcaccgtctcgcgtgtcgacatcgaccgtccgggcgtcacctacaccatcgacactctgcgcgatatccgcgcccaacatcccgacgccgagctgttcttcatcaccggcgcagacgccgtggccgaaatcatgcagtggaaggacgccgacctcatgtgggacctcgctcacttcgtggccgtcacgcgccccggctactccagcccggacggcgtgaccttgcccgaaggcaaggtcgatacgcttgagatcccggccttggccatctcctcgaccgatgtacgccgccgcgccgaacacgacgagccggtctggtatctggtgcccgacggcgtggtgcaatacatcggcaagcatggtctgtattcgtacgagaactgacgattcgtacgaggactagtgtgcatttgtacgagggctggtgaggattagcgcgaatcagcgcgcatcaatcctcgccagtgcaaggatgaacggtcaggccagtcccatcttgattttcaatgtcattacgcgagtcgccgccgccgtcaccttcgaagcgaaagccggatcggacttcgcccgttcgttgaggccgtccacaattggctttacataatccgtctgaccgatgcaggacatgtcgccgcccgcctcgacaagatttactcccaattggcttacatcgtagctgctcaacgcttcggcagacatcgaatccgaaatcaccacgcccgtgtacttcaggacgttgcgaatatgaccgtcgataatcgtagaagaaaacaccgccggattattcgggtcgatggattgatacgtggctgacgacatcatcaccattgcaggatcggccttggtaatcgcctggtcaaaggcacctgcctcggccccgtccaacgtggtggtcgtatccagaatgccttcggtggtgaagtcggtattgccgcttaccgcgcccaacccaggataatgtttgaccgccgcaccgacctgagcgtctcgcaaaccttcaataacggcgatgccatgttcggcgttgccggccgcatccaatccgaaatcacgatccagcgcgccaatcggagcatttgaggcacgatcgcccaccaccgtgccgagcaccggtgccaaatcgacatttatgccagcagtggctaattgcgaaccccacgtgcctgccgattgacgcaatgcgtcagcggacattgtgccctgctcaacggcactgggcattgtgtcgaaaccggtaccagtcagatgctgtacctgaccaccctcctgatcggtggcgatgatgagacgattgccggccggcgcatatccttggagttgcgcggtcgcggtcttgaccgtatcgacgccggtattccaattgccaatgagaatggccgagccaatgtgctcgtcggcgattgttgaagccaacgaggagggttcggaaccggcg

SEQ ID NO: 2416 - DNA, 8025 bp, Unknown
  R50_10m  MAG No. k141_10483
aaccgatccgcctgccggagccgtccccggatagggcgaattgggtgctgccggtgtgggcgcgggcgcagcggcaggagtcactggtggcaaagcctgcgtaggcggtaccggctgattgaccggcgcaagaggctgggtggactgctcggcaggtgtaaacgcctgcgtaggctgctcaacaggagtgaacgcctgagtgggctgttcgcccgctgcgagtgcttgggttggagcattgttggcggcggttcctgcttcccccgtcatcgcatttaacggctcagtcggattggcgtcagctcgctgccccggcacctggccgttcggattggcattcggatcagtcatgacatgcactccttcaactgcatcgcaccccacttgcgagatacgcccctcgtcttacgcgccacattgtgcgttacagacaactgtactcctcgtggcgagccttaagtaccccaggaaatttggcttcccaaaaaacacagaagcctgaaaccggctattgcctcagcaatattcagtcggtttcaagctaaatcgttaatcctctggtgaaacgacggtctacttcttcagcagcggcgcgacttgttcctcgtaggcggtcagggcggtgtcgatcacctggtgcatgtcatagtacttgtaggtgcccaagcggccgccgaacacggtgttcggctcggccgcggccttggcctcgtaccgcgcgtacagggccttgtccgcgtccgtgttcaccgggtagtacggttcgtcgccgcgctcggcgaaacggctgtactcctcccacaccacggtcttgtccgggttctgggcatcgcggcgctccgggttgaagttcttgaactcgatcgcgcgcgtgtacggcacgtccgcgtccgagaagttcatcaccgggcaaccgaaatggtcgccctcatcgtaacggacctccttgaagtccaccgtgcgccacttcaggtcgccaagctcgtaaccgaagtaacggtcgaccggacccgtgtagaccaccggcacgcccgcggcccgcagggccttcttgttgtacggctgggattcgtcgaagaagtccacgcccagcgaaaccgtgatgcgcggatcgtcgatcatgcgctccatccacttggtgtagccgtccgcgggcaggccctcccacgtgtccttgaagtagcggttgtcgtagttgaagcgcaccggcaggcgcttgatgatggccgccggcagctcggcagggtcggtctgccactgcttgcccgtgtagttcttgatgaacgcctcgtacaggggacggccgatgagctggatgcccttgtcgttgaggttctgcggatcggtgccggccagctcgcccgcctgctcggcgataagcttctgtgcctcggccggcgtgtaacgcgcgtggaagaactggttgatggtgcccaggttgatcggcagcggatagacctcgccgtcatgcgtggcatacacgcgatgcacatagttcgtgaagctcgtgaaacgattgacgtagtcccacacacgcttattggacgtgtggaacaggtgcgcgccatacttgtggatctccgcgccggtctcctcatcgaagtacgagtacgcgttgccgccgatgtgatcacgcacgtcgatgatatgcacacgggcacccgcatgctccaccgcctgctgcgccaccgtcagaccaaacaggcccgcgccgacaatgactaggtctgggtattgagtagtttccggcatgcgcgcattccctttcataaagtcaatatatcaattattatgttcgatttccgagaaaatatcttactcacccaattgcaaatcggcaatcttcctagacttaccagcagactggacacaatccaagaccagacgacagactcaaggcaaaacgatggcatgttcttacatttctgcgtctttgcccggacccgttcgccgccacaaagacagagtgcagaacaacgcaaccaccaatataagcccccgcactcaggcaagtctcaggttacgattggtagatatgagcaattccgaacaggccctcggctcaaccaacgaggcagtcaacaaagcatccaacgaagcaaccaacccatcattcgcgccgcaacacattctggtcaccggtggcgcagggttcatcggcgcaaacttcgtgcactgggtggcgcgcaaccatccgcaggcccacatgactgttctggatgcgctcacgtatgccggcaaacgcgagaatctcgatggcgtgccggccgcgaacctgacctttgtgcatggcaatatttgcgatgccgagcttgtggaatccctgttttctgggctgaaccaacgctctgcagccgcagtacccccgattgacgccattgtgcacttcgccgccgaatcgcataacgataattcgattctcgacgcctccccattcctcaatacgaacgtgaccggcacgtacgtgttgctcgaggccgcccgccgccacgatattcgattccaccacatcagcaccgacgaagtgtatggcgatctggctctggacgaacagcgcaaattcaccgagctcagcccttacaaaccgtccagcccgtattcggcgtccaaggccgccagcgaccacttggtgcgcgcctggcaccgcacgcacggactcaaaaccaccatcagcaattgcagcaataactacggcccctatcagcacgtggagaagttcattccccgccagatcacgaacattcttgccggcattcgcccgaaactctacgggcaaggtctggctgtgcgcgactggatcagtgtggaagatcactgcagtgccatctggacgattctcacccgaggccgcatcggggaaacctacctcgtgggagccaatggcgaatacaacaacattgatgtgttgcgcatgattctgaagctcatgggtcgtgacgccaatgacttcgaccatgtgaacgaccgccccggtggcgataagcgctatgccatcgacgccaccaaacttcagaccgagctcggctgggtgccaaagtacaccgatttcgaggaaggtttggccgcgaccatcgactggtaccgcgcgcacgaaagctggtggatgccggataaagccgggactgaggaaaagtaccggaagcaagggcactgatagccattgacaggccgccgataggtcactgacagcgcaatcaatgaataccgattgcgagatttggtggcgaaaatatatcttatgttgtacaataatcatgtatttcaattataaattgattattatgacttttaaagaacggtaatgcgatgattcgtttacaaagacttgttctagacaacatgaggaacatatcgcacggcgtcttggattttgacgatctgcccgctggcggcagcgtaacgggtatctatggacagaatggatcaggcaagaccaccgttatcgatgccatcgggatactgcgcgcgctgctatccgggaatatgctgccggacaccgccggcgatgccattagcgtcagcaccggtcttgcaaccttgacggcgacgctcctcatcggaggaaaacagaagcccagctaccttgaatacaaggtgtccctgcgtaaagcgaacccggattcgacgcgagcgcgcgtcgtttccgagtcggttcgcatcggcgacgatctctcacgcctaggcagggaggcgttggggcatcggacggaggattctgagaccgatggtttcgtgtcaactccggtatatgtgtggcgctccatcgaggcggtcacctcggtgaaaaccgtggtctcacgcaccgctgatcgtgcgtacatggaggggcgctcattcctgttctcgcggtgtgccacgcttgaagaccgacccgatgccgagttcctcatcgactgggcggtctcccgcgtacgggaagcgaatggtgtgtccgccagatcactgacatacatcaacgaacgtttcgatgagttcgtacgcctacgcaaggccttatgcgattacgcgaccaatgatgtcttcgtatccactacccgtcgtggctcctatgccgcatatgcgttcatccccatcatggaggaggattccgcaggtcgcaacacagagtttctgttcgacctgttgcaaccgaacccgctgaccacgggccaggcgaaacgacttggacagaccgtggagtccttcgaccgcatcctgcccaccctcgtgcctggtctgcatgtcctgctgaagatcggaaccgcgccttccggcaaagatggcgaggatcgggtcaccgcggagctgttctcgcgtcgtggcgatatcacggtcccattccgctgtgagagcgaaggcatcatacgcatcaccgcgctgcttggctatctcaagcacgcgtataacgacgagaacgcgctggttgccgtggatgagttcgactccggcgtgttcgagttgctgctcggtgacatgctgtaccagttggcggacgggtgcgcagggcagctagtgttcaccgcccataacctgcgtgcgttggaagtgctgccgaacggctgcattcgcactacagtgaccgatcccaataaccggttcgcgatcatcccccgcaagtcctccacgaacaaccagcgccgacggtacctgacggccagcgagctcggatggagcggccccgacatctatgattcgcccataccacgcatgttcggcaacagtctctatgccgccggccatcccgatgaggacgatgacatcgacgacgatctggcagcactcaacacctccggaacgaaggtgaaccgtggctaaacgcaagatcgtcctgctggtcgtagaaggagcaagcgacgccagcctgctcgtgccggcattctcgtcgttaatcgagaaccgcctattccaagggcaggaattccactgcgacgtgttgactgcgccaaaccaccgtgaggagttccgacgtcgtaacgggttctatccagcggacaatcctgtccagacggtgcgcgaactcgtggagtactacctcagagaccacgaccgcacctggggccagctcggccatgtcatccagatctgcgacctagacggggcgttcacatctgacgaccaagtgcgggaagacccattggtggatggaacgcaatattcaacgaccgacatcatcacgccaaaccgcactatcctgattgcggatcgcacgaccaagcgaaacggcgtggatgccttgctgaaactcgatgggttcaggaagaagaacggccgcgccacgctcatggtcccgtaccgcctgttctacgtcagccgcaacctcgaacacgcatttcgcggtaggattgacaatctagacgcacagcacaagcagagcagcgccatcaaactagcagaccgctttacccgcaacccgaacctgttctctacaacccttcaatctcttcggcgaatacacggcaatccgacaacgtgggaggaatcttggcaatatgccatgcaagacctccactcactcgaacgcggtagcaacctcgcattcgtggagccatacttggcaggcgaactgcggtaaatccatcagaatagtttcagaaccatagctggttcgagctcagctagacaccaaagttggaaaacgtagcccagtgcaccttattctggttataaaacgtaagaacagggctcaaatttggttggaaaacgtaaattatggcgctattgctgttttcgtgggtggggtttctccgttgagttgttgagggagtaagagaagagcgctttccgggtaggatgttttcgaccaagataaacaaacaaccgcaaagcgcctgatgaacagcatattcaaccaacttctcaacgtccccgggttctaggtagaagtgcaacgcctgtctatggttggaagtgttcaagtccacaaccgaagagaaagcgttgcactcgatatgaaagcctattcccacctgtcggcacaggaacgcatccggatcgacgagctgaggaaccgcgaggggctcggcgtgtgccagatcgcgttgaggatcggccgagacaagtccaccgtcagccgcgagccgggacgcggcccgtggttcgcgtccgacgagaacgagtcctaccggccctacaggccgaaacggctgaaggctgtatttcgtcaaattgaggtggacgtgttcggcacttaatctgaacaccgtcggcggttggttccttgttttgttgtttgtctggtttatttcatgagggagtgttcgttccggtaggattcgccatggaagcggaggatcccgccgtggtggacgatgcggtcgatgaccgcggcggccatgtccccgtcgccgaacacgtcgccccatctgccggactcgaggttcgaggcggagacgacgccgcgggtctcgtagctgtccgggcagccgccgccgtttggattcggcccggctcgcgttctccttctcgaacaggttggccaggaagccgagctggccgggcgtggcgtcctccagggccttcccgggcacgccgtgcgtcaacggcaggttgcgggcgaggcccatgacctgttccggcgtggccttgtcaagaacgcggccgccgcgctgccgcggtttttgccggctcattcggcctccttcatgtatttgtcgtaacgcttcaaatcctgcccgccttcggttcccgcaccctcgatgatgcgtttggcacatgtgccgatcgccgcgcggtcgacggtccgtcccgcgttgatgacggtttccaccgctttgaccgtggcggcgaacccgcagtcggcggcaacggctcggatgtcgtcgagcagatcggagcgcgtgcgtgcgtccatgcggtcgagcagggctcgcacggtttcggggaaatcgttcctgatcgggctttcgccccatatgcggggctttcgcgcgatgatcgcgagcaggctcgccgggtccgcctgggttttcgccgaatggccccagatccgctccggcgtggtgatcgtttcgccgtcggggccccgcggttcgatctcgaagacgcgcaccccggcctgcaggcgcatggaacgccatttcggtccggccggataccggttcgcgtcgatcgtgacggcgccggtcttgtcggccttcacgctcctccagtcgcacgggtcgaaccgcacgccgggcaatggaagcgtgtggtccttctccgcctcgaacagttcgatcgccggaacatcatgccggtagtgatccgatccggcgacgcgttcgcactcgtcaagccacacgcgcgtcagcgtttggaagctctcggccgacggcatcggcaccatcaggttgcgcctgacgaagccgacggcgttctccacactgcccttcccgtggccggaatacgggtcgcggaaccgcggctcgaacccgtaatgcgcgcagaacagggagaacagcctggtctgggtgaaatcgacctgcatgctgcccggcgcccactccaactcggcgaagccgtccgactccatgcgatgctcccgccgccagcgcttgacccagcgctgcaccgacgaatacgagcccgtgaacccgcactccgccacgagccgctcgtacacgcgcgtcgcggtgtggcgctgcttgacgggcatgcgcagatccgcggccggccacccgtccacgacggccgaataccccgcgtcgaccagcgacctgcccgcatgccccgagccaaggggcttgggagagtaatccccgtggttggcgtacctggccacggtcgtgcgcgatacgccgagtttccgtgatatctccttgtggctcaggccttggcggtcgagctgcctgatacgctgtcggacacacaccggtgtcgtcatttcctttcttcccgagaaccatcagtttggttgacaggcactcgggaatccatcaaggaaccggacgatgccggtgttctcattccaccggcgccatcaccgccgacaccgtccaaattgaacgctcagggtgttcaggaacaagtgccgacagtgaacacctttattcgatcacacacacgtgt

SEQ ID NO: 2417 - DNA, 6034 bp, Unknown
  R50_10m  MAG No. k141_10528
ccgcccgactggtcatgtcgctcggcaccggcatctccttgtcgctcatcaccagcatcattctggaaaagcgccgcttgaacagcgcggctcgatgctcggcatcgtcagtctggtcacctgcgctgcaccggccatcggcccggtattcggcggcgtgctgaagagccacttcccgcccaagttcatcatcatcggcttcgcgggcaccgtaatcatggacgcggtgttcgtgacgctgtccggcaatgtgtgggtggtggccatcgccgcgaacgatggggcggacgcggccggttcgtatacggccgcgttcccgcgcagcatgatggtgttcaccggcatggccgtgcttggcgtgattctcgccgcgctcatgttccgattctccactcgccgatcgccggaattgagagaagtcaaatagtacgcccgcagcggattggttggctttatgatggaaccgatattccatcacaggagaagcaggggaactatcatgcttgatgaaccaccagtcactccgatccgcaaggccagtgacggcctcgaactgcccgccaccggcttcggtacgtacaaggtcaacggcctagccggtgtggacgccatcaagtccgccatccatcagggttaccgcctcatcgactccgcgttcaactatgagaacgagggtgtggtgggtcgcgccatccgcgaatccggcgtgccgcgcgaagacatcatcgtcacgtccaagctgcccggccgccaccatgctcacgacgaggcactgctcaccattgaggagagcgtgtgccgtatgggtctcgactacatcgatctctatctgattcgctggccgaacccaagccaaggccagttcgtcgaggcatgggaagcgctggtcgaagctcgcgaacgcggcttggtcaagcacattggcgtcagcaacttcctgcccggccacatcgacctgctcattcgcgatacaggtgtgacgccggccgtcaaccaggtcgagctgcacccgtacttccagcagcgcgaacagctggcctacgacaacgcgcacggcatcatcaccgaggcatggagcccgctgggccgcgccaaccagatgctgcgcgacccagacctgaagcgtatcgccgccaagcacggtatttctgtggtccaggccattttgcgctggcacctccaatacggcgacgtggccatcccgaagtccctgaacccggaacgccagcgccagaaccttgacctgaccgcttttgagctcgatgatcaggacatggccgatatcgccgcgatggacaaccccgaaggccacaccttcggccagaacccccactggcacgaagaagcgtgattccaacatgcaacgccctattatgacttcgcggtcgtttttgcgcacgccgtctgaagcggctgggcccggcgacgaggcaactattcaggacctcgtggatacgttggaggccaaccgttcacggtgcgtgggcatggccgccaacatgatcggcgtgagcaagcgcatcatcgtcttcgtggatgaagaccttggcgggcgtatcacggtgatgctcaaccccgtgatcaccgcttcggacggtgccttcgacacccaggaaggatgcctgtccctgaccggcgaacgccgcacactgcgctgccgccgtatcgaggtcaactacgaggaccgtcggttccgcgcccgccacgccaccttcaccggctggaccgcgcagatcatccaacacgaagtcgatcactgcaacggcatcatcatctgattcattcggtgctcgttgcagcccacccccccgaggctggtcatctcgattacgatgcaattacatcgcaaccgctatgaccagtttttttatgtgcactggtggggtgggtgttctcagcggtgttggggtgccatgcgctggccggttggcttcgctgaggggtgtgggtggtgtcatgttgccagcggttggctggttggcttcgctggaggttctctcagcgtcggtgatgtgccaaagagtggcgggctggcttcgctaaggagcgttaccgtcggtggagaaccagtgcgtgacctgctgccgacgctaagcgttcattaagcgtcgttagcggccaaaacttggacgtgtaacgatgctgggcggttttagtgtcgttgctgtgccaagttgtggtcctctgccgacgctgccagtgcagtagcgtcggcgttgggacaggtgttgggcctttgccgactctataagcgagggaaaatcattcgccggtgcctaagtgggtctattgccatgctgaatacatctgctgagtgtagctatgcgttcgaaggcgatttcgggacctttctcagtagcaaatatgcctaatgcgcggagttatacacttcaccgtgcacttatacacgccaaacgaagcagaaatcgactgctgacagtggacgacacgccagagacgatgtggataacccagagacggtggataacagctgcgcgatcagtggataacctgcaagaaagtgcggttatccaccgacggtagccactgttatgcacattccataccccttggaatcattgggttttccacttatccaccatctcgccatgcgggcttgcgggccgccgcacgaacgtcatacagtgtgcctcacggcgggcaacgtagcccgccgtccacatcacatgaaggggaaacaccatgagcaccgcaaccactactactgccgaaaatgccggtttgccagcaatgctggacaccaaagacgtagccgagatgttcaaacgctgcaatctcgccgtctatgccgaagcgagacgcatatattatcgcgaagtgaatctgaacccatgcaaaaagtatccgaagcaggtgctgcaaaggatcgaatggtggttctgggattggtttgcctatgactgcgccgtcagcggtattggactgaccggcaatgaatccgaagatttacgtatcgaattgcagtacggtccgggcgcaggtatctcgccattcctagccttggccgaattcatgtatgacaaggacgaacgtatcggcacacgcgagatacgtgattttcgcgaacttgatgacaccaatttcgcttcgatgttctggattcgcgatgccagcgcggtcaaaggtcgtctgacagttgaggacatcattcatggtggtgtctacgaggtggcggacgcacatgccgcctcgcaatacgatggtgcgcacggcggcatgatcgtcaatcgcatcgcacatgtgagaggcgtgtggcgatcctgttccatcccgatctatgaggcacgaaggcctgatgacccgcaaatcggtgattcgctggcccgttcattccgggaaaccggatataaaccggactttgccggtctggtgcggtttttctacgggagggccaaagacaccggtctcgactgggaagatgcggaagccgcacgccaagctggcactttggacgcgctgatcaagaaggccagcaatcggtgaaggatccgcctaacgctgctgtccaagtcggcggccacggtcgcgaacgaagagggacgcaaccaaacagaccgcgcacacaatggcgaccgtgcggaacgaagcccgcacgccaatggccgatgccgccgcttccggcactccggtgcgcatggccgccgcggtgtgcgtgttcatgatggtgaccagcagcacagccgcagacgtcatgatcgcgaagcccagcaaggcgagcggccggccaccgatacggtcatacatcttgcctgccaccgggttcaggatgcccatggcgatgccgctcggcatcatcaccagaccggacaccagtgcattaacgccaagatcattctgcaaatatgcccatcgcgtacaggaacagctggcgggtggtgaaggtctcgatgaggaacgcggtgatcgggatcatgatgccgttggtaagcatgaatccggtggtcagccattgcacggtgctgctgggcacgtcgaactcgtgcatcaacgtgggcagggcggagatcatcagcgtttggttgaggatggccacaaacgagccgatcatcagggtgatgaccatggcggtggtgttggcggggggtggtgctgttggagttggcggggtggtggagccggcctcagcggtggccggcgaggaattgcgtgacgtcaattatcaagtctcgttttcttggctgagttgtctttcttggcttgcccatactatctgtgccttgactgcattcgaaaaccattgcaatgactagcaacacgctgagacgcggcgtattaattcaatcatttgacaaacttagttcgttcgttttattgttggtcctgcaatccgtaatatcgcctactgcaaaggagcgcccaaatgggtctgtgggatgttgacaagatcgagtacgtcggccgcgccaaagggccgaaggaagacttcgccttccattactacgatgccgacaaggtcgttgccggcaagaagatgaaggattggctgcgcttcggcgttgcttggtggcacaccttcaaccaggaactggttgatccgttcggcaccggcaccgcgcaccgcccgtactacaagtacaccgatccgatggaccaggctctggccaaggtcgactacgccttcgagctgttccagaagctgggcgtcgagtacttctgcttccacgatcgtgacatcgcccccgaaggcgacaccctgcgcgagaccaacgccaacctcgacaaggtcgttgacaagatcgacgagaatatgaagtccaccggtgtcaagctgctgtggaacacctcctccctgttcaccaacccgcgcttcgtgtccggcgccgccacttctccgttcgccgacatctacgcctacgccggtggccagctcaagaagagcttggagatcggcaagcgcctgggcgccgagaactacgtgttctggggtggccgcgaaggctacgagaacctgtggaacaccgagatgaagcgcgagaccgaccacatcgccaagttcttccacatgtgcgcagattacgccaaggaaatcggctttgaggcccagttcctgatcgagccgaagccgaaggagccgacgctgcaccagtacgacttcgatgccgccaccgccatcgagttcctgcgcaaccacgacctgaccgacgtcttcaagctgaacttggaaggcaaccacgccaacctggccggccacacctaccagcacgagatccgcgtggcccgcgagtccggcttcctcggttccctcgacgccaaccagggcgacaagctcatcggctgggatatggacgagttcccgaccgatctgtacgagaccgtcgccgtcatgtgggaagtcctgcaggccggctccatcggacctcacggtggtctgaacttcgacgccaagccgcgccgtacctccttctacgaggaggacctgttccgctcccacatcgccggcatggatgcctacgccgccggcctgctggttgccgacaagatgaaccaggacggcttcatccagaatcttcaggccgagcgctacagctcctacgactccggcatcggcaaggacatcgacgagggcaacgtcaccttggccgacctcgaagcctacagcctcgacaagccgcagtccgagctcatcgccgccaccaagtccgatcacctcgagtccgtcaaggccaccatcaacaactacatcattgatgccctggctgaggtcgagtgaccatcggtctgaccgattgaattcgctccatcgggcgtgtacacatcaattatgatgccagtgcgcccgatgggctgattcgatagtttcgccatgtgcggtgttgtgttatgcccgcatggcacctttccattccttctttctcctttctctccttccgctggcatggagttcgagatggacgccatcgcggcctgcttcatcggcggcacggccgtcaccggcggcatcggcaccatccccggcgccatggtcggcgccctgatcatgggcgtgctcaaccagggcctgtccatcatgggc

SEQ ID NO: 2418 - DNA, 11077 bp, Unknown
  R50_10m  MAG No. k141_10607
gctcaagatcaatatgtccggcgttattccgcccatcttcgcctcctcgattctggccatcccgaccctgatcgctcagttcggcaagtccgaccagtcttgggtcaagtggatcaacagcaatctcgcgaacaccacttcggtgtggtacatcgcgctgtatgccctgatgattgtgttcttctgcttcttctacacctcgatcacgttcaacccggacgagaccgcggacaacatgaagcagtacggcggcttcatccccggcatccgcgccggcaacgccaccagccgctacctgacctacgtgatgaaccgactcaacaccgtcggtgccgtctacctgctgttcgtggccctgattccgaccgtgctgatcatggccctcggactcaacgccaagctgccgttcggtggcaccacgatcctgatcatcgcgggcgtgggcctcgacaccctgcgtcaggccaaggcccagaccgaacagttccagtacaccggcttcctgttcgaaaacgtggaccacaaagaaggctgacgcccgcttggcagcggtcgcccgcaatgggcaggcggccgcgcgaggagttccacgacggagcaatctttcttccacatataactcaatggctcccctaaccaagggagccaaaaccgtattaataaccgacacaaaaggagaccaccatgcgtctgctcatcatgggcccccagggcgtgggcaagggcacccaggctgctctgctcgccgagcacttcaacatccccaccatctccaccggcgacatcttccgctacaacatcaagaacaagaccgaactcggtcttgaggcgatgagctacaccgacaagggcgagctggttcctgactccctgaccaacaagatcgtcaaggatcgtctggccaaggaagactgcaataacggctggatcctcgatggctacccgcgtaacgccgcccaggtcaccgctctcgacgagatgctcgccgacctcgacactccgctcgaccacgtggtggccctcgaagccgcccgtgacgtgctgctggagcgtatgaagaagcgcgccgccgagcagggccgcgctgacgacactccggaggccatcgccaagcgcctggagacctacgagaaggaaaccgctccgctgctcgacatctacgaatcccgtggcctgctcgtcgtggtcaacggcgtcggcgacatcgacgagatcagcggccgtatcatcagccacctcgagtagtaggttcggcagcccggccaacaagccggagtgatgccgaaataccacatcaacgtttccatacccctgtgcgacacgccgagtgttcgtacaggggtatgtgcgtatatagttgacagttggtgtgtcttcggatatgccatagtaatcatccaacggaataggactagaggcacatggcaaaagacggtgtgattgaagtcgaaggacaggtagtggaagcactgcctaacgcgatgttccgcgttgaactcgagaacaagcacatcgtgctcgccacgatttccggcaaaatgcgtaagaactacattcgtattctgccgcaggatcgtgtcgtgctcgaaatgagcccttacgacctgaaccgcggacgcattacgtaccgttacaagtaaaggtacacaagaaaaggataaccatgaaggtcagccctagcgtgaagaggatctgcgaaaactgccgcgtgatccgccgtcacggccgcgtcatggtgatctgcgtcaacccgcgccacaagcagcgtcagggctgagagcagattctccagcggcactaagtaaataaggcactctctcacagtgcttcccgcaagggaacgacactgaaccacgggtacgtaggcccgtgccgggtaaccgggcgagcgggtgcaagacctacggcaacaagaaggaatcgcaatggcacgtcttgccggagtcgacatccccaatgagaagcgcatcgagatcgccctcacctacattttcggtgtgggtcgcactcgtgccaaggaaacgcttgccgcgaccggtatcagcccggacatccgcgtcaaggatctcaccgacgagcagctgattacgctgcgtgactacctcgaagccaactacaagatcgagggtgacctgcgtcgtgaagtcgatgcagatattcgtcgcaagattcagatcaactgctaccaaggccagcgtcaccgtaagggacttcctgtgcgcggtcagcgcaccaagaccaatgctcgtacccgcaagggcccgaagcgcacggtcgccggaaagaagaaggccaccaagtagtcggtggcatgattcgggccacgggatgatttcatcccatcgcccgaacgtcaacaacaaagttcgttactaggaaacgagggtcaatggcagcgcctaagcaagccgctcgtaagccccgtcgtcgcgaccgcaagtcggtcccggtcggccaggctcacatcaagtccactttcaacaacacgatcatttcgatcaccgatccgtccggcgccgtggtgtcctgggcgtccggtggtgatgtcggcttcaagggctcccgtaagtccacgccgtacgccgctggtatggctgccgagtccgccgcccgcaaggcgatggagcacggtgtcaagaaggtcgacgtgttcgtcaagggcccgggttccggtcgtgagaccgccatccgttccctgcagtctgcgggcctcgaggttggttccatcaccgacgtcaccccgcaagcccacaacggcgttcgtcctccgaagcgtcgtcgcgtctgagcactcagcaataccaaatccatccaaaaccgcctgaccggtgagtgcaccaccgagttcaagctgaaaggataaccacagtgcttattgcacagcgtccgactcttaccgaggaatctctgaatccgcagcgctcccgcttcaccatcgagccgctcgagcctggcttcggctacacgctcggcaactcgctgcgtcgcacgctgctgagctccatcccgggtgctgccgtgacctccgtgcgtatttccggtgccctgcatgagttcgccactctgccgggcgtccaggaagacgtcaccgagatcctgctgaacatcaagggcatcgtgctcaccagcgaatatgacgagcctgtggtcatgtatctgcgcaagagcggcaagggcgaagccgtggctggggacatcaccccgcctgccggcgtcactattgccaacccggagcagcacatcgctaccctcgccgacgatggcgaactcgagatcgagttcactgtcgagcgtggccgtggctatgttcctgcccagatgaacaagcaggacaacgatgagatcggccgtattccggttgattccatctactccccggtactcaaggtgagctacaaggtcgaggccacccgtgtggaacagcgcacggacttcgacaagctcattctggacgtggagaccaagcccgccatctccccgcgtgacgcggtggcttccgccggttccaccttggtggagctcttcggcctgtgccgtgagctcaacgcccaggctgaaggcgtcgaggtcggtccggccccggtggccgaggagaccaaccccgagatggccgttccgatcgaggacctcaacctgacgcagcgttcttacaactgcctcaagcgcgagggcatccacaccatcggtgagcttgtctcccacaccgagcaggacctgctcgacatccgcaatttcggtatgaagtcaatcgatgaggtcaaggagaagctgcagaccctgggcctgagcctcaagtcctcgccgatggccttcgataccaataatctcgaaggtggtacgttcttctcgccggaagacgagtgatctgcctctttgaccaatcgttcgttcactaggcaagcggatgttcgggcatatgcccacctgcttgcctgaagaacggacatataaggagtaaacccaatgcctacacctaagaagggcccgcgtctggcttccagccccgcacacgagcgcctcatgctggcaaacatggcgaccagcctgttccagaacggccgcatcaccaccacgctgccgaaggccaagcgccttcgtccgctggccgagcgcctgatcaccttcgccaagcgcggtgatctgcactcccgtcgtcgcgtgatgcgcgtcatccgcaacaagtccgtggtgcacattctgttcacccagattgccgagcagatggagcagcgtgaaggtggctacacccgtatcgtcaagatcgccccgcgcgttggcgatgccgctccggccgctgtgatcgagctcgtcaccgagccggttgccaagaaggctgttgtgaaggaagctgaagccgccgccaaggttgccgaagaagaggctccggccgttgaggctgaggccgctgaggctccggtcgaggagaccgccgccgctgaggctgaggctcccgctgaggaagccgctgacgccgagaaggccgagtgagctgaatagcgtttcgccaagctagctgaacgggctggaatccgtttgggttccagcccttttgcgttgtttcatagaaactacaacgtacgtacggctcgaatggcctcggctcttgcggccagctgatcatcgacggggtatgcgatatgctccaaagtcaggccctgcggcgcaatcggcccgcttgagccttcacgcactggctcggccattttgccggcaaaccattccagagatttgcgtcccgaaccaactttgatgcatgagccgaccaaggagcgcaccatattgcgggcaaaggcgtccgccacaatcgtgaacaccgccagtccggactccagcgacggagtccgatatgcttcatgcgatgccatcgcatccggcaccaggggagtgatcggcacccgccgccaataggcggtcttgacttcgcggatcgtagtgcctcccggattcggagtggcgaaggaaccaaaatcgtgcaggccgatggtcaatgaggctgcgcggttcataagctccagatccagcgattcatccacggtaagcacgcatccacgcaggcgcgggtcgatctcggatgaacgatcggcgacccgatacacataagtgcgctccaatgcggagaacctggcatcgaaaccggccggtgccacggcaatgccatgaatgacgatgtccgaaggcagcacagccttgagtctgcgagtcagcgcctcggtgaccggaatggtcatgtgacctacgcagcgattcagtacctcatcggatacatccaaatgcgccacttggtgggaggcgtgcacaccggtgtcggtgcgcccagccaccgtcagacgcaacggttcggccgcatcatcggccggcacccgcagcaccttgtgcagcgcatcttcaatggtgccttgcaccgtacgcagattgggctgtttggcccagccatagaatccgccgccgtcgtaggccaagtcaatgcgcagtcgtgtcatagccattcattgtaacgagtgcggtcggcgagatgcgcgcggtcggcgagatgcgcgcggtcggcgagacgagtgcggtcggcgaagtgacctgcctgtaacattctagcgcgtttgctgaaacggggccgccttaggttgtaaccatcaaacccggttacggcttgcggcgtcagcgtgcgctcgaaacgcctaaccgcttgaggccacagaagccgccacagcaaggagcaggcacgatgatcgaatccgcagcacgcagactggcccatgaactggtaaaccgtcgcgaggcgatcaaccgcgagctgtcccgcaacggcgtacgcttcggcatctacaagaacggcgaataccatgaccggctcttcccgtacgatcccgtgccgcgcattatcgaatccgacgaatacgacgaattggagaagggcctgaagcagcgcgtcaacgccctgaacgcctatctgaaggacatctactccgacaaggccatcatccatgacggcgtcgtgccggaggaatacgtatacacctcggccggctacttcccgcaggtcaacggcgtgacccctcccggcggcatcttcgcgcacatcgccggcgaagacctggtccagggtgaagatggccgctggtgggtgctggaagacaacctgcgcatcccctcgggcgccagctacccgctgttcgtgcgcgacatcgagcgccgcatctccccgcgcctgttccgcgacgtgcacatccgcgacaatcgcgaatacccgcgcctactgcgcaaggccatggactttgtgtccactgagggcatcgccgtggtactgacccccggccgctacaattccgcgttcttcgagcacgcctatctggcggagaaaaccggcgccgcactggccttccccgaagacctcgaagtggtggacaacaaggtctacttcctcgactacgccggcaaacgccaccgtgtgggcgtggtctaccgccgtctgtccgacgaattcctcgatccgtttgccttcaatcctgattcggtgatcggtgtgcccggtatcctgtccgcctaccgcgcgggcaacgtggccatcgtcaacgcgccgggcaacggcgcggccgatgacaaggccatctactacttcgtgccgcagatgatcaagtactatctcggcgaggaaccgattctcaacaacgcgcccacgtatatgccgatgttcgaggccgaccgtaaggaagtcctgaatcgtatgggcgagctggtcatcaaggatgtggccgaagccggtggttacggcgtggtgttcggttcgtcgctagatgctgccgcacgtgaggagcttgccaaccggatcaaggaggagcctcgtcgattcatcgcccaagaggtgattcagttccgcgatatcgatgtggtggacccgaagaccggtgagatgtcgccgcgcaaatgcgatttgcgtgcctttgtggtcaccggcaaaaacacgcacgtgtggtattcgggcttgactcgatactcgtcggtgcccggccagatgatcgtcaactcgtcgcagggtggcggattcaaggatacgtgggtgttggcacccgaatccggcgtggagcatgaatacggtgctgaagtgcaggtggcgaacctgctgagccagtcccgccgccactcgttgtctctggtcaccgcttccaaggcagacaacctgtattggctgggtcggtacaccgagcgcgccttcaccacgctgaaccagttcttcccgttctacgatcgtgtgatggacaccgatgtggacgccttccgtccgttcgctcacgcactcgacctgcccgaagatttcgaggacttcgacgggttcgtgaacagcttcctgtacgacgggtccaaccctgattcggtgcggtcggccgtaacctccgcattcaacaacgccgtgattctgcgcccggaattgagctcgcgtctgttgcagtacgtggagttggcgatgaccaatatcaccgatgccgccaaatacgcggccgacgccgaggacatctacaagcagcgcgatattaccgatgacatgctcgccttctggggcggcatcgagaattcgccggtcgaccccacgctgaaggcgttcatcttcatcggcaagtatcttgagcgcatcgacctgtacacgcgcttcggcctgacgatggaggagatggaagccccgcttaggaagctcgcctcctactcgatgatcctcgacggcatgccgttgcctagttgcttcgccgatgggctgagctggctggtcggtcagctgccgtctcgcgggtatcaggaagtcgccgacctgctgaagaagtaccttgacgattattccggccgtgtcagcgccctggccatcaaagacatgggctcactgagctccatgaacatggatgccaagcgcccctaacccgacgttcgccctgacgggttcaaatgctatggtggtatggcgaaaaaccgtgcgcccgagtgccggccgatacgtatcggcgaattgccggaatatatgcgtggactgtgagcgcgcggaccatacctcagccatggctgtagtgtcgttatcccgagaatgtgccggttgccggctcgtgtgtaagtgcaggagacgttgtgaaaaaactcgtgttcgactatgagatgaagctgtccttcagcgcaccggtcaccgatcacaggttccagcttcgctgtattccctccactggccctcgccaacaggtgattgacgtggaagtgaagattcagcccgaaaccgaactcgaaaccaccatcgactcctttggctccgtggtgatgaccggattcatccccgagccgcacgacatattcagctattcggtgaccggcatcgccttcgtggacaatgcgcatatccataaggaagcctataaaccgctgtaccgattcaattcagcgctcaccattcccggcccgaacgtggaggcgatgatcgacgtatgccgcgaacgcttggctgcgttgcctgccgacgccactccggtgcagcaggccgccgaagtgatggatgaggtctacaaggcgtttgtgtatacgcccggttccaccacgattcgcaccaccgccgaacaggccttggcccagcgcaagggcgtatgccaggattatgcccatgtaatgctgtccgtgtgccggcatgtgggattgaccgcgcgctacattgccggtttgcttgggggagagggcgcgacccacgcttgggtcgaggtgtatcaggatggccgatgggtcggactggatcccacgcataaccgattggtggacgacagctacatcaccatcgcccacggccgcgattaccgcgactgcatgctcgacatcggcatcttctccggctacaacgtccagcagacccaatgggtcaatgcctccgtccacgaacaggtggcgtaaacaaaatttcaagccccctctgatgagctgagccgtgaagaaaacgccggaggcgtttttaggcgaaggcgaatgacagtgagcaaataaaatggcagctggaaagctgtccttaattgcgttcgagctgtcgagcgtagcgagaccgagggagagaccactcaatgcagagtggccccgtcaccgcttctaccaccaccaatattcggattttcgtcgttgcaacattcggattttggtagttgagaaattcggattattgtagttagaaagttcggattttcgtcgttgcaacattcggattttggtagttgagaaattcggattattgcgatggcggacgtgaaataacgggaggtgcgcggaatggccgattctctggcgagcgacatcaagccgaaagcctatcgccctcgtatcgtggatgcacagatcgaacgatatatgcgcatctttggcgcggtggagattaccggcaccaagtggtgcgggaaaacttggtctgcgcgggcccatgcagccagcattacctatgtggatcgcaataacaatttggctgcggctaaggcggatccgtcattgatgctgctgggagataggcctcatatcgtggatgagtggcaactcgctccagctatatgggatgaagtccgtcatcgcgtcgacgatgattccgcgaataaaggtcagtggattctgaccggttcatccactcctctcaatgagaatcggccgaaccatagtggtgcgggacgaatcggacgtatccgtatgaatcctctgactttatatgagtccggactctcgacaggtgcggtaagtctcagtggactgtttgaacataagttcgccgctgcaaaatcagagataagtacacaaatgttgttggatgccgtatgccgaggtggatggccggaggcggtggctctgcctgtatctgacgcacagattctgattcgggaatacatgcgactcacgctgactgagagtgtgcccaggcaaggcaaggatcctgatgtggctcgtcgtctgctggattcgcttgcgcgcaatatcagtcaagctgtgacattcaaaaccttacgtaaggatatgtacggtactgaagcaaatcttgacgatttcatttcggagagaacggtatccgggtatacggccatgttcgagaacatgttcgtcatcgatccgataaagggctgggttccgccggcacgggatccaaagcgactccagaccaaggcgcgtcggtattttgccgatccttccattgcggccgcaatgttgggcatgagtcctgctgctcttatcggcgattggcagacttttgggtttctgtttgagaatctatgcatccgcgatctgttggtgtatgcgagatctctcctcgatattgggatagaaccggttcggtattatcgtgacgattccggtctggagtgtgatgccattattgaattgtccgatggacggtggggcggcatcgaaattaagtccagtgaggataaagtccctgaggcatcggcaaatctatgcagactgaaagataagctgctgagaaatccgagtgcgcgaacccgtgaaccggagttcttggcggtgttggtgggggtcggcgagttcgcgtatcaacgcgatgatggagtgtatgtaattcctgtcggagtgcttggcgcgtaaacgcaatgccagcgcttcgggcgaattccgggattgtgatctgacatgtctcaagcggcatacactcgagacttgctcagcgaaactccgatttgccaggtcggcagaatgtggcataatgaacaagttgccattttggcagcatggataagtgtccgagcggtctaaggagcacgcctcgaaagcgtgtgaggtgaaagcctccgcgagttcgaatctcgccttatccgcctttagggttccggggtttgtcccggaaccctttttgtttttgatgcgaacgtccgtattcggggttataggccaaaatgtatgtccggcggtctagtcgttcggctgccattcgaccctggtgtggaactcgttccagtcgatgccggtgccgtgtctcatgggaatgccgaacgtctcgtgcatgctctgcgggcttctctcccatgcccgccggtagaggcgctcgagtcgttcgtcggtcatcgcgttggccgcgagccac

SEQ ID NO: 2419 - DNA, 16625 bp, Unknown
  R50_10m  MAG No. k141_10655
caccgagacccaagagaatcgcaacgagcatcagctcaagctcgacgatctcaatcgcgctttggcatcggcccggcaatccacagcggaacatgccgatttcgacgaacttgatgaacgtgaacgcacgctggagcgcggactgaacctgactcgcgagcatgaggtcgccgcgaaaatcgcgtggaccgaagcaagccgcaaaggggagtcactgagccgacaggccgggctgctgcgggacaacgccagagaagccgccgaacgccgcgcccgcatcgaggcgttgaacgatcgcagacgcgagcaggccgcacacctgcaaggcgtggccgatgacgcgcgagcagtggccgccatggtggaacatacgctgcatgacgtggccgccaaacgagacgagctgcaggccgccgcctccagccatgacgaggaactcaaggccctgcgcgcgcagcgcaaccagatcgagcccaaggtcaccgatctgaccgggcgcgaacatgccttggatgtaaaccgcgaacggttggccgccgaatccgggcagctcatgcaaaaagtgtccgacgaactcggtctcactttggaggaattggttagtggttacggccccgaacagccggtgcccgtgctggatgatgagggcaaccctgtgccgttggatgagacggaagctgaggctgggaccgaagagggagaaaccgggggagagaccggcaccaacggcgattccgccctctttaagaccgtgccgtataaccgtcaggagcagaagaagcgtctcgataaggctcgccgcgatctggccgcactcggtaagatcaaccctttggccaccgaggaattcgaagcgcttgaggagcggaacaagtatctcaatgatcagcgcaacgatgtggtcaaatcacgtgacgatttgatgcagctcatcaaggatctcgattccacgatggtccaggtgttcaaatccgcgttcgacgataccgccgaggcattcgagcagatgttcgccacgctgttcccaggcggcaccggacgactgcgcctggaaaacccggaagacatgctcaccaccggcgtactggtcgaggccagcccggccggcaagcgcgtcaaacagctgagcctcctgtccggcggcgaacgttcgctgaccgcgctggcgctgctgttcgcgattttcaccgcccgccccagcccgttctatgtgatggacgaggtcgaggccgcgttggacgacgtgaacctgacccgtttgattaatgcgttcaatgagctacgcgcccatgcgcagctcatcatcattacgcaccagcaacgcaccatgtcgattgccgacgcgctttacggcgtaaccatgagagccgatggcgtaacagccgtggtgagtcaaaaactcgaacgataaacgaatggttcccgctgacaggaactggtaccacaggtgacagagggcggtccatatcgaaagaccgccctctgtctcgcttcgttcgacagctcccaccagcgggagcggggagaggtattagcgcaatgccttgcgcacgccttggatggtttgcagcgtcttgtagaagaccttcttgatgggtacgtcgcgggcgggggccaccggggtgatttcctcggtgaacttgcacttgaactcgttaaggcccttgagagacggcgcgaagtcggagccaatgcccatgagatcgtattcagtaataccctgcgatcctaggatgcagcattcggaatacagcagcttgtcggtcacatgcagacgcataacctcgttgcgcatgccggcatagtagcgcaccgcatgcgtgccgttcacggtgacaatcgaccatgccaccacacggtcttcaatacgtgcggcgaacacacggcaatgatcggcacccaacgcgccgatcatatcggaatagtcgctcatcggagcaggcgtgaatccatcgcgctggccggtctcgaccatcacatcgtaatattcggagaaatcggccagcgccttatccgtctcatcggcaacctcggccgggcactcgcgcagagacttgcgcacgtcacggcgtccacgacgcttcatccgagccagaatctcatcatcaccaccggtgacgtcgatgaccacggtctggtcgtacggcactgtggacagcaccttctccgtaccatcggcgaaccaggtgtcgatacgcaggaacgcgatgttcttgtcggccttcttgacggtgtccacgatggcgtcgacgacctcgcgctcctcagcctcggtgggcttggcgacccacgccggcccatgcatcgagcgcagataatgataaccgtgcgtctcaaaatcgataaaggagatcacggcgaccaattcaccatcacgcttgatcagataatcgccccatggcgtgcgtccgtcgatatccgcctgaaaaccagaccaaaccttggtctgttcgataggcaacgtgatgccggccttctcggcttcggcttccagtgtggctccgtcaactttctccaacgtgatcattacgattcagctatcctttttcgttcgtatccgtatgtcgtgtttctggtttggtcgtattgcgcgtgatctgatgtgggccaatcgggatccgatcaggatctgattggccggaatcccgtcacaagccaaacatgcgttcgacgacgtgatcgtcgccgtcgaacggcacatgcttgtgatggtccttgatccaacgctcgttgcccttgccgataatcagcaggatgttgaatcggtcggcgtgcgcacgggcatcgtaaatggcgttggtgatggccgtcagacggtcggaaatcaccgtggaggccacatccttgttcgtgatgtagccttgcatttccatgcagatgtcgatgaacggttcggtgtccgtatcttcggcggtgaaaatgaagttcgcgatacggttctcggcagcctcgacgatttccttacgacgatcgtaggccttgttgccggccgatccggtcaccagcgtgatacgcgggttttcctcgccccaacgctcgtagacgaagtaaagcagcgcggtgacggatgcgtagttgtgcgcataatcgacgatggcgagcgtgttcgactgcggatcgcggaactgttccatacggccggcgatacgtacggattcgatggcgtgcagtgcgccggcgtcatcgagcgatacgccagccgcatgggcgatggcgatggctgccgccgcattgaggtagttgaagtcgccatcgatggacagatggtagtcgccaagggtctgatctccgtcggcgatgtggaaggaggcgtgcgccgtgtcggcgggccaggcgacgacgtccgcactggtgccggcattatccgcgtcatgcagggcgaaggtggttgcgccgatgccggctgccgccgcgtcctcccgcaacagatcggcgtgcagactgtccgcgccgagtaccagcgacttcgcgttggcgatgatctggcgcttgcaatacaggtaatcctcgaacgtggggtgttcgatcgggctgatgtggtcgggggagatgttcaggaacgcggccacatcgaaagtcaggccatagacgcggtccaccttgtacgcctgggaggaaacctccatcaccagatactccatgccgttatcggccgcctcgcgcatcatgcggaaggcgtccatcgattcgggcgtggtcagatcggattcgacgtaggtgtggccgtcaaggcaattatcgaccgaggagaacaatgcggccttgccgccggagacggcgttgataagcgcctgcgtgaagtacgaggtggtcgtcttgcccttggtgccggtgacgccgatgaccgtgagcgcgttctgcggatatccgtagaacgcggcggacagcaggctcatcgccttgcgtgcgtcgttgacgatcaggccgggggtggcggttgcggctgagtactcggtttcggccacgtatgcggccaggccggcttcgtcgatgccgttcagatactcggccttgaatcggcccttgcagcacagcagggtgcccggcgtgaccttgcgggtgtcgtaggtgatgccggcgaacggttcatccgccgaagcgatacgggccgggtcgtcggtccagacatccccttggatgatttcacgcagcagatggtgttccttgagcaggtcagcggccgaagccaaagtcaaagccataattgttactccctattatctagccgatacgccattctacaggtggggtgtagcgtgttgtgactcatacgtcatcgaccacgatatgggcacatgatttgattagaatggtgaaccgtgacgacaagcgaagcaactatgcaatccgggcagtcagccggatcgggcgagtccatggcagccaagcgcgccagattcgagcagctcgccatgcccgccgtcaatgcactgtaccggcaggcgatgaggctgaccaacaatcccgatgacgcgcaggatctggtccaggacaccttcgaacgcgggttcaaggccttcgactcattccagccgggctccaacttcgaggcgtggatgaccaccatcgagcgcaatgcctacttcaaccagtatgccaaggccaagcggcgcccgcagcgtgccaacgactccaccggcgaatacgacgattgggacatttacgatgccgccgaacatacgtcggacgggctcaagtccgctgaagaggaatatttggacgccttcgcgcccgaggaaatcatggccgcgctcgccaaactctcgccggaacgccggcaggtgttcatcgacgccgccatcgacggcaagtcctaccagcaggtggccgatgagcagggcgtgaaaatcggcacggtgatgagccgcctgaatcgcgcccgcacgcaactcaagcgtgagctcgcctcgtatgcgaaagagcgcgggtacgtgactggttcgtcggctggttcaccatccgcgaagttgagcgaaaacgttggtcgaatcgccgattccggccataatgaaagtagtgaacagactgttggcagcaatggcgacacgcaagccgtagtgagacatagtcatgcgactcacgcccacacgccacaacagtcaagcaagctttcgggaaaggagatctgatgaacgatcagccggtagagcgtactcgccatatctccataacccgtacggcggccgatggcacggtaagccagaccgaagtgcatatcacggcggtgcatcatcgttcagtagataccggctcggccgctgcgtcggtccagacagacgtgcatatcgttacggagggcgactgttttgacccccgtacctgctgcgacgagcgtgaacaggcgttgattgccgcgttgcgtgcctacttgcgcccggatgtggcacccgaatgtctgatggcccggctcaaggccacgcttgatcactgctgcggcgaagataagtaacgacatatacaacaaggcccgtctgatgtatcatcagacgggccttgagcgttctataagaaacgcgaagaatcaggcgttaggacgcttgccgtggttggcggccttcttacgacgatccttgcgcttacgtccgcgcatgcccatgatggactcctttgctgcagtaaaaaaataagccttcggaattatgccacataagtacgacgtgatgcaacacgggtgtccatgtggcgatgatcgtcaggcttggttattcggtttttcagatttgttcggcgtggaaggtgaccacggtggtgtagtcatcgcccggctcgagcacaaccagatccttgccggtgcggaaggcgtcggcgtaggcggtcatcggttcgacggccacgccggcctgacgagccttcccgccgatttcgttgccggtgcacacctgccaggagttgatggtcttgtcgccggtcagcgtgaccttgatgccgtcggggcgggtgaacacggcggaagtgctgccgtcttcgccgcggttggtgatatcggtccaggcatcgtcgaagccacgtccctccagcgtggggttatcgcgcaggtcgaagatgccggaaaccggctcttcgccggtgggcagcaggtgttcgtctacggtcacgtgggtatcgcagtgcagctcaagacggcaggactcgttgtcggcggtaatggcctgaccggtggcgtgcttgccgttggccagccacgggtggatgccaaatgcccatggggccttcacgctgtcgttgttgtgcacggtgaaggtttccgtgagaccgttctcgtcaagtgcataagtggcggtgatggtgatatcaaacgggtagccggcgatgtcgggggaacgccaggagagcgtcacatgtgattcctgcaaatcaacgagctcccacatgtagcggtaggcgtagccgtgcagggaggattggcggtcgaactcgtcgatcggcatctggtagtcttcgccatcgaaagaatactgaccattggtcacgcggttcgggtacggtgccagcacccagccgttgcagcaggggatgaccttgttcgggtcgaaggggacgatgaggtcttcgccgcgccacttcagctcgcgcaggctggcacccagttcggtgacgacggcactccattcgccggacgagatgacatattggttaccagtgcgaggcttcaaagccatagtgcacactcctttgtgaaacagattgttaccgctcacaatcgtatcgcataagtcccaagacgcggcggcacataaggataaaaaattggctcccctctggaggggagccagcgtaacggaactacttctggactacttcgtagcggaccacagtggtgtagtcgccattgggggcgagcgtcaccaagtggtcaccagtgcggaaggcattggccggggcggtcatcggttcgacggcgataccatacggatgctcggcgaacggcgcgccagtggcggtgtagcactgccaagcattgatcgtctcatcgccaatgagcttcacttcaataccgtccgggcgggtgaatgtggtggtggtcgtaccatcggcggcacgctccacgtcgacccaggcatcatcaaaggcgcggccttcgagcgtcgggccatcgttcaggtcgtagatgccggtaaccggttcggtgccggtgggaatcagcgcctcgttcaccgtcacatgactgtcggccttaatctgcaggtggcaggcggcggagtcggcatcgcgttcggcgacagtcgcgccctgcttgccgttggccagccacggatgcaggccgagagcccacggtgccggctcgtcgccatcattgcgggcattgacggtcacggtcatgccgttgttgccgagttcgtatgtgacggtcacggtcacatcgaacgggtatccgtccaggttggggaagcgcagtgaaagcgtcacggcgctatcggtcaacgattcaagcttccacatgtagtggtaggcgtatccgtggttcgcgttgttgcgcggtgcgggatgatattcgttgaccggcgcgcagtaatgcttgccattgaaatcgtattcgccgttttcgatgcggtttggccacggggccagcacataaccgttacaggtgggggtcaggtcgttgactccgaacgggcagaaaatttccttgccttgataatcgaatcggcgaatcttggcgccgagttcgcagatgacggcggaataatcgccatagtgaatcgaatactgatttccggtgcgtggtgttttactcgtcatggaatcactcccgtagtgaggttggtgggccggtagctcctgctatcgctggccccagtctagcgcgtctcctctatcgaggcggggattggcgatagccggcatataataaacaattcgtacagacacggtagcaatacgtggagtgacgagtctcacaccatcatgcgagaagcacgtggattccttggaaaccggtgattcgtgggagacgcggaaaagttgtgacggcagattcctgtaatccctgccttacactggaaaacactattgacgttcaggaggttccgatgaccaaaagcgttgtgctcgctgatccgcgaggcttctgcgcgggtgtggaccgtgcgattcttaccgtacagaccattctcaaagccgcggaggcttccggaaagcgaacgcgcgaggatgggctgcccccggtatatgtgcgccggcagatcgtgcacaacaagcatgtggtcgaggatttggccgggcaaggcgcggtgttcgtccaggaattggcggagattccggatgctgctgcccaagcgggtattccggtggtgttttccgcccatggcgtatctccggtagtgaaggcggaagccgaacgtcgtggcatgcatgtggtggatgccacctgccctctggtgggtaaggtgcaccgtgaggtgctgcgtttcgtgcgcgaggggtatgaaatcgtctatatcgggcacaagggccacgatgaagcagtcggcgtggtgggggagaaccccgaacatgtgcacttgatcgagcatgaatcggatgtcgattcgttggattttgcgcccgacaccaagctggtgctgctctcgcagaccacgttgagcgtggatgagaccgccggcaccattgccgcgctgaaggccaagttcccgtggattcaagagccgccgagttcggatatctgctatgccacatcgaatcgtcaggctgcggtcaaactggtggcccagcagtccgattgcgtggtgattgtcggatcggccaactcctcgaattccgtgcgactgatggaggtggcgcaggagggcttggggaagcgcggcaaagcgtatcgcgtggatgatgccagcgagcttgatccggcgtggttcgtcggactggagtccgtgggggtctcctcaggtgcctccgtgccggacgaactggtgtccggtgtgattgacgctctgcaaaacttgggtttcaccggtatgaagtccgtcgaaaccatcaaggaaaacatgcacttcgtgctgccgtcggagttgcgcaggaagaagtagtcatccttggctcccctcaccgagggaagccaagaacggtcaccacgtgccgattggtgcggcaacggcgttcaagaccttgagcaggtcctgcgggttcacgcctacggacagtccgcgtttgccgccggagaccagaatctggtcgaattgcagggcgctttcatccaacacagtcttatgacgtgtcttctggcccaacggcgagatgccacctaccacatagccggattcacgcattgccaccttgggatcggccatagaggccttcttggcacctacagccgcagccagggccttcaaatccatatgtccgctgaccggtaccacgcccaccacacgctccgaaccggtgtccgccatcaacgtcttgaacacctgatgctcgtcgaagccgagcttggtggccgcctccacgccgtagccgtcatccatatggtcgttggagtgctcgtattcgtatacgtggaattccacgcccgccttctccagttggactgtcgccggggtggaacccgcgcccttatcatgcttgcttttctttgccatgattaccgttctactacgaagagacccccgcacaaggcgggggtctcacagcttagttctcaaacgaaccgtagcggcctagaccgcagtggttcactcggagatctcagcgaagtacagcagggtacggatcatgttggaggtgaagccgtactcgttgtcgtagaaggacacggtgcgagccagggtcacgccgtcaatggtgttgacgtcggtctgggtcgggtcgaacacgccaccgtgggtgtcgccgaggatgtcggaggagacgatgccctcatcgttgtagccgtagtaatcggtgtcggagaaggcagccttgaaggcttcgttgatctcgtcggcggtggtctcggtgttcagaacggtggtcagctcggtgacggagccgtccggaacctggacgcgctgggcatggccctgcagcttgccgttcacggacggaacgaccttgccgatggccttggcagcgccggtggagtgggcgatggtgttgatggcggcggcgcgcaggttgcggccggtcttggtgccacgcgggccatcgagcagcatctgggtgccggtgtaggcgtggatggtggtcatgaagccggccttgatgccgaacttctcgtccagcagcttgaccatggcggccatggagttggtggtgcaggaaccggcggagacgatcacgtcggaagccttgaggatgtcgtggttcacgccgaacacaacggtcggggtggtgtcatccttggccggggcggagatcaggaccttcttggcgccagcgttgatgtgagcctgggacttctcggcggaggtgtagaagccggtgcactcgagcacgtactcgacaccgtcgttcttgacccacggaatgttgttggcgtccttctcggcgtagaccttgtattccttgccgtcgacgatgatggagtcttcggtggccttgacgtcaaccggagtgccatcgtcatgacggaaggtgccgtgggtgctgtcgtacttcagcaggtaagccagggtagccggggtggtcagatcgttgatggcggcaacttcaatgtcaccagcctggccgccgcgagcctgcagctcgaagatgcgacggaaggcgagacgaccaatgcgaccgaagccgttgataccaatcttaactgtcatgtaattctcccttgtagggtggccttggcgcgctttggcacaccgggccattgtttaccaacagttgctactgtaatgccgactctgtacacatggcaacgtttcagcgtgcgttttgggtaaaaatgccgtattttttgtgagcgctcacaatttggattgcccgcaaccgacatgtgattttcctctcctttggaggaatgtctcgaatcatcacgagcaagcgcgcggcatgcaagtcagcgaaccagcagcttggacacttcggtgtccagctcgccgatatcgccgccgaattcatggaatctgctcacctgtggcaacgccacttcgatggggaagctgacgatcagtgtgccgcgtttcacgctgatggccgcgtccacgccgtcgcggaactcgttgctgaccccctgcaccaccgtattggtcagcgtgccgttcttgagcttatatttcagccccggttcgttcacgccaagcgaaacatcggagtgggagaacgccgacaccatgcggccgtcctcgggcaccggatgcgcggggaacgaaagcctaccatcggtgatggccgtgacgatgagcccgtcgccatacagatacccgcttgccccgtgtcgggccagcagcgccatcagttgaatgccggaaatcgtatggtcaatacggccgccaagcccgccgtacacgtgaaactcgcggcaacccgccgaccagccgaccttcagcgcggaaagcatgtccgggtcgtccttcaacgcgggcagcgcgatggtgcgcacatcggtgcggggcggccggccctccagcgaatcgaagtcgcccaccaccacatcgggcacgatgcccaactcgcgcgtatggtcgagtccgccatcggccgcaatcacatacgcaccggtgggaaccacgggcgtgcccgcatagtattcgcccgcaccaaaaatcacgcatacctgagtcattatgcctactgtagccggtatccacccatcgacacacggtccgcgaatgtccgggcatgtggtaagattcctatttggcttgagaaatcaagaaagcggggcaaccccacctggaagcctttcaaggcctcgggttcaaggcaaacagcctagcgattgcgatatacaacgcgcaatcaggaatgacgcaaagaactgatatgcgtctgcagaagctgagcgcatattggcgctggttttggcttgccatgaacccaaagcattgaacaggactccagcaaaggccccgccacggaattgaagtagaggattggagtcatcatcagcgacgaaccacgtattaacgacgagattcgcgtcccgcaggtacgcctgatcggcccgaagggcgagcaggtgggcgtcatcgcgacttccgtcgcgctgaacctggccaaggaggcaaacctcgatctcgtcgaggtggccccgaacgcgaagcctccggtcgccaagctcattgattacggcaagttcaagtacaacgagaagatcaaggctcgtgaagctcgccgcaaccagagcaccgcggaaatcaaggagattcgtttccgcctgaagatcgacgaccacgatttcgacgtgaagaagggccatgtgacccgcttccttaacggaggcgacaaggtcaaggtcaccatcatgttgcgcggtcgtgagatctcccgcccgattggtggcgtggaactgctgcagcgtctggccgacgatgtcgaggaatacggcaccgtcgagtccaagccgaagcaggagggccgcaacatcatcatgacccttgcgccgaagggcaagaaggtccacacccagtccgagcagcgtcgtcgtggcgccgagtcccgcgccgagcgtcaggctcgccaggcggctcgtctcgcggccaagcaggagtctcaggctcaggccgcggccgacgcgcagtccgcgatttctcagaagacttccgacaagaagcaaaccagcaaggagggcagcaatgccgaagatgaaaactaattccgccgcttccaagcgcgccaagatcaccggcaccggcaaggtgaagcatgtcggttccgccatgcgtcacaacctcgagcacaagtccgctcgcaagcgtcgtgaactgtccgccgacgatgtgctgcgcggcggccaggccaagaagctgcaccagcttctgcagaagtgagcatagggcttacccggaaataataagactttagaaagctgaggaatagattatggcacgtgtcaagcgcgcagtgaacgcccacaagaagcgtcgcgttgttctcgagagggcttccggctaccgtggccagcgctcccgcctgtaccgcaaggccaaggaacagctgctgcactcctttaactacaacttccgcgaccgtaaggctcgcaagggcgatttccgcaagctgtggatccagcgcatcaacgctgccgtccgcgctgagggcatcacctacaaccgcttcatccagggcctgcgtctcgccggcatcgagctggatcgtcgcgctctggctgagatcgccgtctccgacccgaacaccttcaagaccatcgtggacgccgccaaggccgccctgcctgaggacgtcaacgctccggttgaggcctgattgcttgaagtcgtgacttcacactagaaaccccgcttccgagcggggtttcctattattagcccccctctgacgaggggggctcccgcgcagcgggtggggaagagaacaaacacatgaccaacggattcaccaaactcacagagcagttcctcgtccacatcggcgtggagcgaggactcgccacggccaccgtcaccgcctacgaatccgatatcgccaaatacattgattggctcgaaacccgcggcatccccgaaccggacgccataaccaaacaagacgtcgaagactacatcgccgcccttgaccaggcgggggagtccgcccgctccaaagcccgaagactggcctcgatccatgaattccatcgcttcgcgctcggccagcacgcggtgactgccgacgtttctgccgcagtcaaggcacccaaaggtgccagcaccctgcctgacgtactcaccgtggacgaggtaacccgtctgctcgacgcggcggcagccggcggctcaaccgatccggtggtattgcgggacaaggccctgctcgaattcatgtacgccaccggctgccgcgtctcggaagccaccggtgtgaatctggacgacatcgacctggacgagcacatcgcgcgactcatgggcaagggctccaagcagcggcttgtgccattgggcagctacgcatgccgggccatcaccgcatacctcaatgcggggcgtggcgagctggaacggcgctccagcgccaagattcccgagagacgcgcactgtttctcaacaaacgcggcaagcgcatctcgcggcaatcggtatgggaaatcgtcaaagcaaccggggagcgggccggcatcaccaaaccactccatccgcacaccttgcgccattccttcgccacgcacctgatccaaggcggcgcggacgtgcgcaccgtgcaggaactgcttgggcacgccagcgtgaccaccacgcagatctacacgcacgtaagccccgaaaccctgatcgaaacgtatctgacctcacaccccagagcgcggtgagacacaccattttgcgacgcgtccgcccatagcggaatcgcggcgggggggggagcaccaaagtcggccggaaattcaaggcgtgacaatacagtacataacagcgaaccgtcagccaggaagaggtattcatgctgcagatcaaatcgatctcgaagcgctataaaaccggtgatttcgttcaacaggcgcttgacaaagtcagcctgaacctacgcgacagcgaattcgtcgcgattctgggtccctcgggttccggcaagaccaccttgctcaacatcatcggcggcctcgaccggtatgacgacggcgatttggtgatcaacggcatctcgacgcgccaatacaaggatcgcgattgggattcgtaccgcaaccacaccatcggcttcgtgttccagagctacaatctgattcctcatcagacgattctgtcgaacgtcgaactcgcgctgacgatttccggcatcggcaaggccgaccgtcgcgaacgtgcgcgcaaggcgctggagaaggtcggactcggcgaacacatcaataaaaagccgaaccagctgtccggcggccagatgcagcgcgtggcgatcgcccgcgcactggtcaacgacccggacatcgtcctggccgacgagccgaccggcgcgctcgattcggacacgtccgtgcagatcatgaacctgctcaaggacgtggccaaggaccgcctcgtggtcatggtcacccacaaccccgaacttgcggaacaatatgccacgcgcatcgtcaacctgcgcgacggcgtgatccgctccgactccgacccgtttgtcgtggatgagacggccgaacagccggccgtgcacaagacgatgggccgcgcgtcgatgtcgttcgtcacgtcgctggcgttgagcttcaacaatctgaaaaccaagaaggcgcgcaccctgctgacctcgttcgccggctcgatcggcatcatcggcatcgcgctgattctatcggtgtcgactggcgtgaacgcatacatcagcgacatccagcgtgacacgatgaccgcctacccgatcaccatcgactcccagaccttcgacctgagcagcatgatgggcggccagatgggcggcgatgacggatacggcggcaagacgcacagaaccgacggcatctacccggacgaccgcagcgtcaagcaggcatccagcctgaccagttcgattaccgaaaacaacctgacccgcttcaagaaatacctggataattccaagagcgagattcaccagtatgtgggttccgccggtatccagtacacgtatgacgtgaaattctccgtgttcgaccacgaccccgatggcacgctggtcaatgcggacggcgtgacgatcggtgccagcgactccacttcaatggcctcgcagatggcgtccacaagctcgtccggcatgtccggcacctcgtcgatcacctcgcagcagatgtcgatgctgaccggcaaaaccgatgagaacgccgcgcccgactcgttcaatgagatcatgcctggagcggacgacagcaagctcgtaggcaaggtcatcaccgacaactaccaagtggtcaacggttcatggccgaagtccaaggacgaggtggtgctggtgctcgacgacaacaacagcgtgccgctgaccacgctgtacgagctcggcctgctgcccgcctccgactaccacgagatgatgtccaagctcaacgccggcgacaaggtcagcactccacaagacaagatcgactatgctaaggcgctcgaccagacgctgtacatgattccggcatccgaccagtacgtcaagggcgatgacggccactaccgattcatcggcaacgacaaggatgtaatcgaacagcgcctcgaaacggccaccaaactcaaggtggtgggcgtcgtcaaggcgaagaaggatgcttcggccacaccgttggccgctggcgtgggatacacgcgcgctctgaccaatgatctgatcgaccgtgcggcctccagcgccatcgtcaccgatcagaaggccaacccgaacacgaacgtgctcaacggcatgacgttctcgccctcggacgacgccaccaaggcggccgacgcgcgcacctacgtggtttcgctgggcgtgacgcagaaggcgaacatggccaagtcgatgatgagcgccgggcagcagtccggcacgggcgcatcggaggccgctggtgctggtgctgcaggtgtcgctggcgcggcgggtgccggcgctctgg

SEQ ID NO: 2420 - DNA, 7155 bp, Unknown
  R50_10m  MAG No. k141_10934
gaccggcctcttctccgcggcgggcctgtacatcgggcgcgccttcggcgctcactggcagaaacccgcgcagatcgcaggcggtgtggtgttgattctgatcggcgtcaaagtgctgttggagcatctgggcgtcatcgcgttctgacttgccgtcacgcatctcgtcgccacggatggccatcaatgctcgacggcaccgttccaacgcacgacgtaggcttgacgtagcgattcgattatctgagaggcgtaccatgaccgaaatcacctggaaggaatgcaagaacaagattctacgcatgctgctggtccagctgtcggcctacgcattgctcatcgtggccgcggccgtcaccctgcccggcgccgaccccactgccccccgggtcgtcgcctgcctgacgctggtcgtgttccttgtcttctggccgttgcgcggcacgatgctggatcgcgtcgtcaccttgctgttcggcgcggcctccctgatgttcgtcaccgtgccattccccgccggcaaggtgccgtcggaccagaccgccgcggatggttcgacgcttccgtggtattcgtgggcgttggccatgggcctactgctggtcatgttggtggtcttctcgttcggacgtcagatggctcgtgagaagcgcgaacatcttatccgcgcactctcccacgccgtgacttcaggtgtggcggctctcgccgtggccggctggtgcttcctgcctgatttgggcgcgatgctcgccaagggcaccgttgcgggaaccgttgccctgatcatcctcatcgttttgggactggccttggccgtggcctccacgttgtgggtgcgtgacgccgatccggacccggatatccgctatccgtggatcggtaccggcctgatgccggtaatgctgatgggcgtgaccatcgccgcaaccgcactggtgctcggccgtgtcatcggttgatggacgtctgccgttccatattccgcaaacttgtaacccatgtgtccactacaagcgcgtagaataatgaaaaaccgcgcgaaagcggcataacgccgctgacgactcgtacagccacaccaagcaattgcgtaacacattgcaggataaagggggattagcgtgacggatcttacgttgatgactttcgccagcgaccccgccaccgttttgccatcactcgccctgctttctcatcgcgtccgcgtgctgccgatggatgcagccagcttggtgaagatgccggagaacaccattctgtttctggatgcacgcgatgatctggcgaccgccaaaaccttgtgccgtctcatccacgcttccggcctgtccacgccaatcgtgctggtgctgaccgaaggcggcttcaccgtggtcaactcccagtggggcattgcggatgtggtggtcgccaccgcttccccggctgaagtcgagggccgattgcgattggtctccgagcgcggcaacgctcccgcagccgcagcagccggttctcccgccgaatccaccaccacggtggaagatggccagattcgctccggcgacctcattgtggacaccaacggctataccgcctccctgcatggacgccccatcgatctggcatacaaggagttcgaactcctcaagtacttggtccagcaccccggccgcgtgttcacgcgcgcccagttgctgcaggaagtatggggctacgactactacggtggcactcgtacggtcgacgtgcatatccgtcgtctgcgcgccaagcttggcggcgaatacgaacacctcatcggcaccgtgcgcaacgtgggctaccgattcgacccgccggagacggataaggaaactgccgccgcacagcaggccgccaaagcatcctctgccgccatcggcaccgatgacgatacccccgatctcaacaccgccgcctgacagaccagcagcgctacaaaccatcaatcatcgacattacgccgcttaggtccatacgatgagagaaaccaaatccgcgcgtctcacgcgcatgcatgacgaatacgacattctgcgccaggtgattccggcacccgcttgcgcactgcatttctcgaatccgctcgaattgctgatcgccaccgtgctcagcgcccagaccaccgacaagcgtgtcaacacggtcaccccggaactgttcgccacctaccccaccgcccgtgacttggcggccgcgaacccggcccaagtcgaagacatcattcatccgctggggttctaccgttcgaaaacccagcatctcatcggactggccacggcactggacgaacggttcggcggcgtggtgccgcgcacgatggatgaactgaccagcttgccgggggtcggccgcaaaaccgcgaacgtcgtgctcggcaacgcgttcgatatccccggattcccggtcgatacgcatgtgatgcgcgtaaccggacgactgcgttggcggtcggattggcggtccgcacaccctgatcccgtgaaaatcgagaaggaaatcaccgcctgttttccgcccgaagagtggacgaatctcagccaccgactgattctgttcggccgggccacctgccacgcacgtacccccgactgcgccaactgcccgctgtccgacacctgccctagctatgcgccgcccgccggcaagagcacgtccaagcgctaactcatacctcatcatggtgaattgcggattctaggctgaatccaccgctagactgaaaaccatgcagcacagcaagcggaacaatacatggtccaagtgggggatttttctcggagtcgccgtggcactcggcgcactcgtggttgcgggatggacgttcatgcaaaaccggttccagccgggatcatccctcgatgccgatgtgaccattggcatcgacgatatgccgcaatccttggatattcggtccgattcctctgcggcagccgagcgcctgctcgtcgacaatgtgtatgagacattagtgaccgtcgatcaagacaacaagattcagccgggactggcgacaagctggaagacttccgatgacggactgaccgtcaccctgacactgcaatcgggcgtcaccttctcgaacggtcatacgttggacgcctcggacgccgtgtggtcgttgcaacagaacgtgaccaacaaggtggcggacgtcgacgaattgggcgatctgacgtcggtcgccaatccgaacgccaccacggtggtcattacgcttgccaagcccaatccgacgctgctgcgagcgctgtccggcaaactcggcattgtctacgattccgagtcgtccagtgccgattatcaacgcaaggccataggttccggaccattcaccgtggccgatttccagcctggccattccctgaagctggcgcgcagcgatacctaccatggcaccaaagcggccagcaatatcgttgaatttatgcaatactccgacgccgatgcgctcagcaaggccctgaccgacggcagtctcgatatggcggcaccggtttcggcttcgacggccaccggtttgaacggcaaggatggcctgaccgtcaaggagggggccactacggataaggtgctgctggcctacaacaacggcatcgattcgctgctctccgacgaacaggcgcgtaaagccttccgctatcaaatcgacgcagccggcatcgcctccgcccaacccgacgcagccggagcattgggcggccccatcagcccgctggaacccggatacgaagatttgaccggactgtatccgcatgacgaaaaccaagctgggcagatgttctcctacttcggtgcgcaatatctgactacggtgaatctggtggttcccgaagaataccggtcgttggccgaaaccatcaagcagcagatcgagcggcagccgcgccccacggtgaaccttgaagtgctctccgatgaggattatgccaaacgaatcaaggacggcaaatgggaactgaccgtgatgagcatggacggcacggatgatgccggcatattcgccgaccccgattccatgttccattacgaccataccgaagcgcaacaggcctatgcggatgctcgcgccgccactaatgacgccgattatgaggcacgaatgaaggcgtacgcccggctgatcagcgaggatgcggccagtgattggctgtatacccgcaaatgcttcactgtggcgtccaccaaggtctccggctacccgacctcgatgatcaatcgtcgcatgccgctggccgggttgacggtgaagtaggcaaccttcagtcacggacgggctacgcccgatagtccttggctcactatcgttcgatcgttcgtatctcgcctgcgaacagcctactgggctgtttactgtacagttcggcttgtcatgcaacgtgcataaactttggctttatgactgaaggcaaatccatcatcaacgccaacctcaccccgctgcccgacaaggtcggtgtggacggacttgaagacaagtggcgcgccgtctgggatgaagacggcacctacaaattccgcaatacccgcgaccgcaaggccgtctactccatcgacaccccgccgcccaccgtctccggttcgctgcacgtgggtcacgtgttctcttacacgcacaccgatgtgattgcgcgttacaagcgcatgcgcggctacgacgtgttctacccgatgggttgggatgacaacggcctgcctaccgagcgccgtgtgcagaactactatggcgtgcgcgtggacgtgtctctgccttacgacccggacttcaagccgccgttcgagggcaccgatggcaagaagatcgacgccaaggatcaggtgccgatttcccgcaagaacttcatcgagctgtgcgagcgtctgactgctcaggatgagaagctgttcgaggccctgtggcgcaagctgggcctgtccatcgactggtcgcagacctaccacaccatcggccagcacccgcggcgcgtggctcagaaggccttcctgcgcaaccttgcccgcggcgaggcctaccagcaggacgcccccggcctgtgggacgtgaccttccagaccgcagtggctcaggccgagcttgagtcccgcgaatacccgggcttctaccacaaggtggctttccgctttgaggacggcaccccgatctacatcgagaccacccgccccgagctgctggccgcttgcacctcgctgatcgccaacccgaatgacgaacgttacaagcagtacttcggccaggaagtctactccccgctgttcaaggtcaaggtgccgattctggctcacccggccgccgaaatggacaagggtgccggcatcgccatgtgctgtacgttcggtgatgtgaccgacgttgagtggtggcgcgatctgaagctgcccacccgcccgatcattcagcgcaacggccgtatcgtgatggacaccccggattggatcaccgacccggccggccgtgaggtctttgccgagaccgctggcaagaccacgttctccgcccgtaaggtcatcgtagacaaactgcgtgagtccggcgacctggacggtgagccgacgccgaccaagcgtatgacgaacttctacgagaagggcgacaagccgctcgagatcgtcacctcccgccagtggtacctgaagaacggcggtaccgacgagaaactgaacgccgagctcatcgagcgcggcaaggaactgaacttccaccccgacttcatgcgcgtgcgctacgagaactgggtgcacggcctgaacggcgactggctgatttcccgccagcgcttcttcggtgtaccgttcccgctgtggtacccggtgaacgcttccggcgagccggattacgatcgcccgatcaccccgagcgaggatcgtctgccgatcgacccgaccatcgatgtgccggagggctacgacgagtcccagcgtgatgtgcccggcggcttcaccgccgaaaaggacatcatggatacctgggccacctcttcggtgaccccgcagatcgtgacccactgggctgagccggacgaggcctccaaggccctgttcgcttccaccttcccgatggaccttcgcccgcagggtcaggacatcatccgcacctggctgttctcgactgtggaccgcgcgcacttggagaacaagtgtctgccgtgggcccatgccacgctgtccggctggattctggaccccgaccacaagaagatgtcgaagtccaagggcaacgtcgtggtgccgaacgagccgatcgagaagttcggcgcggacgccgtgcgttactgggccgccgccgctcgcctgggcctcgatgccacgtacgacatcggccagatgaagattggccgtcgactggccatcaagctgctgaacgccaccaagttcgcgctggccatcggccgtgaggacgagaaccatcacgtgggcgctgccgccgagacctcgtggaacccggccgatgtgaccgaaccgctggatcgcgccgctatggccaagctggctttggtggtgcgtcaggccaccgaggcgctggaatcctacgagcattccaaggcgctggaagtcatcgaatcctacttctggcagttctgcgacgactacatcgagctggtcaagaaccgcgcctatggcactccggacgagcacggcaatgtgccgtccgagaaggctgtgaagtccgcccgcaccgctctgggtctgggcttggacgccttcgcacgtctgctggccccgtacctgccgtacgccaccgaggaagtgtggagctggatgcacgccggttccggttccgtgcatcgcgccgcctggccggtcgtggacccgtatgtcgaggccgccaccggtgcttcccccgagctgctgacttgggccggcaaggccgtggagcagctgcgtaagatcaagtccgaggccaaggtctccatgaagaccccaatcctgtctgtggcactgtccgctgcttcggaaggtgtgaacgcgattcacgccgccttgggcgatatcgcgcaggccggtcgcgtggtcggcaagttcgacttggtggccaagcacgccgaggaatccgccgccgaagacgcgcccgaaaccgaggtcgccgtcgaagccagcgagctcggtgagccgccagccaagaagccaaagcactgagcgttgcgcacaacaaca

SEQ ID NO: 2421 - DNA, 3429 bp, Unknown
  R50_10m  MAG No. k141_11013
ccccgaagggtatcgacccgtcaccgtcaatacgcccgtggccgttttcggtggtgaaacgacattcatctgttacggcgaggccaatggcaccgtcacgatgcttggcaatccgaacagcgcgtacgcgggatgcaccggcgtatggaggaccagcgacccaatgcccgccgcataaggttttccctaacccacgtcaccaacatacttcaaacgcagacgttcccaaagctcatggtcacggccgatgcggttgggaaaatcgcgaccgtgaattgcgccggtgatgacgtatttatcccagcaaaaggcatgagcaaggtcggtcaactcaaggacgggtatcgccccaacgttgaaacgcacgtactgttcggcgtgcaggacggcacatggggttatctcaccattctcacggacggctccatcaatttgcgtcaggtctacaccgccagtaacaaaacgtggaggaggatcgccatcaccgccagcttcatcacagcctgacgtgacctatggttttccctaacccagcgtatccggttcgaccgttccggcaccacgagcgccggggatgagatgtaccttaacggtgcgatactgccgggcagtcccgccatcgcggtcatcagcatcgtatggtgcaacaagggcaggtttatcaatcaatcatgggcgcacgtcacgctggcgcgcatggtcggctggaaggcgattggacccgccgtacactccccggttgcggagaacattgcctacgagcatttaggcaagaaccagttcgccgtgaccgacacaggggaaatccaatacgtcacgccgggaaacctcactatccccgagaacgcatggcatcgcggctgcctgatagcgccggtcacgccagcctgactagatgccgtaggagattgccagaccgaatgccaaagtaccctgcacgccgccctgattgttgtaacgcaatacaccgtctgcccgcacgatgatggttttctgattgtctccgtcacgacccccgtaggagaagttgagttcggttggaggcctccagccttcgggcagaatgccgaagtccccgctgccccacgagtcctgaacagaggacttccagtcgatgcgcagcgtgacgagcgacccgcgacgatagcccttgacggtaccgtaagtggagttaatcagcgtcagcactttggtctgggttagggaatcccacacatcctccaagggctgcataacattgaccagcgtgtcaatcgatgtgatggtgatgccgtcgaggttgacgcggcagagtggcaggtcggaggcgatggccccgccgatgatgctgccggtctcgatgcccggatccgcgggcgtggccgcgctgggcttgcccttgatggcttcgagggtgaccgtctccacgccggtgcctgagttcaacgcgtaccgggccacgatgagatcgcgtcgtttttgcccttgcgagccggattggatgttcacgtcggtcggtgcggcgatgtagatctgccggccctcgaccacgaggtcccatgctgggatggtgatgttgttcgcatccttcgccgtcggtttcatcgtccaattccgggttttcaaaatgtatccgcctcgaccgagcatggcggcgtgcatgagcgcgtcgtgcttcgattccacgtgcgggtcgtcgccgccgtgcgagccggttacgagcaggttggttgccataatcacttgccttccgcgttgatgggcttgttgagccagaggttataatccttgtcctgattttcggccaactgtaggtactgctggtagtcggattcgcagaacaggattttcctctggttgccgttgcggtcgatgcgtgtgacctcgtgccagttggggctggccgtcgcgttgggtaacacgtattccttgttgtcacatgacggccggtcacaggagtagagggtgatgttggactgtttcggcatgatgttgctccccttagtcttgttcgtcgggccaactgtattggccggcttcatattggatggttggtgtgccgttggcgagtttgacggtgatgcgcacgatggggctgtccacgctgacgccggtcagcgcgtcgtaggcgcgcacatggtcgtcgatatgcaggccaaggttctcggggatcgtcaaatcgacggtgccttgtttccacatgtccttgagtttgtccctggtctggtcggacagttcggcgccttcggaggatgtgagctcgtaggtctgggctatctcccggtcgccggtcagggtctgggtctgggagatgttgccggactcatccgcgtaccagtcgctgcgcgccctgttgcgcagctggcctttgcccaggcccgtgagatggttgacctgggtccagatgcgttgcgcctcgaaactgatgcgctggtcgctgtccgcgccgccgtacgtgtcggcggcgaccgcgcgaatccggcagtgtccagcgatgtaggtcaggtcgagtctggctccctgctcggtgagcatcatgcgcaatccgtcccacgcgggaatgtacctgcggaacgaatagttgctgatgttgatgccgctcgcttccgagggcacgtcgaacaccgtggacagtccgatccggctgattaccgtgcggatgatgctgttggcgtcgccggagaccgtgagccggtcggcgccggagtcgggttggaggatcttgcccgcaagcaaaccgtgccatgtgcggccggtgagcgtatacagggcatgcccgtcatccacagtgatacgcaccgcgtcgacgcggcctccgaactcggtgccctccgctccgatgtagcagccgtcggagagcagcagtccgggggtggagtgagtgagctcgaagtcattctgctcgtcgccgtactgcaggtcgagtgcgggggagacgagttcgccctgcggcacgtgagcggtattggtccagatcaggtccatggcagtcccgtctgctccaaccagtactccacgtcgaacccgaacgattcatcccatgagacctgctgcagtcccggcgggagggtggcgaacgcgtattcgttggaggcctggtcgcgatgcgttttgtcgaacacgttggtgatgtcgccgttggcggcgaccatcacggccgtgcggggcgagccggtgccgtcgatgatgaggtagccgccggatgggacgctcacgtcggctatcaccttgttgccgccgatgatgatgctcggcgtagagaccggcccgtaaatggtgagcctcatccgcgagggcagggcggattggttgtcgatgctgctgacgttgcgggtcggcgcgtaatcgtagcgatagtcgtagggataacccttgcccctgttgtagcggaccgtcgaccggctgaagctctgcctgaccggtttatgccacaccccgtcaagcaaggcg

SEQ ID NO: 2422 - DNA, 4443 bp, Unknown
  R50_10m  MAG No. k141_11044
gacccttgcggccttcacgcttgccggctgcggcgatacccttggctcggatgatttccttggcgcgggcgacgtcgccttcggcttcggtcagagccttcttgacgtcgagcatgccggcgccggtgtcttcacgaacctgcttgatcagtgcggcggtaattgctgccattgattattctccttgagaaattttgcttacccatgaacgatgggaagcgcttattcaggcacttcccatcgtagagcatcactcggccttgggggcctcggcggtttcgccctcggcggcagccggagcggcggcttcagcggaagcctcggcaggagcctcgttggtcaggagttccttctcccaagcggccatcggctgctcggcggcttcgccctcggccttgttggcgccggagcgctccagcagaccttcggcgacggcgtcagccatcaggctggtcagcagttcgatgccgcggatggcgtcatcgttggccgggatcgggtactcaacggtgtccgggtcggcgttggtgtcgacgatggcgacaaccgggatacccagcttgtgagcttcctcaacagccagggcctccttggtgatgtcgacgacgaacatcgcggacggggtgcggttcatgttgcggataccgcccagctgcctgttgagcttgtccttctcgcgctcgagcaggaggagctccttcttggtcaggccggagccgtgcacgtcggtgaagtccatttcctcaagttccttgaggcggttgacgcgcttggagacggtctggaagttggtcagcatgccgccgagccaacgctcggagacgtaaggcatgttcacgcgggtggcctggttggcgatagcttcctgagcctgcttcttggtgccgacgaagagcacggtgccgttgtgggccacggtggtcttgatgaagtcgtacgccttgtcgatcatgtcgagcgacttgaacaggttgatgatgtggatgccgttgcgctgggtgaggatgaactgcttcatcttcgggttccaacgacgggtctggtggccgaagtgcaggccagccttcagcatatcgctcatagtgatctgagccatggtattactacctttcattgtcggttcttgcctggccatgcgcacctgcgtgcagctgctcccccggtttcacgagttgtgcagccgaccgacacaggccgtcgcgagcatgacgcgaatttgttgtgtgccggttgacaatattgggtggttccggacgccagcgactgcgtccgttgccgggtggcacacaagtttcgagaatagcacggagccagtactaagaagacaggttcccctccttgaggggaacctgtcgccataggcgactgaggggagttacgggcggtaccggcagaaccaccctcagtctcactacgttcgacggctcccgccagcgggagccgggtatggactacttcgcctgacgattgcgcatgtagcgcagggcttcgcggcgttcttccttttccaggcgatccaaatacacgtggccgtcgaggtggtcgcattcgtgctgaagcatacggcccatcagcccggagccctcgagcacgacctcgttgccgtccaggtcgatgccacgcacgcgcgcgtagtcggcacgacgggtcttgtaccacaagccgggcacggacagacaaccttcatcgccgtactgctcgccggacttttcctcaagtacggggttcagaacgtagccgactttgccgtcgatgttgtaggagaaggccctcaggctcacgccgatctggttggcggacaggcccgctcggcccggatcgtccacggtttccaacaggtcgtcaaccaggcggcgtacggccggggtgatctccttgatctcatcgcagggggtgcgcaggactgggtcaggcacgaccctgatctcacggatggccacttctcgttactcctcgttcttctcgtcagccggctggtccggcttgctgccggtgtcagcggcattgtcgacagcgtcggcattgtcggcggaatcgccggtctcgccctcttcgggttcggccttcgacttcttgatcttctccgacacgctagcaatcgaatcagacacgctggttttcatctgttccgaggcctgtttgacctgttcggacgcctgcttgaccgattcggaggatttcttgacggtctccagcgtgctgtcgatgatcttggcagtggcgggcagcggcttgttggatggcttgggcgcgtacagatcctcttcgatgacggtggcgtagcgctgcaataccttgggacgcaccactttcatgctcggggtgagcgtgccgtgctcctgactgaattcctcatccagcaccgcgaatttgcgcacggactcagcgcgggagacattggcgttggcctggtcgatgtactgctggataaaggcgcgcaccgcgtcgttgtcgctggcctcggcgagtgtcatgtcggcattgaggccctgaccttccagccaggaatgcagcatttcggggtcgagctcgataagtgcggacacgaacggcttgccgtcgccgactactactgcatgagccacgatcgggcaggtgtcgatgacatcctccatcggggcggggctgatgttcttgccgccggcggtgatgatgatgtccttcttgcgtccggtaatgaaggtgaagccgcggtcgtcgatacgacccagatcgccggttttgatccagccgtcggcagtcatcgtctgtgcggtgagttcgggctgcttgtagtagccaaggaacacgttcgggccggtcagctcaatttcatcgtcttcgccaagacgcacgcccatgccaggcccaggcttgccgaccgaaccgacctcgttgtcgtcctcccaattgacgagcatcggagcggcggtttcggtcatgccataaccctggatgaaggtgatgtcatccatgccgttgaagaagtgggccaaatccacgttgagcggcgcaccaccgcaggccagccatttgaggttcggtccgagagcggaacgaatggatttgcccaccgtggccatgtagaacgaatggcgcatgcgctcgatgaacgaatggccgcggccggcctgctcatccttgctccacttgacgaagtgcttgaccgactgggcgaagatatgcccctggatgccggcaccagccttctgcgaggccgcgttatacaccttctcgaacacacgtggcacgcccagcaggtaggtgggcctgaagctgcggatatcggcgagcagtcgcttggcgtcgggaatgtatccgaccacgccgcagccaccgatgcacacgtactggatgtagcgggcgaagcagtgcgccagtggcaggaacagcagcagacggttgtcgtcgtacagcatgccacgcagaatctcgtagccgttaagcacgatgtgcgtgtaattgcggttggagagcatcgcgcccttgggcttgccggtggaaccggaggtgtagaccacggtaagcagatcatcggctttgatacgagcgatagccgcatccaacgtctcatcggatacgccatgcccgaagtcagcgacagcgtcaaggccatcggccttgaaattgaacacgtatttcatgcccggatgattgacacggatctgctcaagcgtctgtgcgcgctggaagtcgccggcaaaggcgatggcgggatcgacttcctcgacgatgcccgcggtctgacgggcggaatcggtctcatagacgggcacaaccacagcgccgattgccgcgcaagcgaaatcagccacaccccactcatagcaggtaggcgagtaaatcagcaccatggtgccggctttgacgccaagtcccaacaggcccttggccacctcgcgtacgcgggacagcatttcagtagctgtggcgccgcgccattggtgggtgttgtcatcctgccattccgcgatgatgtcatccggcgtgcgagctgctcgtttggccagcagcgagtagacggtgtcgtcatcggtggtgacatatctgggttcttctacatgttcacgcatggtcactactataggcgaaccagcctatgacacggcagaaccgtcttccgctgccagcgtaggaatcggtgtgagggcggggccgtctggtcagcccagatcggcatagatgcacatccatcgagaaccgatgaacttcagtttgaggttgactcgcagattttcctggccgatggtcatgaataccgccatttccagcgtgtccttgccggtgatcatgccgtcgatcaatgtggggacagtgggcagatagcagaatttcgctttgagctccggatgagtgaccatgtgggtgccgagcaggtattgcatggtttgcagccgttccaggcatggttttgtcatggctctgttgagatgtgcgacgctgagtctgccacgtatcgcgtcc

SEQ ID NO: 2423 - DNA, 9551 bp, Unknown
  R50_10m  MAG No. k141_11134
ctggtgctggtgctggtgctggtgctggcgctggcgcggcgggtgccggcgaacaggccgacgcgatggccgcgatgagcgaacagcagctcgccgacagtttcgactcgtatatcgccacggcttcgaacgacgtgcttgtcgcgatctacgaccagtacgtgtcgaccggcacctacgacgacaacctcgccgcattcggtgtggtgagtcgtgacgcgcccagctcgatcaacgtctacgccgacagcttcgaagacaaggaccacatcgccgacgcgattaccgactacaacaacaccgtctcgaagaaagacaagatcacctacacggattatgtggggctcatgatgagctcggtgaccaccatcgtcaacgtgatttcctacgtgcttatcgcgttcgtgtccgtctcgttgattgtttcctcgatcatgatcggcatcatcacctacatttcggtgctggagcgcaccaaggaaatcggcatcctacgcgcaatgggtgcctcgaagcacaacgtgtcccaggtgttcaatgcggagaccggcatcatcggcctatgctccggcctgttgggcgtgggcttgaccgtgctgctcgatattccgatcaacgccgtgttgcatcacttcatcggcaatgcggacgtcaatgccgccctgccggtgaccggcggcgtggtgctggtgatcctaagcgtggtgctcacgctgatcggcggcctgattccctcgcgcaaggcagccaagcaagacccggccaccgcactgcgcaccgagtaagcgcatcgacatagtacgagacgagatccataaacctcggaacactggaatgcccgctgcaaaacggtgttccgaggcgagcccggcgagtacattaggataggcgagcaggtattcccggcaaagggggcgagggcaacgatggacgactggcgagacatccgcgataaagacagcgcattccgtcaaggaacgctgcctatggcgggaacgtatgtcgttgcacccccagcgaacccggatgttgataaggtagacagtatgcctaccgatttgcttggacgtgaatacgaaaccttccccgcacccgaaccgctgcaacagcacggtccggcgcgtgtcattgccatgtgcaaccagaagggcggcgtaggtaagaccaccagctccatcaatatcgccggtgcgttggcccagtatggccgccgcgtgcttatcgtcgatttcgatccgcagggcgccgccactgtgggactgggcgtcaacgcgaataccgtggagaacacgatttacaccgcgctgttcgatatttccgtggacccacatgatgtggtgcagcacaccgcattcgagaacatcgatgtgattccggcgaacatcgatttgtccgccgccgaggtccaactggtcacagaagtgggccgggagcagatcctgaacagtgtgctgcgcaagctcaagtcggaatacgatctcatcatcgtcgactgccagccatcgctcggcctgctcaccgtgaacgcgcttgccgcagctgatggcgtgatcattcccgtggccgccgaattcttcgccttgcgtggcgtggccctacttatgcagtccatcgaaaaagtgcagtcccgcatcaatcccgcattggaagtggatggcgtgctcatcaccatgtacaccaagacactgcactgcgaagaggtctgccagcgcatttacgaggcgttcagcgaaaaggtgttccacacgttcatctcccgctccatcaaactgcccgattccacggttgccgccgcgcccgtggtggtctatgcacctgagcacaagacatcaaaggaataccgtgaggtggcacgtgagctcattgctcgcggcatcgtggcgtaacgattgtttcgataaacgatgaatgagacttccctttctcggctcccctctctgagggaagctggctcgcgtagcgagactgaggggagctccgcggaagccgaaatcagcacggaggaatccgccacttccggcttccgggtcaacctcgaggtctattccggtccgttcgatgccttgctcggcatgatcgccaacaacaaactcgagctgaccgaagtttccctctcctcgatcaccgaggacttcctgacatacgtgcgcgggctcgacttcacgaaaaacatggatgaggccagcgcctttctcgacatcgcctctattttggtcgaggccaaaagcgtggcgattctgcccggcggcgaagacaaccagtacgacgagcaaagtctcgaggcgctgcgcgaacgcgatttgctgttcgcccgactcctccaataccgcgcctacaagcaggccgccggtgatttccgggcgcgtatcgccgccaatgccggccgattcccgcatccggcggccatggacgagggcattgccgccatgttgcctgagctggtatggacgctgaccccgctcgaactcgcccaactggccgcccgggtcatcgccaacgcgcccgcctccgaagtatcgatccaccagctgcacgtgccgctggtcgatctgcgggcccaatcgctggtggtgcgcgaccggctgattgcagcactggaatccaagggcgaccagtcgatgtcgttcagcgaattgacccgggactgcacttctcgtattgaggtggtggctcggttcatggccgtgctcgtgttcttcaaacaaggtgtgctgcagtatcagcaagatggtccgtttgccgaactgcacctgaggtgggtatccggcgtagacgaaacgatgaacgacgtgaacatttccgaaggcgattttgcgtaaggacggcgactggtgactgaacggattgacgcaacgaatgcaaccgagcacatggcggatgccgaatcgacggctgaatccgcaaaagccgaggtgaggggagtggaggagacgcgccccgaatacgtggatttcacggtagacgattttcccggcgggctgcccgcatgtctggaagcgattctgatggtcgccgaccagccgcagaccgccaccgagctggcccgcattttggcattggaccgcaacacagtcgaagaggcattgcaagccctgcacgatgactatgagggcgatgaatcccgtggcatccgcccgcgcggcttcgaactacgccgcaccgctcgtggctggcagttcgccagtcgcgccgcgttcgagccggtcgtctcatcattcgtcaccgacggccagactgcgagactcagtcaggccgcactggaggcgcttgccatcgtggcctatcgccagcccgtcacccgagcccaagtggccgcgatccgcggtgtcaactccgatggcgtgattcgctcgctcacggtacgcggccttatcaaggaagacggcgtggaccccgaatcccgcgcggcccttttggtcacctccgaatccttcctcgaccaaatgggcctgaagagtctcgacgaactaccctccctagcgccgttcctcccgcccgtcgccgaaatgacacagtcgaaatcggaagacacggacgtgatttcgtagcgattggggcccgctacctgaccaatattcgtgcgctagaccatccaatatgtgatttatggtcattgtgactataagtagtgctatgctctcaatgcggggagaacaaccggtatggaaagaggcatggcatgggattcggcaatgtgtccgagcgccgcagcgcaccgccacaggtcggcgtgtcagtggtgattctggcactcggcccgaaaggcgataccggcaacagtgccgccgattccggcaacgccgcgaactcggcccattcccgtctctggctgcccctggtcaagcgcgtccgtcagccgttcctgggctgctgggcattgcccggcggcgacctgcgctccgatcggtcgttggaacagtccgcctacgcggccctcgaatcgaccacagacctgcacccgcgatacctcgaacagctgtacacctttggaggcccgacccggtcccatggcggattgcccatggtatccgtcgtgtactgggcgctcgtcggccagaccgaggccgcgggcttcgaggatggtgacaacgtacgatggttccccgaagacgaactgcccgagctggcgttcgaccatcgccagatcatcgactacgcgctgctccgcctgcgctccaaaatcgaatactccgacgtggccacccgactgctcggccccacgttcaccctgcgccaactgcacggcgtctatgaggcgattggcggcgaacccctcgacttggcgaacttccgccgcaaaatgcttgcctcgggcgaccttgaagacaccggggagaaggtgcgcgaaggccgccaacgaccggccaccgtctaccgctacatccccaaacgacctgtcgagaatggcacgccccacgaatccgatggcgacgacatcgtggaactgtccagacaaggcgagcgtgaagacgctctcgacgcgctgatcccatccgcgcgcatctgatttttcccgccgacccgcttcgggccggcatcacagacgtatataggaaaggaaccgctatgaccgcactatccactgcgccgtccgttgacgagatcatcgccaagctgggcgcgcaaagcacctgcgatgcaggactgacccaggacccatggcacttcgacaccaccacacccagctacggtccaggtgcctcgatgctcgaccgtctgcccgccaacgcgccgcgccagcaggtgctgccggacgaataccgcaaggcctccgacgaggagctgcagcagcgcatcaccgacgccaagcagcgtctcggctccaaactgttgattctgggccacttctaccagcgtgacgagatcatcaagcacgccgatttcgtgggcgactccttccagctggccaagaacgccaccgaacgcccggacgccgaccacatcgtgttctgcggcgtgcacttcatggccgaaaccgccgacatcctctccacgcccgaacagagcgtgaccctgcccaacctgtccgccggctgctcgatggccgatatggccaacatcgaccaggtccaggaatgctgggaccagctcggcgagatctgcggcacccagcccgacgccgatggcttgcagcagatcatcccggtcacctacatgaactcatccgccgcgctgaaggcgttctgcggacgcaacggcggcatcgtatgcacctcgtccaatgcgcacgccgtgctggaatgggcgttcgcccgcggcaagcgcgtgctgttcttcccggaccagcatctgggccgcaataccgcccgcgcgatgggcattccgctgaacgagatgccgctgtgggatccgttcaaggcacagggcggcgccgccgatccggccgactacgcccgcgccaagatgattctgtggaagggcttctgctccgtgcaccagcgcttcaccgtcgaacaggtcgaacgcgcccgcaaggcatacccgggcgtcaaggtgatcgtgcaccccgagtgctcgatgcaggtggtcgacgccgccgacggcactggctccaccgcgtacatcgtcaaggagatcgccaacgcacccgctggatccgccatcgccgtgggcaccgaaatcaacctggtgaaccgtctggccgcgcagtacccggacaagaccgtgttctgcctggaccccgtggtctgcccctgctccacgatgtaccgcatccacccggcttacctggcttgggctttggagaaccttgaagccggcaacgtggtcaatcgcatcaccgtggacgaagacaccgcccgcgaagccaaggtggcactggagcgcatgctgcgcgttcacccgtgacatgcttctagctcccctccctgaggggagctgtcaccgtaggtgactgagggggggcagatgacgcaaaaacagaggaaagcaacacaatgagcaacactgaaatcgtcgtcgtgggcgcaggcgtcgccggactgtccgcggcactggccgtgaccggcaccggacacgacgtgaccttggtaaccaaggccgaactggtggaatcgaacacctatcatgcgcagggcggcatcgctgcggccatcttctccgacgacgacccgaagctgcacgccgccgacaccatggccgcgggccacggcctgtgcgacccgaaggccgtggacatcctcacccgtgagggtgcggagcgcgtccgcgagttcgccgcggccggcgtccacttcgaccgcgacgcgcagggacacatgctgcgcggcctggaagcggctcattcgcgcgcccgcgtggtgcatgccgggggagacgccaccggcaaagtgctcgaactggacgtctccgccatggtgtgcaagaacccgcgcatccacatcatcgagaacgcattcctcaaagatctcatcgtgcgggacggccacatcgccggcgtccgcctgctgatcgacgggcaggacaaggatctggccgccggtcgggtgatcttggccaccggtggcgcgggtcgtatgtacccgtacaccaccaatccgccggtcgccaccgcggacggtctcgccgccgcatggcgtgcgggagcccaggtcgccgatctggagttctaccagttccatcccaccgccatggccgtgggcgagcacttcctcgtctccgaagccgtgcgcggcgaaggcgcggtgctgctggacgaacacggccaccggtatatgaaggacatcgatccgcgcgccgaactcgcaccgcgcgacgtcgtggcccgcgagaacttccgcgtgatgcaggcgcaaggcggcaagcccgtgatgctcgacgtctcgccgatggcccgcgagaaccccgacctggccagcttcctggcccaccgattcccgaccatcgacgcctatacgcgttcgcttggcttcgactggagcaaggagccgatcccggtggcgcccgccgcgcactactacatgggaggcattcgcaccgatctggacgcccggacctccatccccggcctgtacgcggccggcgaatgcgctcgtaccggtgtcatgggctccaaccgccttgcctccaactcgctgctcgaaggacttgtctacggacgccgcgccggtcttgccgccgtcgcggacggtgacgacgcggtctgggcacccgaaccgttcctgaactccgccaccggtgccgtgttcgaccatgcgccgatcgcgctggccgctcctgccactacggctgctgctgacgataccgccgccgacaaggtctgggaccgtacccgcatccagaacaccatgtggcatggcgtcggcgtactgcgcgacgaggccggactgaaaaccgccatcgccgaactcggccaaggcctcgccgccgcaaacgcccaggctgatataaacgccgatggcgctgcaagcagcgttgaggctttggagaaccgcaacatgctcaccgtaggctatgtggccgccaccgccgcgctcgcccgcaccgagtcgagaggcgcccacgcccgcaccgactacagcgagccagtcgacaactgggcccactccgtcgcctacatcaaggactgacccatgctcacatcacacatcatccgcaccgccgtcgaagcggcgctcgccgaagacgcgccctacggcgacatcacctgcgagaccaccatccccgcggacgaaaccggctcggcccacctcaccgcgcgcgaaaacggtgtgatgagcggcatcgacgtgttcgccgcagccttcgccgcacagaacccggccgtcaccgtcaccgtcaccgtcaaggacggtgagcgattccagcgcggccagatactcgccaccgtggaaggcccggtacgcgacctgctcaccgccgagcgcatcgccctcaacttcacccagcgcatgagcggcatcgccaccatgaccgccgccttcgtggacgcggtgaacgccatctacggcgacgactatgacggacccgtcacccggccacgccgctacgagcgcacccgcatcgtcgatacgcgcaaaaccacgcccggcctgcgcccgttcgagaaatatggcgtggtctgtggcggtggccacaaccatcgctacggactgtccgacgcggtcatgatgaaggacaaccatctggcggcgctcgccgcgcgcggcatcgacctggccggcgcgatccgccacgtgcgcgaacaggtgggccacaccacgcatatcgaagtggaagtcgaccgccttgaccagattcccgccgtgctcgccggcggagcggacaccatcatgctggacaatttctcgctcgacgacacccgtcgcggcgtggagctcatcgacggcaaggccatcgtggaagccagcggcaacatgagcctggagcgagtgccagccgtggccgccaccggcgtggacgtgatctccgtgggcgcgctcacccactcggtgcgcagcatcgaccttggattggattggaactagtcatggccgatacccccaacgcatccggtgaacccggtgaactgtacctggacgccgccgccaccgaaccagtgagcccggcagtcatcgaggccatgaccccgttcctgactgaggcctacgccaatccggccagtgtgcaccagcccggtaaaaccgcggcccgcgcgctggacgcggcccgcgcatcattcgccgcggcgttgggcgcccggccggatgacgtgatcttcacctcaggcggcaccgaatcggacaatctggccatcaaaggcatcgccatggcgcgcatgcgcaaactgggcctgcggccggtctacggactcgacgaaaccgatggcaaacaactggcaagcagccgcccgcgcattatcatttccgctatcgagcacccggccgtggcccaatcggcggcatggctgcacgaatggttcggcttcgaagtcgtgcgcattcccgtggatgcgcaggcgcatctcgatcttgacgcgctcgaacgcgagcttgacggcgaggccggcgaacgtaccacgctggtctccaccatgctggccaacaacgaggtcggcaccgtggaacccgtggaggaactggtccgcatcgcccacgcgcacggcgtgcccatccatgtggacgccgtacaggccgccggccagattccgattcgttttcgtgactgggatgtggacgccctgtccgtatccggacacaaattcggcacgcccaaaggactgggcgcactgctggtacgcggccgcacacccatcgaaccggtgctgtccggcggagggcaggaacgcggcctgcgctccggcacacagaacgtggccggcgccgtggcgcttgccatcggactcaacgaatcgaatgcgcgcatgcaggtgcagtgccgtgagttggtcgcgtcccgagacacgctcatcgacgcggttcgccgggtcgcgcctcgcgccgacctgaccggcgaccccgaacgccgtctgcccggtcacgcctccttcatcttccccggcgtcaccggggaagcgctgctcgtcgacctggacgcgcgtggcatcgctgcctcatccggctcggcctgcgcca

SEQ ID NO: 2424 - DNA, 26267 bp, Unknown
  R50_10m  MAG No. k141_11318
cgataatgcggccggacagctgcccgctgcacacagcggcgttgagagcgcgcaggtcgccgttcagcaagcacacgccacctatgacgaggcggtcgcccaagccaacaagcgtacggtcactgctccggtctcgggcacggtgctgaccatgagcgcggtgcccggtgccgccatcggagcttcctccgatggctcatccacttccgccggcgcagacggtaaaccattgtgtcagatcgccgacctgagtcagatgaaggtcaatgtcaacatcaatgagctggatatcactaaagtggccaaggaccagagcgccaaagtcacgttctccgcggtgccgggactgacgctcgatgccaaggtggataccatcgccagcaccacgtcgcagttggctgattcctcggcaggcgggcagagtggcaacggcggcgtgggatacgccgtgcgtctcatcattcccgcccctgatccgaaactgaagccgggcatgacggccagtgtgaaaatcaccatgcagagcattgacaacgctttgatggtgccgctcgccgccatcgtggatgagggtaaggagagcagcgcggtcatgctcgagaccaacgccgaaacccatgagttcaagcgggtgcgagtcacggtcaaagccaagaacaacaccaaagccgttgtggaaggcaatgtgagcaagggcgatgtcatcatgcttgatggcgcttcggctgccgacaatactggcgatgctgcttcttccacctcgcaaaccgcggcttcggacgaaagggcacgctgatatgttcccgtttcgttccgacgcgagccgggcaaatcgcggcaaacggcgtaatgagaccattgccgtgcccaccgccacagccaacgtcatcgaggttgaaaacatcaaccgcatcttcgagacaggcgacacctacacccatgtgctcaaaggcatcaccatgaacgtgcgccaaggcgagttcctcgccatcatgggaccatccggttccggcaaatccacgctgatgaacacgctgggcctgctcgaccgcccatcatccggcacctaccgcctgtgcggcatggacgtgcagaatctgagtgatgacgaacgctccgaactgcgcgggtggctcatcggcttcgtgttccaatccttcaatctgctgccgcgcaccagcgtgctgcgcaacgtgatgctgcccctggcctattccgactgcccggtgcgtgaacgggaagggcgtgccatcaaagcactccaatcagtggcgttgagtccggaactgttcgaccgcaaaaccaatgaactctccggtggtcagatgcagcgcgtggccatcgccagagcgttggtacaggacccgccgctgattctcggcgacgagccgaccggcaacctggactccaaaaccggcgatgcggtgatgcacacgttcgaacagctcaagcagcaaggcaaaaccatcgtgctcatcacccacagccccgaagtggccgaacgcgccgaccgatgcctgcacatgcgtgacggcgtactgcgtgaagggatgtaccgatgagaacacgggatctgctggcggaaaccggctccgcactgagggcgaacaaaggcaaaagcgcactgaccattctcggcatcgtcatcggcattgccgcggtgattaccatgacctcactgatcggtggcattcgagactctctggtcggcgaactgggtatgaacgcggcgcgcacgatttcgatttacacggacgtcggcacccttgacgacgaacagatcactgcgatgcgcgaggaactgaccgactacgagtacttctcgccgacgaactatggtgccgcctcgtcaatcgccgcgcccggtaccaccgacaaggtgtcggcgagcatcaccggtgtcgacgagcatttcttcgatgtatccggagtgacgattggtcgtggacgggccttcacatcgagtgaagcaacgagtggtgcaatggtggtgattctcgacgggcagggcgtgcagaagctgttcggcagcgcggacattgacgccatcggcagaaccgtcacgcttgacggcaatgaagcaaccgttgtgggtgtggtcgagtcgtctggattgatgggcggcatgggcggcgacagcgtgaatatctatatgcctgccaccactgtggcgctgcggtttgcgtcctcgaacatgggatacatgcagatctacggactggccaaggacggggttgatatcgaccagctcacggaacagacgaagaccgttgtcgctcgcatcatgcgtatcccaaccgaacagatcgaccagaatctgtcggtcgtaagcgcccaatcctccatcgaccagctttccagcttcatgagcgcattccaggtgctggcgggttcggtggccggggtctcgttgctggtgggcggcatcggcattatgaacatgatgctcaccaacgttaccgaacgcatccgcgaaattggcctgcgccgggcattgggtgccactcggcgtgacgtgaccgcgcagttcctcgccgaatccattgcaatcacagtgcttggaggtcttatcggcacgttgatcggctacttgctgtcgttgggcgccgctggattggtgtccggcatcgccggtggcatgagtatcgcgccagcagtttccgtgcagtccatcggactggcagtgggcatctgcatcgctgtcggcgtgattttcggctactatccagctaggcgcgcggcaaagctcgacccggtcgaggcgctacggcatcaataatcgcgtagcaccccgaaatgcagtagggcattgcgcacaccgtcgtggtccacgtcgtcggtgatgtaatcggcggcggcctttggctcggcggtcgcattgcccatcgcgaccccgatgccggcgtaggcgagcatatccgtgtcattgccgccatcgccgaaggccatggtctgcccgcgcgtgatgccgtaatgcgccatgaaccgctggatgccgcgcggcttgccgccatcggccggaatcagatccgtgaaatccggatgccaacgcaccccgcgcacattgctgcacagtcccaccagttcggcctccaactcgggtccgacaaagggactgatctggaaagtctcatgatccagcgcgcgggtgcgcgggtcctcaaaataccgggtcggtgcggttttgcccagtttgctccacgtggcgcgaagcagatcattggactggttgaagtacacgtaatccttctcgccgaaattgcacaccacatcggggtgacggtccagccagtcgagaatcacctcaatatcagcagtatccaaggcctgcgaggcaaagaagccggtgtcatcaaagcaatactgcccattgaacgccaccacgccatcgaacgtcaccggcatggtatccagcaccacgtgcatctgtgaaggcgcgcggcccgtgcaaatcagcaccttgacgcctgcggcctgcagccggtgaatcgcctcgattgtggaatccggcaccgtatgggtcgtgaaactggtgagcgtgccatcgatatcgaagaatacggctcggatatcggcattggcagtatcggtagtcatagcttccattgtcaaagcccctctcgacgtgctttccggcgtgttcgacacgcctatagcgggttatcaaacgcacgaatcccggccattgcatgcgcgccataaaagacacctatacggcaatcggccattttccgtcactttcgcggttcaagcgcgttatggtgttacccgacatcaattttggagagaggaaatccaatgacagcagcaacccagtcggcaactccggccgctcctaacaataacgagccggtgcgtgtgaaccacaccgtccgcaacgtcatcatcaccatcgtggtcgtggcgattatcgccgtggccgcgttcttcggctaccgcgcgtttgccggtgccaacgagtcgtccgccaagggcagcaagggcaacccggtcaagatcggcgtggtcggcgctaccaaccccgaatgggtcaagttcaagcaggacgccgagaaggccggcatctacgtcgacatcgtcgacttccaggactacacctccgaaaacccggcccttgactccggcgagctggacctcaacgaattccagcacctgctctacttggccaactacaacgtgagcaacaagaaggacctgcagcccatcggcggcaccgccatctacccgctcggcgtgtactccaccaaggtcaaggacatcaaggacctgaagcagggcgacaccgtcaccattccgaacgacgaaaccaaccaggcccgcgctatcggcgtgctcaaggccgccggtctcgtgacgctcaagggcgactggaccgccttctccactccggccgacatcgacgaagccaagagcaaggtcaaggtcaccccgctcaaggccgaacaggtggccaccaccctgaaggacccgaccatcgccgctggtgtgatcaacaacgactacgtggccgacgccggtctcaacccgaaggacgccatctaccaggatgacgccgaatccgaagaagctcgcccctacatcaacgtgtgggtggcccgcaaggcggacgtgaacaacgagacctacaagaagctcgtttccatctaccagcagaaggatgtgctcgacgctctgcaggagaactccggcggtaccgcggtgttcgccgacaagttcagcgccagcgagctgcaaggcttcctgtccgacattgagaaggacgccaaagcccagcagtgagccgtggctgatacgagtgcacgactaacctgtccatagccattaccaccaagcggagcgagtacccgagccaacaatcgggattcgctccgcttccgtgaccggacatcaacaaccagcatcagggagcactatgagcgaccccatcatcaccttcgaccatgtcgtgaaggaattcaaaacacgcggacgcggcgcgaacatcgcacgagccgtggatgacgtcagcctgaccatcgatcgcggcgacatcttcggcatcatcggctattccggtgcaggcaaatccacactggtccggcttatcaacgcgctcgaacgacccacctccggcaccgtgaccgtgctcggcaccgatatcacctctttgagtgagaccaagctgcggcccatccgccagaaaatcggcatgattttccagcagttcaacctgttctccaccaaaaccgtggcgcagaacatcgcctacccgctgcaactcgatcactggcgcaaggactatcaggatcgtcgcgtcaacgaacttctcgaattcgtgggccttagtgagcacgcaaacaaatacccctcgcagctgtccggcggccagaagcagcgcgtcggcatcgcccgcgcactggccactaatccggagattctgctcgccgacgaagccaccagcgcgctcgacccggaaaccaccaccgaagtgctggccttgctcaagcgtgtgaacgaggaattcggcatcaccattgtgcttatcacccatcagatgaacgtggtccagcagattgccggccgcgtggccgtaatgagcgccggacgcgtggtcgaatccggcgacgtatacgacgtgttcgccgcgcctcagcagccggtgaccaagcgattcatcgccaccgccctgtccggcctgcccgaggaagaccgggtcgagcgattgcaccacgaatggtcgggccgcatcgtcaccgtgctcatccgccaaaaggacgtttccggcagccatggccacgaactcaaggcatccggacagaacatctccgaactcatcgccaaatacggcgtcgaatccagcctgctctacggcggcatcgacacggtcaaggggaccgccatcggtgccatcacctacgaattcaacgggcccggctggcacgtggacgaattcctgcgcgagctcgccgccaatagcgacgtcattgacttcggcaccgccgcaaagcccgtggcttacgccgacgcagttgccggacatgcctcctacgccgaagaccgcgcccatgacccactggcggccgatactgccaccgcgcccgctgtatccgccgccgcacatgaaggagacaacgcatgatcatcctcgccaactcgcgtagcgactggaacgtgctgcgcccactattgttcgaatccatcggccagaccctgaccatggtgctcgtcacccttgtcatcggcggattcctcggcctgatcctcggcgtggtgctctatggcacccgccccggcaacctgttcgagaacgcggtcgtctaccgcatccttgacatcatcgtcaacatcgtgcgcccgattccgttcatcattttcctggcagccatgcagccgctcaccatcgtcgtggtcggcacgtccatcggcaccgtggccgccatcttcccgatggtggtcatgtgcaccttcgccacttctcgtctggtcgaacagaatctcgtgccggtcgacccgggagtaatcgaggccgcgcgttcgatgggtgccggcaagctcaccatcatccgcaccgtactcatccccgaagccctggcaccgctgatcctggcctacgccttcctgttcatcggcgtgcttgacatgtctgccatggccggctacatcggcggtggcggtctcggtaacttcgccatcgcctacggctaccagaagttcgaccagaccgtcacctggacggccgtgatcatcatgatcgtactggtccaggtggtgcagggcatcgccaacgccatcgccaaacgactgctcaaacgccagcaataacaaggcatactgaccccatagatcgcggccttcgccaatatgaagcgagggccgcaatatattcttcgcgctactagaatcgggaaccatgagtgaacatatcgacatcgaccacgaactcatcaccatccgccactacctgcacgcccatccggagcgtagtttccgtgaattcgacaccagcatctatctgaccgaccagctcaaggcgcacggcatcgagatcctgcacaacccgctggagactggtgttgtggggctcattcagggcgaggccggtcccgggccgcgtatcgggctgcgcgccgacatcgacggcctgcccatcgtggaagactccggactggagttcagctccgtcaatgaaggcgtgatgcacggctgcggccacgacctgcacatgaccggtctgctcggtgccgccttctggctcgccgagcaccgtgacaagttcgccggctcaatcaagattctgttccagccgagtgaggagaccggccaaggcgctcgcgccatgatcgacgccggactcgtggatgacgtcgaagccattatcggcacgcacaacaaccccaactatgcgtccggccagctggccatcggcgtcgagccgatgatggccggctgcgtgaaattccgcgtgaccctccacgcccaaggcacccacgccggctacccgtacaagggcaccgggcccatcgaagcgctcgccagtattattctgagcctgcagaccatcgtgagccgcaacgtcacgcccttccacccgctggtgctgtccgttaccgaagtgcacggcggccatgtgtggaacgtggtgcccgccgaagccggattccaagggactgtgcgctatttccacaagtcggatggcaatctggtcggccgtcgattcaaggaagtggtggaacacaccgccgaggcatacggtatcagcgccgatgtggtctgggatgatttccaagacccgctggtctccgatccaggtcttgccaaggccgtggcggcggatgtcaacgactacgcgcagctcgaaccgatacgtcagtcgatggcgggggaggacttctgcgaattcgccaaggtgacgttgccggtgttcgcgttcgtcgggtcaaacggccaggaaggttgcgccgactggcatagcccgcatttcgtgggtctcgacgaatccattcccaccttcgtcaacttctacgtcaacgccgccctgcgcgtgctcaacgagctgaggtaaatccttttttggctcccctctggaggctgaggcgttaggcagacagcccaatgggctgtctgcagccgaaggtgaggcgacagccgaaccagatatgcgcgggcctcgcccgtccataagtgcaggacgagctatcagcgaagctgactgaggggagtggcattcgttcattaggtcgattcatcgtccattaggtcggtgaacggcgatactggttgttggaatcgcgccattgcaacgactgatatcgcattgcagtgacctaatgaacgcaaaaacgacctaatgaatgacgccaagccggaagaacaggcaatccgacgccatacgcggctacactaagaagctatgacacagcttcgcttcgcactcgcccagatcgacacctgcgtcggcgcgctcgatgccaacgccgccaaagtgctcgactactcccgtaaagccgccgcagggaatgcccaagtggttgttttcccggaaatgaccctcaccggataccccatcgaagatctggccctgcgccgcaccttccgccaagccgcatgggacaaggccaacgaactcgccgcccagctcaacgacgacggcctcggcaatctgttcgtggtggttggcaccgtgggcactgatcgtaagacctccaagccgcgcaaccgactggtggtattgcatcagggcgtggtctgggccggctacgacaagcacttcctgcccaactacggcgtgttcgacgaattccgtatcttctccgccggcgaccgttccgtgaccctcgacgtggatggtgccaccatcggcgtggccatctgcgaggacatctggcaggatggtggcccggtggccgacctggccaccaagaacatcgacctgctgctcaccatcaacggctcgccgtatgaggaaggcaagaccaacacccgtttcgagctcgcccagcgtcgtgccgccgaagtcaacgccccggtcatctacctgaatcaggtcggcggtcaggacgacctggtcttcgacggtggcagcttcgtggtcgatgccgacggcacgcttatcgaacgcggcccgatgttcatggaaaacctgacgttctgggacttcgattccaccgccgaacatcaggtcaaggccgagatcgttccggaactcgacccggacgaagaggtatacactgcctgcgtgctcggcctcaaggactacatggccaagaaccacttcaccggcgtgacgctgggcctctcaggaggcatcgactccgcactggtagccgccatggcggccgacgcatgcggcggcgagaacgtctggggcatctccatgccctccatgtactcctccgatggttccaaagacgacgccgctgacctggcctccaacatcggtgcccattacgaggtccagcctattgagccattgttcaacgcctaccaacagcaacttgaccttgatggcgtctccgccgagaacctgcaggcccgcatccgcggtgtgatcgtgatggccagttccaattctcgcggcctgctcgccgtggccaccggcaacaagtcagagctcgcctgcggctactcaaccatctacggcgatgcggtcggcggctacgcacccatcaaggacctgctcaagacccgtgtctgggagatcagccgttggcgtaacaaggccgcggccgcaggcgtcggtatcggcgggctcaagatcgtgggcaacgaggacggcaacgccggcatcccgttgaaggacggcgtgatgattccggtctcatccatcgagaaggctccctcggccgagttgcgccccgggcagaaggactccgactccctgcccgaatacgcgctgctcgacaaggtgctcgctgcatacatcgagcacgcgcacggccgcgccgacctgttggccgacggcttcgaccaggccaccgtggacactgtgatgcgattggtggaccgcgccgaatggaagcgccgccaatacccgttgggaccaaaggtcacggccctcgcgttcggccgcgaccgccgactgcccgtcaccaacgcgttcagggaataaacatatattgctcccgccagcgggagcaagtaataccgttgaggaggtaccaatgacagacgataacaagaagcagtggtatttcaacaccgtcaagaagcaggccgagctgggcatggtctcaccgattgaacagcgcatgggtccgtacaagaccaaggaagatgccgaacacgcctgggacatcgtggtggaccgcaacgccagatgggaggaggagaactggcgctggaagaactacggtgtgaaatccgcgcaagcgaacgatgaagactgacggccaaaacagacggatacggttctgctgtcaatctcaagaccgaaccgctcaccaagccgctcatacgaacatcacagtatgagcggtttcccatatctggagacgtgcaatagccccatcaatacctagaaaccattggaatggtagcgttcacaaaaaacaatgtgagatagctcactcccaatttcggcttttcccaagcaagtgccaactacactgttgaaccaagggttccgtgaagatgcgaaacctacaaccccatttaaggagtgacatgaccgcagtagaaaatgcagctgtctcccaagaggagctcgacgccaaggcatgggccggcttcaccgagggcaactggcagaaggatattgacgtccgcgacttcatccagaagaactacaccccgtacgagggcgacgagacattcctggctcctgccaccgagaagaccaagcacctgtggaagtacctcgacgacaactacctggccgtggagcgcaagcagcgcgtctacgacgtggacacccacaccccggctggcatcgatgccttcccggccggctacatcgactccccggaagtcgacaacgtgatcgtcggcttgcagaccgacgtgccctgcaagcgcgccatgatgccgaacggcggctggcgtatggtcgagcaggccatcaaggaagccggcaaggagccggatccggagatcaagaagatcttcaccaagtaccgcaagacccacaatgacggcgtgttcggcgtctacaccaagaacatcaaggtcgcccgccacaacaagatcctcaccggtctgccggatgcctacggccgtggccgcatcatcggcgactaccgtcgtgttgccctgtacggtgtcaacaagctgatcgccttcaagaagcgcgacaaggactccatcccgtaccgcaacgacttcaccgagccggagatcgagcactggatccgcttccgcgaggagcacgacgagcagatcaaggctctgaagcagctcatcaacctcggcaacgagtacggcctggacctgtcccgccctgctcagaccgcccaggaagccgtgcagtggacctacatgggctacctggcctccatcaagtcccaggacggcgccgccatgtccttcggccgtaactccgccttcctcgactgcttcatcgagcgcgacctcgaggccggcaagatcaccgagaccgacgcccaggagctcatcgacaacatcgtcatgaagctgcgtatcgtccgcttcctgcgcaccaaggactacgacaacatcttctccggcgacccgtactgggcgacctggtccgacgccggcttcggcgacgatggccgtccgatggtcaccaagacctccttccgtctgctcaacaccctgacccttgagcacctcggacctggccctgagccgaacatcaccatcttctgggatccgaagctgccggaaggctacaagcgcttctgcgccaagatctccatcgacacctcggccatccagtacgagtccgacaaggaaatccgttcccactggggcgacgacgccgccatcgcatgctgcgtctccccgatgcgcgtgggcaagcagatgcagttcttcgccgctcgcgtgaactccgccaaggccctgctgtacgccatcaacggcggccgcgatgagatgaccggcatgcaggtcatcgacaagggcgtcatcgacccgatcgccccggaggccgacggcaccttggactacgagaaggtcaagaacaactacgagaaggcgctcgagtggctgtccgaaacctacgtcgaagcgctgaacatcatccactacatgcacgataagtacgcctacgagtccatcgagatggccctgcacgacaaggaggtgtaccgcaccctcggttgcggcatgtccggtctgtccatcgccgccgactccctgtccgccatcaagtacgccaaggtgtacccgatcaccaacaaggaagccaagaacctcgaaggccacgagtacgagtacgtcgaaggcgccgacgacgatctggtcgtcggctaccgcaccgagggcgagttcccggtctacggcaacgacgacgaccgcgccgacgacatcgccaagtgggtcgtctccaccgtgatgggccaggtcaagcgtctgcccgtctaccgtggcgccgtcccgacccagtccatcctgaccatcacctccaacgtggagtacggcaagaacaccggttccttcccgtcccgccacaagaagggcaccccgtacgctccgggcgccaacccggagaacggcatggactcgcacggcatgctgccgtccatgttctccgtcggcaagatcgactacaacgacgccctcgacggcatctcgctgaccaacaccatcacccccgatggcctgggccgcgatgaagccgagcgcatcggcaacctggtcggcatcctggacgcgggcaacggccacggcctctaccacgcgaacatcaacgttctgcgccgcgagaccatggaggacgccgtcgagcaccccgaaaagtacccgcacctgaccgtgcgcgtctccggctacgcggtgaacttcgtcaagctcaccaaggagcagcagctcgacgtcatctcccgtaccttccaccagggcgccgtcgtcgactgatgaccaaccccgcgaaccgcggcaatgactaactgaaggggtggggcacggctccaccccttccttattttccacagactttcgcatcatttggaacaggaggacaactatgcccgcaacacccacgttccgcaccacgaccaggcatatgctcaaggactcgaagacctatgcctcgcagactttgatgggcggcctttccggctttgaatccccaatcggactcgaccgacgtgaccgcctttccgccctgaaatccggcgatatcggcttcgtccactcttgggacatcaacacctccgtggatggaccgggcacccgcatgaccgtgttcatgtccggctgcccgctgcgctgccagtactgccagaacccggacacttggaagatgcgcgacggcaagcccgtctaccttgacgccatgatcaagaaggtcgatcgttacaaggacctgttcaaggccacgcatggcggtatcaccttctccggcggcgaatccatgatgcagcccgccttcgtctcgcgtgtgttccatgccgccaaggagatgggcgtgcacacctgcctcgatacgtccggcttcctcaacacgaattactccgacgagatgctctaggacatcgacctgtgtctgctcgacgtcaaatccggcgacgaggagacctatcacaaggtcaccggcggcaccttgcagcccaccatcgattttggccagcgactggccaaggccggcaagaagatctgggtacgatttgtgctcgtgccgggcctgaccgactccgaagagaacgtcgaaaacgtggcgaagatctgcgagtccttcggtgatgccgtcgaacacatcgacgtgctgggattccaccagcttggccgcccgaagtggcacgaactgcgcatcccatacccgctggagaaccagaagggacccaacgccgccacccgttcgcgggtggccaaccagttcaaggaccacggcttcaccgtgttttaaattgcagggccgaaccgcgcgtaaataccacgattcggcccgttcgcccataccctagagatatggccgacatctacgcatttcctatgggagcgtccaacgatggacgccccgtacgccctcagggtgtgccggatgaagtatgggcagctgtcgaatccgtcagcaccatgaagcgcatccatgacgtgcgctatcgggagattcccgtgccttccaccttggccgattatggtatcggcgtggaattcgaagcgggagagcgtgccctcggcgatgccttttccgccggtcttggcaacgatgccgaatcacgaatcgccacaggctggatcatgatgctttatgctcatgagctgcgcattgaccgggattccaactggcgttgcgtggcgttcgcgcggctgccgctggaaaccgccgaaaacgattctctgacccccggcatgtactgggatgacatgtgcgactatttcgacggcatcgagccggattcggtatccggcacagtcaccgtgacccaaaacacggcttttggttcgatggccggctccaccagcgccgggtgtgagattcgcgtctcatggaccccgcttgacgggaccggaccggacggtactatggacgccggcgcacaaatccgctcgtgggccgcattcatcagatccaccatccgttttgaggaggatgacgccagttgagtgacgtccgtgacaccgaaccccgactgctgaaagagcctcgcgggggagtgcccgatgtcacttcgtcgctggatggctatcatcgtgcctgcgatgcgctggccgaggcgacgggctcgctggccgccgacgccgaacgggcgtccggattccgctatggacatgaggattggctgattcagttcaaacgtgaaggtgcgggcatcgccttgcttgatcccgtcgccctgacacgggccggagctgactggaatgaattcaatgacgccgtgggcgatgctacatggattctgcatgattctctgatggacttgcccggattcgccgaaatcggactcaaacccaaggccttgttcgacacggaaatagcggcgcgattgctcggcctgcaccgcttcggtctggccgccgtcaccgaacactacctcggcatcacgctggccaaagagcattccgccgccgattggtcctaccgtccgctgccgcgcgactggcgcaactatgcggcgctcgacgtggaggtgcttatcgaactcgaaaccttgatgcgtcgtgacctgaaagccgcaggcaaggacgagtgggccgctgaagagttttctcacgctttggttgcgggtcttgccccgcgcaaacctcatccgattccttggctgcgtatctcgcgcatcacccagctgagtcgtgatccgaggggcttggccatcgccaaatccctatgggaggagcgcgaccggctcgcccggcgatacgacatcgctcccagcctgttattgaccgattcgtcaatcatcgaggccgcgaccaacaagccgcacaatgccgcccaattccgcgcactccgatccctgaacgagcgtgtgcgcattcataccggcaccgagcaggacaaaatgttcgagcggtacgcgccgattcagcgtacggtcaagccgaaggtctggaagcaggccatcgaccgcgccatggccctgaagcccacccaatggcctaccatgcccgcccccgaacaggacgaaaacggtgtggtgaacgcgccccgatccatgcgactgtggcaacagcgccatccggagcgttatgaccgtctgcagcgggtacggcgtgtgatcaaccgcatcgccgaagacacccgcacgccggccgagatgatcatcaagccacagatcctacgcaacctgtgctgggtggaagacccggtggaagtggacgtcgagacgttcctgatcgagcagggcgcaagaaactggcaggtgaaactcattgcaccgtccgtaagtggcgttatcatgtagaggttgccttacggcagaactgtaagaaataacgacttttgaggagtcattagcgtgaagatcagcgttcgtaacctcgagcccaccaaggtgaagctcaccgtcactgttgaaccggaagagctcaacccgtatctggatgcggcccgtaaggaaatcgccaagcaggtgaacgttcccggcttccgtaagggccacgttcccggcaagatcatcgaccagcgcatcggtttcgccgccgtcgccggtgaggccgtgaacgacgcggtcccggagctgtactccaaggccctggatgagaagaagattcgtccgatggctcagccggagttcgacgtgcaggatgttccgcagtccgccaacgacgagaccaagctgaagttcaccgccaccgtcgagcgtcgtcctgacatcgaactgccggaaatcgacggtcttgagatcgccatctccaagccggaagtcaaggatgaggacgtcgacaagcgcctcgagaccctgcgtcagcgcttcggcaccttggtcggcgtggaccgcccggccgccaagggcgacttcgccaacatcgacctgactgctgagattgacggcgagaccgtcgactcccaggaaggcgtgagctacgagctcggctccaacaccatgctcgacggtctggacgaggctcttgacggcctgtccgccggcgaggagaccaccttcgaaggcacgctggaagccggcgagcacgagggccagaaggccaccgtgaaggtcaaggtcaactccgtcaaggctgaggaactgccggagctgaacgatgagttcgcttccgaagcttccgagttcgacactctggacgagctcaaggctgacatccgcaaggctgccgctcaggacgccgaaggtcgtcaggccaccgaggctcgcgatgccttcatcgccaagctgcaggaaggcctcgagatcccggtgccgaagggcgtcaaggccaacatggtcgaagagcagctcaagggcctgaccccggacccggagaaggccaccaaggagcagaaggctcaggccgaggagaccgtggagaaggatctgcgcgatcagatggtgctcgacgctctggccgagaagctggacgttcaggtgtcccagtccgacgtgttcaacttcctcgcctccatcgcccagcagtacggcatggatccgaacaacttcatccaggccatcatcaagaacggtcagatcggctccgccgtgcaggaagtcgcccgctccaagggtctgctcgccggcatgcgcgccgtcaagttcaccgctgatggcgaggttgtggacctctccggcttcctgggcgaggccgctgaggacgaagagtccgagtccgtcgaggccgcttccgctgctgccgccgtggccgacgaactgtccgccaaggatgacgccaaggatgctgagtgagcatagcctcatcgcgttagcgtgattgtttgagcccggaatcgtgtttcacggttccgggctcttcctattctggtaaaaggactatttctttggctcccctttggggggagctgtcgggcgtagcgagactgaggggagttcccaaggcatactcgttgcatagcgtgcggaggttgacatgcagccaacggttactatcaaacgccttggttggctcgctgcggcgaccattgtgctcggcgtgctcatcggtgtgggagcaggtctgctgaccctgttgctctacggcgttgaacatgtgctgctcggctacatcgaaggcccagaattgtctggtccattcggcgtgcccgctgcacgccgtgtgatatcggtgaccgtgggactcggcatcgcgggcattatctggtatctgctacgacacaaaacgactgtggtgccctcagtcaagaaggccgtggcgggaaagcgaatgcctttctggcaaaccattgtgcatgtggtgttgcagattttcatcgtcggctccggtgcctcgatcggccgagaagtcgccccacgcgaactcggcgccatgatcgcgcaacgtttttgcgacctgttccatatcgagggcgttgatggtatcgaccggcgcatggtggtggcagtggctgccggtgccggtctaggaggcgtctatgacgcgccgctggccggcatgttcttcaccgtcgaaatcctgttggtggatgtgacgatcgaaaaggttgcgtttggactgggcgtgtctgccattgccgcattcgtggcggttgcgatcaaagggcattgcctgttctacgacatcaccgccatgcaaccggaatccacgccaacgttaatgctgttcgctctgatctgcggtgcggcatgtggagtgggcggcgcattgttccgaaaaggttcgcaatgggcggaagcgcacaagccgaccggtaaggccattctgtggcagatgccgctggctggtctcatcaccggtttggtggcgattgttgtgccgcaggtgatgggcaacggccgtgccgcagtgcaacttggattcagcacgttcattcctgaaaccgccggcactgctggtgccaggcagtcggcatcttcagcggccgcctctccatggaacttgctgacgggcggcggtaatgtatccgattcggcctctggcgggggagcgggctctggaatggcctcgttttgggccatgcttcagggtgggagcggctcttctggatccgtgatgaacgccggtttcccgctgtcccagtccaatatctggatgttgctgggtgtgttggcactcacttttgtcgccaaggcgctggtgacgctgatgaccattcgctccggtgcatcgggcggtgtgctgcagcccggcatcgcattaggttccacgctgggtgcgatgctcggcctcgtatggatactgatgtttccgactgattcggtaaccgcgtgtgccttgatcggtgcggcttcgttgctttcggcctcacagcaggcaccgcttatggccatgtgcttggtgatggagctgaccgaagcgccgattaccttcttcgtgccagtcggcatggccgtggccacgtcgtcgttgatatcaaagtggttgctgagtcgtaagtaagtagatgcatatattctggctcccctctctgaggggagctgtcgaacacagtgagactgaggggagccgaggtaaagaaagctatgtcagaaaacaccgaagtccgtgcggcacttgaatcgcttgccgctgagccgctcactgagcagattgactactatcgaaagccattcatggtgttatgggccgccattcaggaggcagccagcgatgtggccgaagactacgacttacctgcggatatggcccaattatgggtggccgaacagatgcgccaagtcgccgattcactggtcgatcggctcgcggaaaaagccgtggcccatggtgccagcaagtccaacgtggcgcgagccgccggtgccagccccgccaatgccgcccgtcgcttcccgcgtctgggcgacgatgccgcctcccagacccgcctcctcattgacgacgtcctcgacaccttggaataacccgaaatccctacgctacccgccaaaaagcacgcgaaaagccgccttcagtcgcttcaaggcggtagtctgaacaatgttcgagtaattagaaggagaatcaaggtgagcaatacctttgcgaccttgccggtcatggcgggcgatgacgtcccggccggccccgtcgacccgattttcaaccgtctgctcaaagaccgcatcatctggatgggtgaagaggtcaaggacgatatggccaaccgcatctgcgctcagctgctgatgctggccgccgaggacccgaagaaggacatctggctgtacatcaactcgccgggcggctccatcaccgcaggcatggccatctacgacaccatgcagctcatcgagcctgacgtggcgaccgtgggcctgggcatgtgcgcttccatgggccagttcctgctgagctccggcaccaagggcaagcgttacctgacctcgcacgcccgtgtgctcatgcaccagccttccggcggcatcggcggcaccgccactgacgtgcgcatcaacgccgagctcatcatggacatgaagaaaaccatgagcgagctgaccgctgagcagaccggccacaccctcgaggagatctaccgcgacaacgaatacgaccactggttcaccgcccaggaagccctcgactatggcttcgtggacaagctcgtgaccacgccggacaccatcggcaacaaccagcagggggagtgagactcatggcaagtgaagaagcaaagttcgccgcccgtgccgaccgcttggccggccgtcatggcgtagccggtttcatgccggccgccgcccgcgcagcccagcccgcgccgaccaaccgttacatcatgccgcagttcgtggagaagaccccgtatggcatgaagacccaggacgcctactcccgcctgttcgaggatcgcatcatcttcctcggcgtgcaggtggacgacgcctccgccgacgacgtgatggcccagctgctggtccttgaatcccaggatccgaaccgtgacgtgatgatgtacatcaactcacccggcggttcgatgacggccatgaccgccatctacgacaccatgcagtatatcaagcccgacgtgcagaccgtgtgtctcggccaggccgcctccgccgccgccattctgctggcctccggcaccaagggcaagcgcctgatgctgccgaacgcccgtgtgctcatccaccagccggccatcgaccaaggattcggcaaggccacggagatcgagattcaggccaaggaaatgctgcgtatgcgcgaatggctggaggagaccctcgccaagcacaccggccaggatgtcgagaagattcgccgcgacatcgaagtggacactttcctgaccgctcctgaagccaaggaatacggcatcgtggacgaggtgctggaacaccgccagtaaaacttccgaacattgcaataccctcggtcggcaacgaccgggggtattgtatttcaaggatgacaatgataatgcgcagcgtggcggttcgacggtgcggcgcggtcggcaaaggagaatcatgggacgtgtggtgagctacaacgaggacgtaccccgttgcacgttctgcggcaaaaccgaacatcaggtacgaaaactggtggccggtcccaatgcctccatctgcgatgaatgcatcgccctgtgcgtggacatcatctccgaggagcgtgtcaaagatgccgaggtcaattcgctgagcctgcccaagcccgctcagatcttcgattatctcaaccgctacgtcatcggtcaggagaacgccaagcgcgcattgtccgtggccgtatacaatcattacaaacgcgtcaatatggagcttcaggagtccgctgagcagcttgacgggaataacgggcacggtggccagaccggcaaacaagccaagcaatccgctcccgcccagacgcgtgctacccgccgcaacagtgaccctttggctgacgttgaggtcgccaaatcaaacattctgttgctcggccccaccggtgtgggcaaaacctatcttgcacaggcgttggcccgcgtaatgaacgtgccattcgtcatcaccgacgccaccaccctgaccgaggccggctatgtaggcgacgatgtggaaaccgtgctccaacgtctcctccaagctgcggatggcgacgtaagccgagcccagcacggcatcatctacattgacgaaatcgataagatcgcgcgcaaatcaggtgagaacacctccatcacccgtgacgtgtccggtgagggcgttcagcaggcgttgctgaagattttggaaggcaccatcgcctccgtgccgttggagggcacgcgcaagcataaggagcaggacactgcgcagatggacacacgcggcatcctattcatctgcggcggtgcgttcgtgggactgacggatattgttcgcaagcgattgggccgtcgagagaccggcttcggcgcgaattggcacgacgccgacatgaaagacgaggaattgctcgaacaggtcaatgccgatgatctggccgagttcgggctgttgcctgagttcatcggacgtttgccggtcaccagtgtgctgaaggaacttaccgtagacgatctgacggcgattctcacccagccagccaacgcgctgatcaagcagtaccgtaagctgttcgccgtcgacggcgtcgacctgcagttcaccgaacaggccattcgggcgattgctgatatcgccatcaagcaggggaccggcgcacgcgggttgcgttcgattatcgaacgtacgttgcaggacacgatgttccagttgccgagtttggatgatgtgaagcaggtgattgtggacaaggcgtccgtagagggttccagtacgcccaaactcttgcgcgaagccgtggatgtgccgcagggacgcctcaaagttgcgtagtcggttttgcttgaccgagtccgtacacatgcggcgtgaggccagtaaatacgccgttgcggtggtgattaggatggtgcgactcgccgcaacacgccgagttgcattcatctgaacggcgtgtattatatatcgagttgtctgaaaagacgacatgcgccagtagcccagcggattagagcagctgactacggatcagcaggtcgcaggttcgaatcctgtctggcgcactcccgaaccacggggacaacagtggtatgcgccagtagcccagcggattagagcagctgactacggatcagcaggtcgcaggttcgaatcctgtctggcgcacagtaagcctcgaaagcgaaatgcttccgaggcttttccaattgtattggcccgtttgagtcggccacacaggggtggggtaaggttgcccttcgcgactcagcccggagcggaacgtcctgagatattccgtactattacatacggttcatccaagagagtacagcaaggagacgcgatggccacgaccgccggcgcgaagaagggactttggtccaccatcaggcgaatcgccgcctcagaccgtatttccggactcatcatgctcggcttcgcgctcaccggcctggtgctcgcgaacctgcccgccaccgcgcatgcgttcgagaccgtagcggaaacgcatctgttcatcccctacaccaatctcgacctgccgattggccattgggcccaggatggtctgcttaccatcttcttcctgaccgtgggcctcgaactgaagcaggaactcaccaccggctcgctcgccaatccgaaagcggccgccgtgccgatgctgtgcgcggtgggcggcatgatcgccccgcccatcctgttcctggccgtcacggcattgttctctcagatcgggcctggtgaacccggcacgctgattctgaccaccaccggcagcagcatcccgttctcggagatgtcgcacggctgggcagtgcccaccgccacggatatcgcgttctcactggccgtgctcgccctgttcgccaaggccctgcccggttcgatccgcgcgttcctgatgacgcttgccaccgtcgacgacctgctggccattattctgatcgccgtattcttctcctcgatcaacgcctggtattggttcatcggcatcgccgtatgcgccgccatctgggcatacctcgtacgactgaaaaaagtgccgtggatcgcggtcggcatcgtcggcgtcctcgcttggatcatgatgttcgaggcaggcgtgcaccccacactggccggcgtgctggttggcctgctgaccccctcccgtgaaatgcacggcgaactctcaccgcgtgccgaacgctatgccaacaagcttcagccattctccgcactgctggccctgcccatcttcgccctgttcgccaccggcgtgcacttcgagtcgatgagcccgctgttgctggcttcgccgttggttatcgcactgattgtggctttggtggtcggcaaacctttgggcatcatcaccaccgcatggctggccacgcatgtgggcgggctcaagatggccaaggggctgcgcgtacgtgacatgattcccgctgccgtcgcctgcggcattggttttactgtgtccttcctcatcgcctcgctggcgtacaagaatgcggaactttccgctgaggcgcgcttcggcgtgctggtggcctccctgatcgccgccgcgatttccggtgtgctgctgagccgtcagtccaagagattcgagaaggccgcagccgcagcagcggccgatgcggaggatgacgaatcgattgatggcgatggcgctggtcagaccggtcgcaccacaaagtccaccacgcccacggaacaccccggcaccctcgccgacggcaccgccagtgtggagattgacttccgccactgatggcttagacgatccctactccattgttggccttgtttcgtgaaaaccgtacgctgagacgcgctcagagtacgttcttcacgaaatttcgcggaaaacgtacgcagagcttcaggcgctagaatgcgaagagtcgatagcaccgtacaggaggatattggatggcaaagaagcagaagaaatccaagaagaacgacggcaaaaaggccgctgaagcaaagaatctagccgaggccgcatccaagtccacagtcgtggacgatatggaaccattggaagccacagccgcgaatgatgcgacaacgttggaggccgagacggcaaccgaggctgccgcaacgccggtgaacccggtcgacttggaggacgtctcgccgctgggcgacacctatcatcgcggcccggtgattctacgcggccagatgattcccccggacaacaccaccgccaacctgctgaaacccgaccaggacaccgactggctgcacatggacccatggcgtgtgctgcgcatccaatcggaattcgtggacggtttcggggcgctcgccgagctcggacctgcggtctctattttcggctccgcacgcacccagcgcaccgaatcgatctacaaggcggcccggcgcatgggtagccagatagccaagcgcaacatcgccgtcatcaccggcggtggtcccggcatcatggaagccgcgaataggggagcggcactggccggcggcaaatccgtgggactcggcatcgaattgccgcacgagcaggggttgaaccagtgggtgaacctcggcatgagcttccggtacttctttgtgcggaaaaccatattcgtcaagtattcctccggcgtgatcgtgtgcccgggcggcttcggcacactggatgagatgttcgagctgctgaccttggtccagacccacaaggtggcgaatattccggtggtgctctacggcaaggaatactggcaggggctctttgactggctcaacggtccggtggccgagcacggcatgatttcggcaatcgacccgaaactggtcaccgtgaccgatgacgccgacgaagccgtggaggtggccgtcagcgcaattgtgaggtaagcgagatagagtggctcccctctccgaggggagccaagggcagagttactttttgtaggcgatgagcaggcctgtgccgtcaggggtaagcgtggactcgaaaccttcgtcatcttcgacggtggtgagcagctcacgcatggcgatggccttgtcgctgcggtcggccggattaatcatgccgccctgaccgtcctccaacgccagcacatcggtgaacacgatcacgccgtgcgcgcgcagcagacgggaggcctgggcgaacgtggcggcatagttctcggcgtcgcccgccaccacgatcagatcgtaatcattggcgttgaggcgcggcagaaacacgctggccggggcgttcaccgcacgcaacgtggtgtcggtctcatcctgcagttcggcgaacgccttgcgaatcagcgcgatgccctgagcggtggaatcgaccgcagtcagcaggcccttgttatccagcgcatgggcgagctgcaaggtctccaccagtgagccggtgcctacggcgatgaccgaagcggcgccggtgatgcgcaccagcatgcccagcagacgggcctgcgcggccgaaccctgcaactggccggacttgtcggcggccgtacgggcgtcggtcaacgcattggattcacgttcgcgcgcgtgttcctcggtgaattcccatgccttggcgaggttggtgtactgtgttctgtccataattcgttcctttatgtcttctctcgtgcgggc

SEQ ID NO: 2425 - DNA, 2938 bp, Unknown
  R50_10m  MAG No. k141_11337
atcgaaggtcttgaacggggtggtgaagcccatgtcctgagagatggccttcttgccggtgtcggaggtgatcacccaggagaggaagtcctcggtggccttcttgtcggcgtcggaggccttgtcgttgatgcaccagtagttctcggaaccagtggccaagccctgcttctcttcacccttgacaccggtgtagattggcatcatgcccacggattcggccttcatgccggccttctgcaggtcggtccaagcccaggtgccgttctggtagaaggcggcctcgccgagcgcgaactcggcgttcgcatcatcgccggtcttggcgctcagctgggtggggtcggtggtggagtcggtgatgtacaggtcgacgatcttcttgtagttcggcagataagtgcccttgatggtggccggctgctcggtgacgttgtcgtccttgaactcatagtagagcggcaggttggccagatgggtcttgaatcgccagtcggagctggagtcgaagccggcggaggtgaacgcgcccttgatgccgagctcgtccttgcgggcctgcatgtcgtcggccacggccttcagggtgtcgaagttgtcgatttcgtccatggacgtggccttggcgccatccagcgcgaagtacttgttgaggatgtccttgttgtagatcaggccgtaggtttccatcacatacggcacgccgaccaccttgtcgccatccttcagggccacatcttggttggtgagctccttgtacacatccgtattggacatgtcggcggtgtacttcttccagttctggtagccgaccgggccgttgacctggaacaaggtcggggcttcggttttggcgatttcggacttcagggtctgctcgtaggtaccggaggccgcggtctgcaccttgacctcaacgcccttttccttggtgtattccttggccagagcggtccactgatcagccgcttccggcttgaaattcaggtagtagaccttgcccttggcgtcatcgccggaggtcgagcttccgcaggccgccaaagcgccaagggacatcgcagcgacagccgccatcgcgactgctgacttgactgtacgattcatcatcgaacctttctctttcatcgtcgacccggccgtccccggtcgggacaggtacgctagcacgcacctttacgactatcgacatgcactattgtgcaacggtttgcttctttttgcaaacgatagcaatatcggcgcgtcataaatcatcattttcaggccattgtcaacaaatatcccattaattcagtcatttttgcctcattatcgcaatgcaagcgttcgcaatcatgagagcgctaacatatctttcatggcaatcgattgccacttatacccatcaaaaaacaacacgccgacgctatcgtttgcaaatcatttatcgacataccgcaattcccgccacaaacaataaaggcccgcccgcagtagcgggcaggccagcgcaatcgcagcgcaaccggggctaggcgttccaccgttcgatgacgttatctcccttatagacgctgagcaccgagtagtgcgccgtatccaaacgcagcaaccgtgcgaaatgcgggtccacgcccagccattgcgaggtgaggatgcgcaggatgtgcgcatgagccaccaacagcacattatggccgtctttcagcagcggcgtaatctcgtcgatggcgctcttggcgcgtgccgccgcttcttccagcgtctcgccaggcccggcatggaccggcacctgttcgcccgaaggcaaggtctcgacccagtcgccctccagcgtgggcgtcagcgagcgcggcccgtcacgccacacatcccattcaaaaccgctggcctcactcacctgctggcgcgtacgcccctcggctcggccgtaatcccattcagcgatgccgtccaacacaccgtggtccgcaaaaccagccaattcagcggtttggcacgcccgcttcagcggactggaaaacacacagctctggctgaatccttcggggaaggcctcgcgcaggcgccttccggcatccgctgcctgctgctcgccgaccgcggtcaacgggatgtccgtgcgcccggtatgctgcccggattcgctccacacggtctggccgtggcgcagcaacaccaaaaatccattgccgccacgagagttctcgacggcaacggtgccgttcacgttctgttcgctcatgcctccactctagtctgcgctcgttcatgactccaccattaacgcccatcttttgcgctgagatgattgagatgctattagactgagagtcatgagcgacgaaacgaacaccgacttcccctccagcgccgaccgtgcggtcgacagcctgcaccgcatcgacgagaaggtcaacaggctgcgcgaggaccggctcaacgaccctgattctctgggcgacaagctcatcaagtcggcagtcccagcgctggcaggcttggttgccggcaaagcattccagatgatatgggacaagggcacaagcaaacgcaatctgcgcaagggactggcggcagacgcgccgcaaagtctggcaatgagtctggcattcgccgccgtttcggccgcactcggcgcagtggtttcgcagctgtcggatcggggctccaaggcgttcgtcgaccaccgccatcgcaagcccagccgctaatcccccggttggatgatggtttctgttggctgactgatgactcatcgctggaatttcgtcaaggaaccatcagccaatcgacaggaaccatcagtccagcacagttccgccacacaatatcggcatttcactgtgaggtaatccaccgtggcgtccggcgtctgccgtgcgacaataaagccatggttaccaacgcaacaatcgaggctcttctgggccgccgctccatccgtaagttcaag

SEQ ID NO: 2426 - DNA, 13433 bp, Unknown
  R50_10m  MAG No. k141_11467
gtccatggttgcggtcggatagtggatactttaacttggttcccgatggcgtgagcaagcacccctcacacaacaaaaagggcggggatcttgcgatcctcgccctttatttccgaactgcctaacggtatccgttcagtgagtcagactcacttcttggacatctcggtgtaggtcgggaggttctgccaatcgaaggcgtagccggacttcacgctgagggaagccgcgccggaggcgttggagtagtacagcgggatggccggaaggtcgttgaggaggatttcctcagcctgctggtacagcttgttggcgtcatcaacggacttggcggcggcggcctgcttgcacatgtcgtcgaaggccgggttcttgtagtcaccgtcgttggagccgttgccgtcagcagcagcggtggagtacagctgccacaggtagttctcggcggacgggtagtcaggctgccagccggtacggaaggcgcccttcatctgacggttggtgacggcgtcacggaactcctggaaggtcgggatcgggttggtggccgcgtcgatgcccaagttgttcttgagctggttcacgacggcgtcgtaaatcggcttggcaccaccatcggcgttgtaggagaaggtgagctggccgtcgtacttggagatggcgtcagccttggcccacagttccttggccttggaggcgttgaacttcaggttgtcggcacccttgagggagtcggagtagcccggggtcttcggggaggtgaactcggtggcggcggcggcgttaccgttgagcaccttgtcgatgagctggtcacggttgatggccatggagatggcctgacgacgcagctgaccttcctcgtcgttcttgaagtgatcaagggaggacgggatggtgaaggtctggatgacggagccggcctcggagtaagcctggaccttcttgtcggtcttgaaggtcttggtgaaggcggccgggacggattccatcacgtcgaggttgccggcctgaatgtcacggtaagcggcggagtcgtcggtgtagaccttgaaggtcacgccgtcgttcttgggctgctcgttacccttgtagtcagggttcttgacgagggcgatttccttgttgtgatcccagtggtccagcttgtacgggccattggagacaggcttctcgccgaaggccttcggatccttgtagaaggattccggcagcggggcgaaggccgagtagccgaccttgatcgggaacacggagtcggactggttcaggtcgacggtgaaggtggtgtcgtccacgaccttgaggccggagagctgctcgtcacccttgaggccatccttctgcagatcgtcatagccggcgatggtggagaagaaggaggagcacttctgggcgttcttggcgttggccacgtaggaccaggccttggtgaaggactcagcggtcaccggagtgccgtcggtgaacttccagccagacttgatcttgatggtgtactgggtggcgtcatcgttcggggtgatggactcggccacttcgttggaagccttgccgtccttgtcgaaggagaccagacgggagaacagcaggtcgaccggcttgccgccgccggtttcgttggtgttgcccgggatcagcgggttctgcggttcggagttgtacgcagtgatgatgttggagccagcggtgttaccggaggcagcgttgctgttggagccgccgcaggcgctcagcagcatggccacggagcaggccatggcagcgaaagcaagagctttcttcttcatatgatttctcctattcattaggttgcaggacgtctcagccccgcctcatgcaaacggggctggattccccgtcaccgtgagacttgcatctcacgatgtctcgaacaatccaaccccgttgctgattacctgtcatttttgcgcacttgggagacaagcagtgtattttttgttacacccatgtaaaattcaggggttcttgccggctaggttcagtctttgctgagtttgttaaccaatgtccacatagtggtcatgcccgcggaaaggcctgtccgtaacggttcttgagctgctcgatggagacgtgcgtatagcgttgtgtagttttcaaggaggaatgcccgagcatctcctgcacctccctcaaatcggcaccgccgtccagtatgtgcgtggcggcggaatgacgcaacgcatgggggctgatgtccggcacgccggcctctcgggccgctctgtgcacgatgtcacgggctatgcgttggtcgatacggccgcctcgtgcgccgaggaacagggcgttggcagcacgggacttgactgcatccgttgccgtacgggccagtaccggccgcccctgttccagccaagtctccagcgcacgctgggcgggtagtccgaacggcaccacgcgttgcttgttgcctttgccggtgactttgatggtgcgagtggagaagtcgatgtcggcgatatccatcgacaccagttcggcgacacggatgccggtggcatacagcagttcgagaatcgcggcgttgcgctgcgattcggcggtgactcgggcgttgtcgcgcttgtctgcacgggcgggtgcctcactgcggtttacggtatcggccgacttatcagctgtcttgccgctgccgctgccggacgcggctgccgctcccccatcgtccttgtactggtttgttgcaacggcatgttcagcgacatccaataattgctcggcctgggattcggtgagcaccgcgggcagcgtgctgggaatcgagggagtcatcagtgtggcggccgggtcggtggtggtcagcccatgctcataggcccacgcgaagaacccgcgcacggccacggttttgcgggccatgctgctgcgggcgtgatcgcgcgattccaccgccatccagctgcgcagatcatccagcgtgatctcgttcagatcggtcacgccgcgcagctcgaacagatgcaggcatgccgtgagatccgcgcgatacgctttgagcgtattcgctgacaggccgcggttggacttcagataggagacgaaggagtcgatatcgccgtcgaactgcgtagatgacactctcgttctcctccgaattctttatggccttgggttacggccggggtggcgtgttgcgccgctccggcacgggtttcaatgtggcaatctgttcctgatggatggtcacgttctgggccgggcgcgaaccattggcggcggcgtcacgcaccatctccaacgtgtatccatcccaggaaaccacatgccccacatagtcgcggaacttcatacggtggtcgaccgggtcaatgccgtcggtgatgcgcaccaccacgcgggcaccggccggaatctgccttggtaacgtcatacgtcatcatccccttagccatccgccgcatcaacttctatgcgtttcctgaaaaacggtacagactaccttactcctttgggtctttcgaacagcggagccacacggtcttctcacgaaaacaagcgggaacttcatccccctcgcgcagccttcttcgtgacgggcggcgaggggaacctgcacacgggctgcatggcggggcgcagttacatggcggggcgcagttggacgatggcctgacgcggatggatgaaaccggtgatggcttctccccggcgtgcggagaacagcaaggtctgctgccagccggcttcggggacggcgagctcgcgttccgggaatccggcggcagttgtgccggcttgctgcgcggtggccgtaccagcttgtgcagcggtgatgccggctcgcgtcacggcggccttgtaccggcggaaggggtcgccttcggcgaagaatcccatcacatcctgctcgccgtcggcaccagcgtgcagttggtcggccatatcggtcagacatgccgccatgcggcgcagcagcacttcgacgttcagcgagtcttcctcgaccatcgcgcgcgtgcggtccgggtcggtcagggacacgcgggtcatgtccctccagcagccggcagccagcgcggcggcgatgttgcggtccgggttggcgaccagttcgttgatcagcgcggtggacaccacatgcggcatgtgggagatcatcgccgcggccttgtcatgcgtttcgtcgtccacgacgatgacgcggttgccgacgtccttggtgatcatcgtggcgacgtcgaggaagcggcggtagtccgtggactcgtccacggtgatggcccatagggcaccgtcgtacagatgcgggtcggcggcctgccagccggacagttcgttgccggccatcggatgggcgccgacatagcacttccccagcgcggcagccttgacctgatcgcggaccatgcccttgactgagcccacgtcggtgagcgtggtgttcggatggtcgcccataagcggggctagggcggcgaggattgagggcatcgccttgagcggattgcacagcacgaccacatccggctcggcatccatgagttcggagagcgtgctcttgcagaaaatgccatcggcttcggcctgggcgtaggggtgcgagcgatggttccacgcgatgacgcgtacaccgcgctcggtcaggcggcgtgcgagcgagccgccaatcaatccgagtccgacgattccgactgtgtctaccacagcagttccttccttgctccctcggcgtactgccagccttccgacgcacgattggtgatgtggacgccgccctcgggcagcatccaggcgtcgaccggcgggttcgggcgttcgcggcgtgggtagacggccagggtttttgcccagtcgccgtgtccggcgatctcttccagtgcggtgcggaatcttggctcccagggggcggcgtcaagggtggcgatgaagctgtaggttccgtcgtggcctttgatcgggcgcgagatgaagctggtcatgttcagccccgcatcacgcaggacgtccagcaggtcggcgagcacgccggggccggtgaccagcgggatgaaggtgatgatggtttcgaagtcgccggcgtcattgcggtgggcgcgggcgttgaattcctggaccacatcacgcggggcgatgacaaggaattcggtgtgcgcgccatcgaaatcctgcacatgttcggcgagggtgtcgagatcgtagagttcgccgcagatgctggggccgagcgccacgcggccgggcttcaggtcgcggcaggcggcggcgttggaggatgcgggttcgggctgcaaatggtgttcggtgatgaaccgggtgcattgggccaggccgtgcgggtgggcgctgacggggttgccggtgcagtcgcagatgctgtggccgcgcacggtgaaggcgttgaaggccacgtccacactgatccgggcgaagccggccgcgtcgggggcgtcgatcagcgcgtcgagattcgggaccacatagccttcgacgttgttttcccatgcgatgacgccccagccttggcgcgactgtacggcctgcatgatcgcgggcacgtcgggcagggcggtgaggtcgaagtcgccgagtgtggcgaactggtcggcggccgtcattgccgcctgatgggtgaaggtgccttccgggcccaagtaaaacagtttcatgcgtgccataaggttctatggtagcggccgtaatcccctacgcccgccgatacgcgacgcattcgcggaaatgtgccgccatatatagttacgcgcgcgattcagaatgagtgggaataacgaaccagcgggcgggaagaatgagcaggacgacttggaccagtatcaggccgtacagccagatgtagccggcatgctgggagaagaacggcatgtcgccttggaatccggcgacgatgaccgccttgccggatgtggtggtcagtgccatgccccatgcggtcagcgaggaggcgatgaggtgcagggccagtccgaccgcgcccatgcgcgaacgggcgcaccatgtcgataggccgatcagcagaaatgccagcaccagaccatacggaatactcagttctgcacccatacggtgggcgaacgtgcccacaaaggcggaagccacgcccgccgcaatcgtgatcaacgatttgaccagcgcgttctggcgatacgaccacggacgcagttcagtagtgctcttcacagtcatgcgtttcagtataggtggggatatgacttggcgaggaataaacttggctcccctcagagaggggagccagagagaatggtcggctacagtcgcaccagatcacttaccctgctgggcggcgttctggcggcgctgcttggcgcgccacttgtaccagtcctcacggccgaggatgatcttgcgcacgcggatggactccggggtgacttccacgcactcgtcctcgttggcgaagtccagggactcctcaaggctcatcttgatcggcggggtcagggtttcgagcacgtcagcggtggaggaacgcatgttggtcatgtgcttggccagcgtgatgttcacatccagctcgtcgggcttgttgttcacgcccacgacctgaccctcgtacaccggggactgcggttcgacgaagaagttgccacgggcctgcagacgctgcatggcatacggagtggccacaccctgacgatcggaaaccatggaaccgttctgacgaatggtgatggcaccagcccacggagcatagccagcggagatggaggaggaaatgccggtgccgcgagtggcggacagcagagccgtgcggaagccgatcagaccacgggacggcacggtgaactgcagacgaacccagccggagccgtggttggtcatgccgtccatacggcccttacggtcggccatgagctgggtgacggtacccatgtactcttccggcacgtcgatggtggtgttttccatcggctcgttgaccacaccgtcgatcttcttggtgaccacctgcgggcggccgacggtcagctcgtagccttcgcggcgcatctgctcggcgagcacggccagcgccagctcgccacggccctggacctcccaggcgtcggggcggtcggtgggcaacaccttgatggagacgttgccgatgagctcgcgatccagacggtccttgatcatgcgggcggtgagcttgtggtccttgccctcggtgccggccagcggggagtcgttggtgccgaaggtcatggagatggccggatcgtccacatggatgagcggcagcggcttcgggtcgttggggtcgacgagggtcacgccgatcatgatgtcgttaacgccggcaacggccacgatgtcgccggggcccgcggactcgaccggggtgcgctcgaggccctgcgtgcgcagcagttcggagacgcggaagttctcgagggagccgtccacacgggacaggccgtaggtcttgcccttctcaagggtgccgttgtagatacggaccaaaccgagtcggccgaggaagtcggaggagtcgatgttggccacgtgagcctgcagcggggcgccttcctcgtattcgggggccgggatggtggagatgatggcctcgaacagcggctcgaggttgtcgttgtccggcaggccaccgtcggcgggctggttcacggaggcgtagccggccttggcggcgcagtagatgaccggcatctccagcagctggtcgaggttcaggtcgatgccctcgtgctgcacgtcgtcggccaggccgagcagcaggtcggaggtttcgccgacgacctcttcgatacgggcgtcggggcggtcgaccttgttcacgcacaggatgaccggcagcttggcttcgagggccttgcgcagcacgaatcgggtctgcggcagcgggccttcggaggcgtccacgagcagcacgacgccgtcgaccatggagatgccgcgctcgacctcgccgccgaagtcggcgtggccgggggtatcgatgatgttgagggtgatgccctccgggtggccgtacttggcggccagcggaccggtgtattccacggccgtgttcttggcgaggatggtgatgcccttctcgcgttccagatcgttggaatccatcacacgatccggcacttcctcacgctcggaaaacacgtgcgactgctgaagcatggcattgaccagggtggtcttgccgtgatcgacgtgagccacaatcgccacattacggatatctccacgaaccgccatcgaaacctctcttaatactgattttcttgcgtaatcgttcggtacttgcgttctcgagtacttgctcttggatatcaacctgtacctacacacaaaccgtcacgatgttactggcacaccttgacacacaacgggcccggctttctgagaattagtcacatgtcatctggcttgcgagactttttgtattccacactctcgactcccctccctgaggggagctgtcgccgtgggcaactgaggggcgccaagtgtatcccctgaatctcccctgaatcatccctgagtacagcaccgtcatgggtagttactgagtaacctgatatccaacgatagttactcagtaaccttcgcccaaggcaaaccgtctatgcaaaggggatgcggtatggcaatcagagaagcgctattagcactgttggagcgaggcccggccagcgcctatcagcttaagaaggacttcgaccgcaccatcggtctgacttggccgctcaatatggggcaagtttccactacactgcagcggttgaaccgcgacggactgattgaagagaccgcgccgactactagcggatccaatgatgtcggcaccgcagcggccgcaccattatggcgattgaccaattccggcgcccaagagcttgaccgatggtggcgctcccctattaccccggaacaacgcggacgcgacgaactggtgatgaagctggccgtcgccgtggaaatacccggcctcgatgtttccgaactcatccaacaccaacgccacgctttgcagcaactgctgcacgacatcacccgactgcgccggcaaacaccgcccaccgaactcgccacacgtctagtactcgaccaccatattttcatcactgaagcggaattgcgctggctcgataccgtggatgagacccagctgcgagcacaactggcgcagcaccccgtttcggcacctctcacggcaagctcagccgcactcaccgccaccattcaatagtgcataggagcacatcatgacttctcccgttctttcttctctcccgcaatcctccccatgcgcgctggaattacacgacgtcactcgcgttcacggcaaagatgcacgtcgtgtcaccgcgctcagtcacgccaatctcacgcttcgcccgggtgaattcgtggccatcatgggccccagtggttccggcaaatccactttgctcaatcttgcgggcgggctcgatgtgcccacgcaggggcacgtgctggtcgaaggccgcgatctggccacactgtcagtggccgaacgcgcggccatccgccgcaaatcgataggctacgtgtttcaggatttcaatctgctgccttccctgagcgcagccgagaacgtgtcgttccccttggaattggatggctggaatccccgcaaggcacgtgaggccgcgatgcaatccctcaatgaagtgggggtagccgatatggctgatcgccgacctgaagacatgtccggcggccaggcgcaacgtgtggcgattgcccgcgcactggtcggcccacgccgtctactactggccgacgagccgaccggagctctggattccaatgccggcatgacgattctcgaagtgttgcgcacccgcgcagatcgcggcgcggccgtactgctggtcactcatgagcctcgcttcgccgcctgggccgaccgcacggtgtttttgaaggacggccgtatcatcgatgaaaccggctccagcaatatggatgatttgctcaaccttgaggaaaggggagcatgatggcacgcgcagccctcaataatcttgccaatgccaccgtcggtcgctctgcccaaattccccatgccgctaggccaagccttggcgcacgttgcaaccggtatcgggccgcgctgcgactcggctggcgcgacgcactacggcacaaggcccgcaccctactgtccttgctgctggtaatgctgccaatcgccgcaatggtggcctccatcggtatgaccaccaccataccgcccaccagatcgcgtgcgctggcgacaatcccggctgatacgcaggcggtcatcaccgccaccgccaggccccgcaccggccaaccgttccggcagtcacccgaaagcggcggcacgtggcaggacgatccctcccagcagccggcctcggccgccgagcttgcgaagattctgccgcaacaggatcggctgctcccgtattggcagtcgcccgaactcatcgccatcaccggcaccgcgttgcaacccggcgaacagaccaaggctgggatcgacgtgaaaagcgggaacgacattgatctgaacgcggcctccaccgcgaccatgaccgaggcttcacctgaggcattgcaacgaatgttgccgaagctggtcaagggttcggcgccgcagaataatacgcagattgtcatcagccgcacattggcggataatctcggcgcttctctcggtagcacggtgacgttcgtcgctccgccgttcgatggctggatgagcctggacgggcgcatcggcgaggcggtggccgacactcagcgtgcttggacagtcagcgggctgaccgatgaatccgaagccgcggcatggggcttggaaggctggatgtcagccatattggaatctgatggcgtcggcgtggatggccattatttggtggtcggtccagagccggtcacgtgggcgcacacccgcagcatgaacctgttgcaggccatcgtcatttcccgccatgtgctgactgacggctatccgcccgcatcgcagctctacccgatgcagatcgatgcggctaccatgttgaaccacatggtcactgtggtcatcaccatgctggtgggtatgttgctggtactgtttctggtcacgcccgcgtttacggtgtcggcagatcagtcacgtcgtgtgcttgggctcgcggccgcatccggtgctgcaccacgtgacctcagtcgaatcatttcctcgcaaggtctcgttatcggcgccatcggtggcgtgctgggctcggcattgggattcgcgcttaccttggcggccggccctgcgataggcgcattgcgtggatccacgccgctggagatcctgcacggattctcgtggggctcgctgccgatgggtattgccacggcaatcatcattggatttgccgcgacgattgcgccggctcggcatgtggcgcgtatgcatccagtcgatgcgttgaaggattgcccgacaagagaggaaatcggctacggtgaatccgcgaatggcgtggatacgaagcttcgccgtaatcctttgagactgctccgtgttgcggttggtccgattctggtcttggtctccatcgtatgcgccgcgctcagtctgacattgccattgcccacgctggccgatcacaatccgggcgcggttccggccggaaccgaaacgcatatggctctgcttgttgccacgattttgttggctgtcatagggcttgcgttgtcgattcgcacttttgcacggtggtgcggcaaagcgggttcccaactgaacatcggcgcacgcctggcactcagggatgcagccgagcatcatcgacggttcgttccggcggcatgcgcggtgctgattaccatgtgcatcgcctcgtacacactggtaatcaccggctccatggtggcggaccagcgaaattccacgatgacgatgacgtatggaccgtcggggatggccattggggccgacgtgcatgtcagcaatgagttcgaccgtgctgtggtgtcggatgcgatacaccggcttggcaaagagacgccgatacgcgctcattacccggtgtacaccgaggatgtcaagcgatggtcaaaactcaatgatacgaccgaagtcgattccgacaagttgaacgccgaacacggctacatgtatgccgctgcattgctcccggccggtcacacttgtgataacccaacgatccaagagcaaccggacacgtccacatgggtgggccaggatgccgcttcggccctgtacccaaacgttccgatacgttgtgtgccgatagaccgatcccatcagccaacgtattcgaatatactgccgagtttccgcggcgtgaatctcattatggatggcaatgcgatgcgtttgtccggcttcccgaacgcggatgaggcggcacaggtgcttgatgcgggcggtgtggtggtcggcgatgccggcacaatcgacgcgggaggtatggtgcgtgtggccatttcgccgaatccggcaattgcaaacgaatctcaggccacacatatcgagaagcgcaaggccatctacgtgcgcggcgcgtacccgctggtgatgagcccggcaacagcacaggcgctcggcatcaaacaattgcagtatctgggtgagtatctagacttcgccggtggcaactcccccgttaccgtaaagaaggcctcagcttatgcaatcgaaaatctgccgctggcatccacgagcactgacgggaatcgcctgccgtggggtgacaatatggcattggtgcccattggcctgttggcattgctggcactgatggccacgctcgtttcactgctgctggcccgcacgcaggcccagcgcgacatggccacgatggtcgccgtgggcgcgccaccccgattcctcagacgttacggcctgacgcaggctgcggtgattctgctggccggcgcgccagtgggcgtggtatccggcgtggcgttgggatggctgcatgtggcatggaaccgcaggatcggtgtggacggtcattggctggaaaccgtgccgatctggggattgcaggcggcgctggcattcggcgtagtggtaaccggactgctggtggcgtggctggtcacaaaaccaccgcgcaatctcacccgtcgttccctcgattgatcagtgacatacggcaacccttgccgtgtcattcgggagctataagacaaaaagtggcccacacattggtgtgggccactttagtagcgaaggctgaagtgtaatcagtcttcgagattgaggcctttgcgctcgggcaagcagagggctgctatgcaggcgaggatgaaggcggcggcgaagatgatgaaggccacggccttgttgccgccggacagggtcaggaaccacggcatgaggagcggcgcgatgatggcggcgatgcggcccaccgcggcggcggcaccggcggccacgccacgcaggcgggtcgggtagatttccggggtcacggcgtacaaca

SEQ ID NO: 2427 - DNA, 18625 bp, Unknown
  R50_10m  MAG No. k141_11534
cgcatcctcgccgagctgaccaagttgcgccagatctgctgtgatccaaggctgctgtatgccgatgccaaggatcagtcggccaagcttgccgccatcaccgaactggtggaaacctgcgtgaatgaaggcaagaaggcgctgatcttctcccagttcaccagcttccttgatctgattgccgaacgtttcgacgcgcaaggactacgctactacaccatcaccggatccacgcctaaaaagaagcgtctcgaactcgtcgaccagttcaatgcggacgatacgcccgccttcctgatttcattgaaggccggcaacaccggactgaacctgaccggtgccagcgtggtcatccacgccgatccatggtggaacgctgccgcgcaggatcaggccaccgaccgagcacatcggatcggccagaccgaagacgtcaacgtgtatcaggtggtggccaaggacaccatcgaagaacgcatcttggagcttcagcataccaagagcgagctcgcccgccagttcaccgacgcttccttgcttgccgacgaagccggcaccggcgccagcgccctcaccgaagcccccgcctccatcgccaccctcaccaaggacgatctcctcaatctgctgggatgagaagatcctgctcggtgctcttgagcttggtgatggaaacagtctgggctttgtggacccgttcgctaagccgagaccggagtcgatagcggtgtggcatggtgcgtgcgtggggagcgtgattcagttgttggctgaggcgattcggacgctgtcgttttgtgctttgttttgccgttgaccaattgaaatgctcgttggtaggagacccccaataaagctccgatttgtcgatacgtgagtccctcgttgcgtagggcccgtgcggcgagtcgggattcggcagccgcttgtgcgttggctttttttgctatttcgcgctgccggaacatttctgttacgtgttgtttggcttgtttcggcaacacaaacgtcaccttgagctccggattgtcgtcgtcgttcatgacagtgatgagatctttagccattggctcgatatcgtcaagtcctttggcctgggtcgaccgttcgatagctggtacctgaacgtaccaatatcggccatcgggttgcacaagcacgtcatagttgctcattgccaccacccctttccgagtttctgctcgctctcgttgatgatatccagcgtggttcgttctgagacttcattatggcgggggatgggtatcctcaacccgtccaggcagtaaacctcatgtctgctgccttgccgtaacaaatagaaatcgagccctcgctgctttgccgcttgccgaagtttcttgatgatgagttttcttcgtgtcatcataactctcaatctcgcactagacaaaatgcgtatgccgaattgccgggtgggagttgtgggtaaacgtagagatgttcattggtccttctttctgttgtctgacgcgtcgttgcgtgcgggtgcatctgacggtatgggatgaggtttctgattggcaagctgaacgggggtatgtggttctagcttccgagttatccacattgataaagtgcttttttaaagtgactttcccgtgttggtcgtggatgctgcgagcaaggcaagaacggtcgatcacgtcgcgatgtgtgtgggtgaatggtgaaagtgattttcgatatttttatattgatattcgatatattatgatggtgacatacggggcagtgcaggttcatccattgatattggattaaggagcatagccatgaacgctggtatcgcattcatctctcgcaaatctcgcaaagcagacgtcgcttggcgctatgccattgcacttggtcggtggcgggggagtcggcgttatgttcgacgtcagtgccgtcattggcagatggcgcaaccgccacgaacacaggggtctgatcgttggccagaatcgccttcaattcctcgtccgtgtatttcttgacaccgcctttgaacagatacggtcggccggcatgatgcacttcgagcacctgccgcagcagttcgtcgatttggggaatatcggccgccgtggccctacgaatcatcatgtcatccatttgattcagtctaatcgtgcagtctcgaccggcagatgatcattgcccgcgataagagacacggacgggcaagatgggtgattgttcgttcaggctttcatcctcgccgcaacgtcacggtagtctggagtgcgtgaatcgcaagaaacagctagtggagaagtatgagcggggcacccgttcgtacacgatgtcgcatattcgtggcaaagacaccaaaatcgaggtgctggtacgcagctatctgtttcgcaagggtttgcgattccgcaagaacgacaagcgttaccccggccacccggatgtagtactgccgaaataccacaccatcgtgttcatcaacggctgtttctggcacatgcatgaaggctgttccaaacattcgatgccgaaatcgaatgtggaattctggcagacgaagctactgcgcaatcacaatcgagacatcgcgcagcgggctgaactggaggccgccggctggcgtgtaattaccgtatgggagtgcgaattaacgaaagccgtgcgtgacgaacgcctcgcacggctgtatgagcagattgttgaaggagatgcagattcagcggaataatttcagctcccctctggaggggagctgaaatcagacctcaaacgggaacttcaggccccaacggtcgcgaatcgcatccatcagctccatgatgcggatggtgtcggcgtgcggcatcgcctcgcattcgatcttgccatccagcagcgcgttggctgcatcggccacctcatactcataaccggtcaactgcgacggcaccgcaacactgcgcacgggcttgtgatcgttgttgtagatatcgatggactcgggattgttgatattggtgaccaccaaatacccttcggtgccccacacgtagccgccgcgatcggaggaaaccagcatcgaactggtggacacggccatcgtgccatcatcgtaatacaacgtggtggaattctgtgcatccacaccggtttcggcggccatcatcgacgtatcgaaatgatccagcgtgcggccatggtcggcaccgatcgccatatccaggaagttcagcggatacacgcccacatcgagcagcgcgccaccggcacaggccggatcggtcatacgtgccttgccggacaccggatagcacaggttggcgctcgccgctttcacctcgccgatctcgccggactcgataacttcgttgatgagcttgcggctgggcatgtagcgcgtccagatggcctccgtgcacagcatgccggtttcctcggccacggccagcgcctcacgtgcctgcccggcgttcgcggtgaacgacttctccaccagcacgttcttgccggctttcatacacaggatcgcctgttcggcgtgcagactgtgcggggtggcgatatacaccagatccacatccgggtccgccgtcaactcctcatacgatccataagccttgtcaaaatgccattggtcggcaaaagcctgcgcgcgcgtaatatcacgggccgctaccgcatacgggtgaatccatgaggaatacagtgaaccttcagccatctgggtcagggtgtcggccatggtgtgagctatgcggcccgcacccagaatcgcgacgttgatcttttcgccgctggcctcgaactcggcgcgtttgccattgaatcgactcattattcctccttgaatacgggttggtacactcaatcgacctacagtgattatagaagaagaaaccttgtcccgtgaggcggatagaaccgaaatatggaaaacgaagcagcgcagcagccccaatctccggccgcgtctccagtcatgtcccgccgagcgcgtgaggccaatcccttccgtgccatggtattcggcgaacaagcagacaagatgatcgcccaaggtatcagcgtcatcaaattaagccttggcgagcccgatttcggcgcgccgcccgccgtacgcgacgccatgcgcgaacagtacgacggccgggccctgccgtacaccgccgccatgggcctacctgaactgcgtcaagccatcgccgacttctaccgcgagcgtcatgaccttgacatcgaccccaagcgtatctgcgtgaccgccggcggttcggccgccctgctgttggccaccgcgctgaccgtggaccccggtgacgatgtgattgtggccgacccctcctacccgtgcaaccgcgaacttgtgcgctcctttgaggggcgggtcatcgacgttccgacctcggccgccacccgcttccacctgaccgccgacctgtgcagccagtactggacaagaaagaccaaggccgtaatgatcacgtcgccgtccaaccccaccggcaccaccatcgacttcaacgtattggacaaggtgtgcaagctggccgccagccgcggcgcatggcgcatcgtggacgaaacctaccttgatttggccgaccgtgagccggacggcaccgaagtcaagtccgtactggcctgcgatcccggtgccatcgtgtgcaacagcttctccaagttcttcggcatgaccggctggcgtctcggctgggctattctgcccgacgaccccaccgtgctggaagcggtcgacgacctggccaccaactactacctgtgcgcccacacgcccacccagcatgcggcgctcgcctgttttacgccggagagtttggccgaatgtgaagctcgtcgtcaggaattgcttgcccgtcgccgcattgtgattgacgggctcaagcgcatcggtttgccggttgaggtggagccgaatggcgcgttctacgcctacttcaacatctcccgtactggtctggatgcctggacgttctgcgaacgcgcgctggatgaagcccatgtggctctgactcctggccgcgacttcggtgcggccacagcggatacgcatgtgcgcctgagctatgccgcctcacgtgaggccctgaccgaggggctggaacgtctcggaacgttcgtcgaatcgttgtgaacggcgcggcagccggtgtgattgttgtacggtagtcgagtttgtgtgatgttcggctggcctcgcggtgttggttgccggccgaacgactcgccatggtggcgcacggctggctgattgcgatggtcggcccgttgttcggccatcacgggttgggtaaggtcaggaatagggatcatggtcaatctgcgttcgcgcaccacgcgacttggtgtgcttgatatcggttcgaacactatccacatgcttatcgtcgacgccgctcccggcgctcgccctgaccccgaggccagcaccaaatccacagtgcgcctgatgaagtatttaaaggatgacggctcaatcaagaagtccggcatcgaggcgattctggaagccgtgtcccagtgcatgcggttggccgaggaatacgaaatcacccaaccgccacggtagccaacaacgccgcatgatcggagccctcgactttgaccaccttgcattgcccggccttcatgccctgatcaagcaccacgtggtcaataccggcgaacatcggcatatacacgcggttcgtaggccacgaaaacgtaaacccatgtccggattcacgtgcggcatccacgaaccggtcgccaagaaaatcacggaatggcgtgtgatcgtaagtggcattgaaatcgcccatgaaaatataccgtgtatccgtatgcccgcgcatcggacccaactcatccagcgatcgcttccactgccgccaatagccgggtacgggagcggtggtgtgcacggatacgaatcgaatctgctgaccacccatatccaccgtgccgccgggcatgaatgaggcgctggaattcacgtcatcgtcggccggatcggcaagtggcgtggccgaccagaggccgttaccgaatacgccgtcagacgatgagacctgcgcatacggcagatagtgctcaatgccagcctcgttgagttttttgacgaaatcctcggtggtctcctgcaaagcgagcacttcgacgcgctgatcgcggactagttcgacgatggcttgtgggtcggcctgccccttgtatacattgaaggtcatgacgcgcgcgtaggcatcgctggtgttgggggaggccgcagccacggcgttctgcgcggcttgggggagtgggtcggtcgagtagaagaacggatattgccaatagccattgcatgcgattgcggcgatggcgattagtgcggcaaggatacgccgcgacacgatggccaacagtagggcaatcaggccaagcaacgtgaaccagggcgttgccgataccacaatcggcacaaatggcagttcctgtaaatcggcaggcagcgcgcgggcggcagtgccggcaagggcaagaagtgcgaacatcgtggcgagaaaaccaagcagacgatgccgtttgtgtggcttcacggcagacttggatactgggcgtgccgtggctttggcagagcgtggcttggcagcggcgcgagctcgtacgcttgcacctgtggtagtactccgtgcctttgccatgctgccctttcctccggcttgtttactgttaccttgcttttcgtgcgatttgccactgtaccgtgtgcggcttgtctttcagtgtcttttcgccgtgcgcaagagcagttcgcaccaaaccagcacgaaaaccggccatgccttggtggcgggttctgccaggtagcttacacagactgccatgcgtcttatgtaggctgccacgcgaacatgatgcgactgggcgtgcggccgtgtacaatgaaacgtcgttgcccgagtagctcagtggatagagcaccgctctcctaaagcgggtgtcgtcggttcgaatccgatctcgggcacttggcttcggaaacatgacggtatctcagcctctattcatcggtgatgagccataggcattaggcatgtgtaaacgtataggttccaccatccatcatcccgtcatgtgaaactatgcaaagacatgtggggcttcacggttatcgtgagggtccatggctatcgaatacacggaagagaagcggtttactgtcgaacaggttgaggcgctgttcaagtcggttggttgggaatcggcgcagtggcccgaacggttgttcaaggcattgcagcattcggatacggtaatcagcgcatgggatggcggctatttggtcggcttggttcgcgtgctcgacgatacgggagggggcgaaagtggcggagtgtgctgatcgggggcaacgtacgtagtcattgacggttatcccgtagtaatgttcacgatacgaccccttgtccatacagtgaaaataacggctggcgtccgacgttgctgcgctatgactagagaccatgagtgaagacaaacagtatgacttctatgtggccggtccgttctttgatcctgaacaaacgtcaagtatggaacgtttggaaaagatattggaagaccatggcaaggtactgttcaagccgcggtttgtcagccagatcgaagaagtaggccctgaaggatgctttgcggacgatatccatggcattaatgctgctaaagccgtggtcgccaatcttatggacgaggacccgggcacgatgttcgaaatcggatatgcacatgcgctgggaatcccggtgtacggctatttcgaaaaccttacgccaatggatcgtgtcaatctgatgattgcgcaagcggtcgaactggtgttcgtcggtcctgatgatgtggcgaaatacttggaaaccggcgaacatacggaagtcgattacattcagttctaagcagctctaacaggttctcagcaaacaggggtggcggcgttctcgtacatagtcacgtacgggacgccgcagtggtatagggatattccaacaagcggcataatggagtcgtgggaaaactagacggattgccggggccatttggtctggacaatccgttgtttcgcgcgtgttttgtagcatccgtggagttacatggggagtatgactgaaaacatcgctgataaggccataaacgatactcgtatcgtcaagcagttcaccaatcccgtcaaggagccgattgacagcgacatcaacctgttcgatttgctcgatgagcgagccaagcgcgatcccgatggcgccatgatcgaatataaaactgaggatggcacctggcagccgtacagcgcccaggtcttccgcgacatggtcatcgatctggccaaaggcctgattggtctgggcgtcaacaagggcgactccgtggccatcgtgtctcgcacgcgttgggagtggaccgctctggatatggcgatcatgtccatcggcgcactcaccgtgccggtatatgagaccaactccgccagccaggtcagctggattttcaacgattccaaggtcacgctcgccatcgccgaggatgacggtcagcgcgacaagattgaatccgtgcgcagcgaggtgcccaccctgcgcaacgtgttcgtcatcgaagcaggcggcctgaacgccatcaagacctatggcgaaagcgtcaccgatgccgaattctgggaatacaagaacgcctcccacggcgacgaccgcgccaccatcgtttacacgtccggctccaccggcaccccgaaaggcgtggagctgacccaccgcaacttcgcgttcctggtgcgctccggcctgcagtacatgcctcgtgccggcgcatggcccaaccgccgtctgctgctgttcctgcccctgagccatgtgttcgcccgattcctggaattcttcagttttggcggcaccatttctctggccctgagctccaatatgaagaccatggtcaaggacttcgagaccttcggccccacgctgctgcttgccgtgccgcgtgtgtacgaaaaggtctacaacgccgcctcccagcgtgccggcagcggttttgcgggcaagatgttcatgcgcgccgccgaaaacgcgcgcgaatggtccaaggccgagcagaagggtgagcagttgccgattgccggacgtatcgcccacgccttctacgagcaggtggtgtacaagaagattcgtaccatctttggcccgaacgccgactttgccgtcaccggtggagccccgatggattccgagctctcccacttcttcaacggcatcggcatgccggtgctggaaggctacggcatgacggaaacctgtggtccggtgtgcgtgagcttgccggaagacaatcgcatcggcaccatcggcatgccgatgtgcggcatcaccgccggcatcgccgaggatggcgagctggtgatcaagggaccgctggtgtgcaaggggtaccacaacaaccctgaggtcaccacccagcagatcaccgatggctggctgcacaccggtgatttgggcgatatctccgaagacggattcatttccatcactggccgtaagaaggacctcatcatcaccgccggcggcaagaacgtgtcgccgggtctgcttgaggcttccgtgatgacctcgcccgtggtcaaccagtgcttggttattggcgataagaagccgttcgtggccgctctggtcacgctggatctggcggatgccaacaactggttggaatcccaaggcgccaaaccggaacccgatctggcctcgctggccaagaacgccatcgttcatgccgaggtagagcgtgcggtgaacgccgccaacgagggcgtttcccgcgccgagtcgattcgtaagttcgagattctgccagacgaattcaccgaggccaacggcatgctgaccccgagcctgaagacccgtcgcgcgcaaatcgttgagcactatcgcgagctcattgacgacgtgatctacgtgccgttgaagaagtagctatcaactccctctgatccaaaaaataagctctctctgacgagggagctgtcagccgcaggctgactgggagagaccgcggctagcccgcgaaacaacaaggccgggtgcgacttgcacccggcctcagcttattcagtccaaaatcgccgaaacataatcggcggcggcctgatccagctccgcatcgccgatggtggcggtgccctgcaccaggaacggctcagcatagttcatgccgatcttgtacgccacgacctcaaacgggctcagcagctcctccatggtgcggctgtactcgccatccttgcggtacttggcggcgtcggaaccagtggtgaccaccagcttgagctccttgcccttgagtgcgtggcctccaccgtaggcccagcctgcggtgatgacctcgtcttcccattccttgagcagcgcgggggaggagtaccagtagaacgggaactggaggattacgcggtcggcggcctccagtagctcgtgctccttgtcggcgttgacggagaagttcggatattcggcgtattcgtcgcgtacgatgatgtcgtcctcgccttgtgcggcgagttcggcaagcagacgggcgttcactcgcgagccgtccttcaggtgcggatggaatacaagaatcagcgttgacatgggatttcccttctataactgctaccaatgtggcctaatcaccactatcgtatgccgggaagcagaactcagtccagtccggattcaggtgcgagccgcgggatgccgcgccgggaggcaactcagtcgaggttggactgcgtgcctgcggtggcttcgttggcggcttgctcggcttgtgcctggtcgagcttggctcgtacgtcgttgagcaggccctgggcgcgcttggccaaggcctcgccgatttcccattgacgcatcgactggtcaagattgaggccgccggtttccagtgcctggacagcctgaatcagcttgtcgcgcgcctcctcatatggcatctgggcgatgagctcgcgttccttgtccgtcagggacgaggcgggggtgttcttgtcggtgggtgtggtgttctcggtcatcttgttctccttatatatacggtatatatgcgtgaatgcatatggtgcattacgcggttgcggttgcggatgtggcggtggcagtaatgacgccctttttcagggtgacggtgatgtcatccccggtactgacccgcgaagcgtcatccagcacatggccatcggaggactgcaccaccgcatagcctcggttcagcgtggattgcgggctgagtgcggtcagtgaggcgtgagctcgctcgacggtgagctgggcatcgtccacgatgcgtcgcaggccgatgtcaagccgctgcagggaatcgtcgattagccgctgatgcggttcgagcatggtatgcggttgggtcaggcttggccggttcgcatatccctcgataagtcgaatctcgttctccacgcgcgaacggacccgcagtcgcatacggtcgatggcaccttcgatgagctgcgactgctcacgcacatccggcaccacgcgcttggccgcatcggtgggggtggaggctctaagatcggcgaccagatccagcaacgtccagtcatcctcatgcccgatggaggagattaatggtgtggtgcaggcatacgccgcacgaaccacacgctcatccgagaaaccgatgagatcctcaaacgagccgccgccacgggccacgatgatcacatccacgctcgggtcggcatcgagttgtgcaatggcctgaaccacttcggccgggcattgctcgccctgaacatgcacatggaccaccttgaaggttacggaaggccaacgaaggttcacattggtgatcacatcgccttccgcacgtgcctgaggtgcgcaaatcaggccaatagtcttcggaaactccgggagaggcagtttgtgatcggcatcgaacaggccctcgcccttaagctgcttgcgcaattcgtcgatcatggccttgaggctgccaccggctccgaccttgagaatcgtgtccccgcgcaacgacagcgaagtgcgcttcatccacaggttcggtttgccatgaatcaccacgcggtcgccctgaacgaactggctggccgcggccgcgaacctgccgaagccattgacttccatggcgatatcctcgaagtcgtcgcgcagcgtgatgtaggccgagccggcgcgacgggtattgatctgcgtgatctggccggtgacccacgcggacggccatcgttccacggcaccgtagaacttctggctcagcacacttaccggccacggattttgcgcgctggtttcagcggcgcgtgcaggcagctgatcgatagggcgaggctcattcggcagattgatggtgccctgatcaggcgcgaaagtgccttgacccggctcaaagccagccgaggccagtgaagcggcggtcggtggacggccggtagatgggtagcccattgcagtagtcatgcactccactataagtgcgttggttgatgacggtaaatatttaccgtcgcctgaaaacggtgtgatgatgaatgcgagaaccgtacgaagcgatgtatcagccgatgatggagatggtctggtgcatcagaagaaaggagtcattatggcgaagaaacgggtgctatgaagaggagtgagatatgcgttgcgctgacgattgagagtcgttagtgagctcgctgtgcgacacgcgagcagaaaacagttacgctaatcacacacttgtggttttggcggaaaatagccgaaaaccctataaatagttcgacacaccactgttgagcactagatatagtggtggagatgccgtattcttctagaggttcaaaaaaacgacatcaatgtaatttcgtgtggcccacgtcgagtgcggccaaaatgcggaactcaggagagtgttcgccttataggaaaggggtgcccgatgggcgcacaggtgttggaggaaatcgtcaccgataacgagaccaaggtggccgccaaggcctccaccgtgctcgttgagaagcgtgatggtcgtgtggtcgacttcgaccccattaacatcatctctgcggtcaagtctgctttcggtgacctgaacaaggaagtcggccccgaagaagatgccatgatccgtggtttcgccaaccaagtcgaaggcgaaatcaaggggcgttacgccggccccgccaagatcgaggacatccagaacctcgtggagcacgccctcattgacgcccacctgtacgatgtggctcgcgcctacaccaactaccgtctcgacaaagacattcagcgcgccaaggccactgatgtgaacgaggccgttgctcgcttcattaatcatgacccgaccctgattcacgagaacgcgaacaaggattccaacgtctactccacccagcgtgatttgctggctggtgccgtgtccaaggccgccgcgttcaacatgctgcctccagcggtgtccaacgcccacatgaagggcgatattcacttccacgatgccgactactcgccgttcactgcccagtccaactgctctttgccgaacttctgggacatgttggccaatggcttcactcttggcaacgctccgatggcttccccgaagtccatcgccattgcggccacccagattacccagatcatgaaggacgtggcctccagccagtatggtggccagaccgccaaccgtgccgacgagcatcttgcccagtatgccaagaaggattacgagaagttccttgaggaagctcgtgagaccatccccgacggcatgccggttgaattcgcccgtcgtcaggtcgagagcgccaagaagaacgagcccgccaaactgcatttcggttcccgtgaaccgctgccgatggacaccccgttccacaccgacgttgacgaacttgagcaggagcgtgaaatcctcgccaagattcgtacccgcaaggccatctatgatgccatgcagaccatggaataccagatcaactccaaccgtgtgtccaacggccagaccccgttcgtgactgtcggctttggtctcggcaccgactggttctctcgtgaagtgcagcgcgcaatcctgctgaaccgtattcgcggcctcggcaaggaacaccacaccgccatcttcccgaagctcgtctttactgtgaagcacggcgtgaacgccgacccgggtgacccgaactacgatctgaagcagcttgccctcgagtccgccaccaagcgcatgtacccggatgtggtgttctacgagaacatcgtcaagatcacaggctccttcaaggctccgatgggttgccgctccttcctgcagggttggatcaacccggagaccggcaaggatgaagaagacggccgtatgaacctcggcgtggtcaccgtcaatgtgccgcgtatcgccatcgaatcccacggtgacaaggctcgcttctggaagctgttcgaggagcgtatggaagtcgcccaccaggccctccagttccgcatcatgcgttgcaaggaagccaccccggtcaacgccccgaccctgttccgcttcggtgcgtttggtcgtcttggtgccaacgacaacgtggatcagctgttcaagaacgagcgtgccaccgtgtcgctcggctacatcggccttgccgagaccaccgcggtcttctacggcaagaactggattcgcgaccacggctgggatccggaaggcaaggagttcgcgctgtccatcgtcaagcgcatgaacgagctgtgcaagcagtggagcaaagcggagggctaccactattccgtgtactccactccggctgaatccctgactgaccgcttcaaccgcatggaccgtgaaaagttcggccgtatcgaaggcgtgactgaccacgacttctacaccaactccttccactacccggtgtggttgcagcccaccccgatggagaagctcagctacgagaaggacttcccgtactacgcttccggcggcttcatcaactactgcgagtacccgtgcctgcaggacaacccgaaggcgctcgaagccgtgtgggattacgcctacaacatcggcatcggctacctgggcaccaacaccccgatcgaccactgcttcgtgtgcggcttccagggcgactttgagccgaccgaggaaggcttcaagtgcccggagtgcggtaactccaacccggacaagtgcaacgtcaccaagcgcacctgcggctacctcggcagcccggtccagcgcccgatggtgcacggccgtcacgaggagatcgcccaccgagtcaagcacatgagcggcgaaaccggtcgtgtgacgctggatgacggcaccactcgcgagtggttcgaagaggccaagtagggttattcgtgagtaggctcccctctctgaggggagctgtcagcaaagctgactgaggggagtccgaggagctattccgaagctcccctcagtcgcctacgacgacagctccccctcaaagaggggagctaatgctttccgcaaggagggaatcatgccggagttgcatacgaccaagcccgaacccaagcgccatgactttgcggccagcgagaccgggcgtggcccctccgtaccctccaacggtcttgccaacgatccgaaagccggtcaatgggatggccggcgcatgtccaagcggatgatcgccgactacaaaaccttcattgtcaccgacggagaaggcgtgcgcaactccctttacgtctccgggtgccccttccactgcgtcgactgcttcaacgcctccatctgggatttccaagccggccacgaatacacgcaaaaacttgaagacaagatcatcgaagacctgaaagcgccatgggtgcaaggcattacgttccttggtggcgagccattcctcaacactcctgtgctggtgccgctcgcacaacgtatccgtcaggaattcggccataccaaagatatctggtcgtggaccggctacacatgggacgagctcatgcgcctcggagaaacaccagacaagcttgaattgctgcatcttatcgacatcctcgtcgacggccgctacctcaaagaccagaaggactcgctgctgcaattccgcggctccagaaaccagcgcatcctcgatgtgtccaagtccctagaagccggcgaaccggtcatctgggccaagctccacgatcaagaacgagatatccccgaaatctatttgagagaccgcgaagccggcgaaggccaacaggcctcgtagtagcaggtccggaatgccgcactcagcaatatcgtcggaactgttggggaacgcccttcccgtgagcgaaatcaccatgcccggcgtcacgttgggcaggtggtcggactaatattccagaagaagtagccgggcgaagccgtccgcaggtatctgccagccatcccgaaacggctcatgatgcctgaaggcgcacatacccggaagtcggaattaagaggaacacatggttgacatcgtcactgacgcgagcgtaaagcccgcttcacacccgaagcccctgcgtgtgggattggacatcggttccaccaccgtcaaggccgtggtgcttgatcagtccgattccctgaaagacaccctcttctccgattaccgacgccaccacgccaacgtgcgtgccaccgtggccggcctgttggtcgacatccgtaaagagcttgtggaactaggtcgaggcgatgagccgattcgcctgtctatcaccggttccggcggtctggcgcttgctgacaatctgcatgtgcctttcattcaggaggtcatcgccgaaaccgaggcgatcgacaaggaatacccgcaggccgacgtcatcatcgagctcggcggcgaggacgccaagatcacctacctgaagcccacgcccgaacagcgtatgaatggttcgtgcgcaggcggcaccggcgcgttcatcgaccagatgtccacgctgcttgacaccgacgccgcaggcctcaacgagatggccaagagctacgagaacctgtatccgatcgcctcgcgttgcggcgtgttcgccaaaaccgatctgcagccgctgatcaacgacggcgcggccaagcctgatctcgccgcctccatcttcaccgcagtggccacgcagaccattgccggcctggctgctggccgcccgatccacggtaccgtcatcttcctcggtggcccgctgttcttcatgtccgaactgcgcgccgccttccagcgtgcccttgaaggcaaggtcgacgagttcatcgtgccgaccgacgcccacctgtatgtggcctacggttcggcattgcaggccgacatggattccgacgatcagggccaccatttcgaggcccacacctgcgatgagatcctcaagcgtctggacgagctgaagaacctgccctccaacacgcccaccatgccgccgctgttccccaccgaggccgaccgcgaggacttcaacaagcgccaccacaaggaacacatccacatcggcaccctcgaaggcgcgcatggcccgcacttcctgggcatcgacgccggttccaccaccatcaaggccacgctcgtcaatgacgaccgtgaaatcgtctggtccagctacgccaacaacgaaggcagcccgctgaccgccgccatcaacatcgtcaagaagatccaatccgagctgcccgaaggcgcatggatcgcacgctcctgcgccaccggttacggcgaaggcctcatcaccaccggcctgcacctggacgagggcgtggtggagaccatggcccactatcgtggtgctgaaatggtcagccccggcgtcaccgccgtcatcgacatcggcggccaggacatgaaatatctggccatcaccgacggcgtcatcgactcgatcgccgtcaacgaagcctgctcgtccggctgcggctcgttcctgcagaccttcgccatgtccatgggcctgacgattcaggaattcacgcaaaaggctctggcttccacccatccggtggacctcggttcgcgttgcaccgtgttcatgaactcctcggtcaagcaggcgcagaaggaaggcgcctccatcgaggacatcgctgccggcctgtgctactccgtggtgcgcaacgccctgtacaaggtcatcaagttgcgtgattccggcgaactcggcgacactgtggtggtccagggcggtacgttcctcaacgacgccgtgctgcgtgccttcgagctgctcaccgaacgtcaggtcacccgcccgaacatcgccggcctcatgggcgcgtttggcgccgccctgaccgcccgcatgcactatcaggatgaggccgaccacttggacgtggtggttaaggccgatgggtccgaggaacagtccgaggccgagcccgcacccaagtccgagcccaaggccgcagccttcaagaagaccgagccggccaagcccgaagcccatgtcgttgtcgtggacggtgtgactcacaccgccagctccattctgaccggcgaagcgctcgacaacatgagcatgaccgccgagcgtgacgtgtgcaagctgtgccagaaccactgcaagctcaccatcaccacattctccgacggctcgcgcttcgtgaccggcaaccgctgcgaacgcggcggcgacgccaagaagaagcgttccgaccg

SEQ ID NO: 2428 - DNA, 19616 bp, Unknown
  R50_10m  MAG No. k141_11654
gagctccccatattatgctcccgctggcgggagctgtccacgaaagcggactgagggtggccaatgggatttcggttctttgaccaccctcagtctcactgcgttcgacagctcccgccagcgggagcattttgttatgtcgtcccaccaaaaatgaacaatagacgaacttacgtagtttgggcatctcactacgccttgcacgttttactctggaaatcatggatatctggcagatcgtcgtgattgtggtgctcgccgcgctgatactggcgtgggttgccgtcatcgcctacaacaaaggccgcgtttcaggtcggctcgccgccgaacaggacctgtccggcgacgaggatacgcgttctctattcggtgatgatgcgcccgtgcgccccaccgagcgtcgcctgattgaagtcctgcccgaagccctgattgttaccgaccgcaacggcttggtccaatattcaagccccggctcagtgccattcggcctagtctccggcgaccgactcaactcgcgtgaagtcgaggacatcctcactcaggccgccgccgacggtggcgtgcgtgagcgtgaggttcagctgccggtcaatcgcaattcctatccgtcctctaatggccgaggactggaggccggccagtcacgcccgtccaacatgctgtatttgcgtgtgcgcattggcgatatcggcgatgacctgtacgccatcttcatcaacgacatgtccgagcagcgccgtttcgaggccgttcgccgtgactttgtgaccaacgtttcgcacgaactcaagactccggccggtgccatctcgctactggccgaaaccgtgaccgacgccgccgatgatccggacgccgtacggtatttttccggccgtatctccaaggaatccgcgcgcctgaccgaactggtacatcatcttatcgacttgcagaaagcccaaagcccgcaaagtgtgattgatgcgcggcgcatttccgcgctggatgtggcacgcgctgccatcgccgccaatcagacccaagccgactcccgccatgtggatattcgactgagtgtcaacggacagtcagtgcccacgaaggtcgaggagctggccgatggcgaaggttccttggaagaatcaggcagcccggccacgagcggtccgatgatcaaggccgacaaagaggccatgcaaaccgccgtcaagaacctcgtagagaacgccatccattactcgcccgaacacaccactgtggcggtcggcgtgggggagcgcgatggcaaagtcaccattcgcgtggtcgatcagggcatcggcatccccgccaaatcactggaccgcattttcgagcggttctaccgggtcgacccggcccgttcgcgcgagaccggcggttcgggactcggcttggccatcaccaagcactgcgtgcaggagaacggcggtcggatttcggtctggtcgcgtacgggggaggggtcgacgttcaccatcgagctgccggccgccccggatgaggatgacgacgaggcccggccggacgagtcgacacaagcgtagggccttggttggtgcccgatatggtgccattccattgccgcacaatcacacagtgggcgaggtgcgcacaccgtgcgtagcacaattacgcaattacgtactttcaggaaacagcaggctaacggagaacaaatggttacgatagtatcggaaaactttgcgcctatgcgcacgggaacatacccaagaaaggctactatggcacgcattcttatcgtcgaagacgaggaatcctatcgcgagccgctggtataccagctcacacgcgaggggtacgacgtgtccgccgccgccactggcgaggaaggtctggaactgttcaccaagggcggcatcgatttggtgctgcttgatttgatgctgccgggcattgacggcactgcactgtgccgtcgcattcgtgagcagagccgtgtgccgattattatgctcaccgccaagagcgccgaaatcgataaggtcgttggccttgagattggtgcggacgattatgtgaccaagccgtactctttccgtgagctgctggcccgcatccgtgccgtgatgcgtcgcaatcaggccacggcccaggcttccggcactgtggatgacgatattccgctggtgtgcggcgatatcgccatgcaggtaggccagcatcaggtcaccgtacgcggcgaaaccgtgttcttcccgctcaaggaattcgaactgctcgaatacctgatgcagaacaagggccgtgtgatgacgcgtcaccagctgatcgaccgcatctggggttcggattatgtgggcgacaccaagacgctcgacgtgcatgtcaagcgcgtgcgctccaagatcgaggaagatccggcgcaccccaagtatctgactaccgtgcgcggtctcggatacaagatcgatactcccgcggagtaaatggaaggcggccttcgggccgccttttttgttgtggattgtgggctcgccgcaggcgagtccactccaaaaactacgtagcctcaacgtagcccacaaacatccaagtgttcatcttctgtttactgatttcggttttgggcccttgaaaccaccaatacgcttgtagttgtcatgaattgaccgggcagcgctgagccgcccgcgaatagttgatagagggattaagtaataatcatgcagaagaacatcctcattcgctccattgccgctctgtccggcattgtgatgctcgcttccgtggccgcctgcggcgataacaccgccaccacgaccgacaacagctcctcctccgattccacttccaagtccaccccggtctccggcaacttctcgggcgccggcgcctcctctcagcaggccgccgttgaagcctggatcgccggcttccagggcaccaaccctgaagccaagatcgcctacaacccgtccggttccggcgctggcgtgcagaccttcctgaccggtgccaccgcttgggccggctccgataaggcccttgccgatgacgaagttgagcagtccaagtccgtgtgcactgaaggcaccgccttcgatgtcccggtctacatctccccgatcgccgtggtcttcaacctcaaaggcgtttccgatgccggcaagcacatcaacatggacgctgccaccatcgccaagatcttcgacggcaagatcaccaagtggaacgatccggccatcgccgatcagaacaaggacctgaagctgcccgacaccgccatcaccgtcgtgcaccgctccgataagtccggcaccacccagaacttcgtctcctacttcaaggacgtcacccctgacaactggacctacgacctctccgagaactggccgaacgaggttggccagggcgccaagggcacttccggcgtgatctccaccgtcaagcaggccgacggcaccatcggctacgctgacttctcccaggtcggcgacctgggcaccgtggccgtcaaggtcggcgacaagtacaacgagatttccgccgaggccggctccaaggtcatcgaggactccaagcaggacgacaccgttaagggcgacaaccgcatcgtcatcaagatcaaccacgccaccgaggccgagggtgcctacccgatcgtcttggtctcctacgacatcgtctgcccggcctacaaggacaccaagcaggctgagttcgccaaggcttggctgacctacgtgacctccgacgagggccagaaggccgctcaggatgccgccggcaccgctccgctgccctcctccctgaagtctaagatcaccaagtccatcgaggccatcaagaccaagtgatgacgtcggcccgcaagggtcgtgtggactggacctgacaactgaacgatagactgtagtagtaagagcagtcgccgccaactttaagccgcagtcgtaaaccatacggctgcggcttaaagcgggtcaggacccgaacggtttggcaaagtcacagacgaaaaccgcaccacttgaatacttgataaccaccctatataaggagaatccgtgagttcgcaagacaaaacggctgtgcagccagttggaggcaagaccgccgacaaggtgtttcgcggtgtggcatacgcctgcggcatcctgatcctggttgtacttgccgctgtgttcctgttcctgtttttccgcgcctggccactcatcggtggcgatcaggccgccaacagcgacaccgtgtccagctttaccggcggcaaggccagcagcttctggggctacgtgctcccgctgttgttcggtactgtgctcgtgtctttgctggcactgctgattgccttcttcgtgtccatcggcattgcgctgttcatttcgcactatgcacctaagaagctcgccaccgcgctgagctatgtggtcgatctgctggctgccatcccgtccgttatctacggtttgtggggcggcctgattctggtgccggccatctacccgttctggaactgggttgccaaccacctgggcttcattccactgttcgagggcccggccgccaacccgtcgcgcaccgtcgccaccgtggctgtggtgctcgccgttatgattttgccgattatcacctccatgtcccgcgatatcttcatgcagaccccgcgcctgcacgaagaggccgcgctggcgctcggcgccaccaagtgggagatgattcgtctggccgtgctgcctttcggcaagtccggtattgtgtccgcctccatgctggctctcggccgcgcgcttggtgagacgatggccgtgttgatgatcctgtccccgggcctcaactactccatcaagctgctgcaggcctcgcagaaccagaccatcgccgcgaatattgccgcacagtaccctgaagccaacgatctgggcgtctccacgctgattggaaccggtctgattctgttcctgatcacgttcgtggtcaacttcatcgcccgtaagcttaccgagaaagcgactgcgtgatgactgctgctgagaacactgaaaagactccgatggacggcacgcccgaaatcgacttcgatcgtttccgcccgacccgttccgccatccagcgccgtaatatcatggaccacttcatgcgggtcctgatcgcggtggcgtttgtgatcgcctgcatcccgctgatctccctgctgtggaccactatcgtcaacggcatcaagcgcctgaacctgaacttcctgagctacaacatgaccggtgtggtcggtggtagccagaccccgtccggtggttacggcggtgtgctgcacgccatcatcggtactctcgaaatcaccgctggcgctatggttatctccattccgatcggtttgatgtgcgccgtgtacctggtcgaatactcgaaccgcggcaagctcgccaccacgatctccctgctcgtcgacgtgatgagcggcatcccgtccatcgtggccggcctgttcgccttctcgatgttcacgattctgctgggccccggtaccatcaacggtttcgaaggctccgtggctctctccctgctgatgctgcccaccgtggtcaagtccagcgaggaaatgctgaagatcgtgccgaacgatttgcgtgaggcctccttggctctgggcgttaccaagcagcgcacgattaccaagatcgtgctgcgcaccgctctgccgggcatcgtctccggtgccattctggccatcgcccgcgtgattggtgagaccgcaccgttgctgatgaccgccggctacatctccagcaccaacgtgaacctgttctccggccagatgaccaccctgccggtgttcgtctaccaggagtactcgaagctcagcgcgaactgcccgcccaacgccgacgccacctgcgtgaccacgattccgatggaacgtgcgtgggctgcggctctcgtgctgatcgtcatcgtgctgctgctgaacctcattggccgaatcgtggcgaaggtcttcgccgtcaagaccgagcgctaagccagtcgctaagcctaagccttaagaacacaaggaaatataaggaaacatcatgggacaacgtattgacgtcaaccacgagaacatctattacggcgactttctggccgtggaagatgtgaacatcaacatcgagccgaacaaggtcaccgccttcatcggcccgtccggctgcggcaagtccaccgtgctgcgcaccctggaccgcatgcacgagatcatccccggcgcgcacgtcgagggcgaggtgctgctcgaaggcaagaacctgtacgacaaggacgtggatccggtggccgtgcgccgcgacgtcggcatggtcttccagcgcccgaacccgttcccgaccatgtccatccgtgagaacgtgctggccggcgtgcgcctgaacaaccaccacctggccaagtccgacgccgacgatctggtcgagtgggctctgcgcggtgccaacctctgggaagaggtcaaggaccgtctcgacaaccccggcatcggcttgtccggtggtcagcagcagcgtctgtgcatcgcccgcgccgtggccgtccacccgcaggtgctgctcatggatgagccctgctccgccttggacccgatttcgaccttggctgtcgaggatctgatcaacgagctcaagagcgactacaccatcgtgatcgtgacccacaacatgcagcaggccgcccgtatcgccgactacaccgccttcttcaacctgaaggcagtgggccagcccggtcacctcgagtacttcgcggacaccatcacgatgttcaacaacccgcaaaacgaagaagccgagcgctacatctccggtcgcttcggctgatcgtttcctgcgcgcagcgtaatgatttgtgcgtaggagaaacggcaaagcccgccgcaaggcgggctttcgcatattgagggcgagtattgccgagtattaccgttctcgcaacggagcgagctggaatacttcgtcggactgggcggcgacttcccgcttcggtcgatcgacgggagaacggcgggtaaagcggtacaagacaagtccgcacgatgaacactctgtgataaattttctgtttacgtgcgagtgtggaagaatggtcgcagcaaggtccagcaaaggagcataggtgagtactggtctgatcgtcggcattgtcgttgtcgttattatcgttgtcttgattggttggggcgtcagcgcctataacaacctggtgacgctgaagaaccgtgtgaagaacggttgggcgcaaatcgacgtgcagttgaagcagcgcgccgacctcatcccgaacctggtgaataccgtcaaggggtacgcatcccacgagtctgaagtcttcactcaggtgaccgccgcccgcgccggcgtagtggctgcggccagcaacccgagcacgaccactgctcagcgcgccgccgccgaaaaccagctgtcccgcgccctgttcaacctgcaagccacggctgaggcatatccgcagctgcaagccaaccagaacttcatggatctgcagaaccagctcaaggaactggagaacaagatcgcctacgcccgtcagttctacaacgacgtggtcctgaagctcaacaccgccatcgaaaccgtgccgacgaacatcatcgccggtctgttccactttgagcaggcgcaatacttcgaggccgatgacgcttcccgtcaggtgccacaggtccagttctgacccgcttcaggcccgtccggtaagccgccggccgggcccgtattgtcttaagagagggaagatatgcggatacgattcattcgcgccggaatcatcagcattgttgccacggtggtgttggcagttatcaccttggcgataatcgggacttccgcgttcggcgattcggccgacctcagctaccgcacgctggactatgacgtgaccgccaccgcgaacggtgatttgaaggtcacgcagcatatcgacgtcaagatgcgtgagcgtaccgacagtgacgacaacaccaagccgtggaagcagctgttccagcaatacacgctgaactccggcaccttgactgatatcagcgatatcagcgtgcgcaacgtcaccgacggcatcgactacgcacaacagagcgagcccaagctgcccagtgacgtctcttccgacaaggaatggaacagcgactacgccaaccattggtatgtcgccgatgtgagcgatggcagcgaccatccaaaggcatacacgcccggtaccgatggcctcaagcccagcgcctccgccaccgaagatgacacaaccgtggagatcggctggaatattccggtcaccaccgaggccgacagcatgaagttcgatgtaagcttcaccatgcacgatgtggccaccaaatggaaagacgtggcctccttccaatgggagccgttcggcaagaagaaccaagtgcctatcggcacggtcaccggcaccgtccatttccccaacggcatcaccggcaaaacctcatggacatggctgcacaccgagcgcacctcggaaaccaagcgcaacagcgacggcagctacacgttcacggcctacaacatccacaatggcgactacctcgatgtggtcgcggcgttcgatgccgccaaagccaagggcatcgcccgcaagggaaccggcaatcatctcaaggacctgaaacaggacgaatataagcaacagcagcgctggctcgacaagcaacgattcgctgccagagctcgtctcgtgttctggattgtcagcatcgtgctcggcatcgcgttgtgcgcgtggggtatctgggctgtgatctccagcaaccggcgtgcgcaatacagtggcagcgtcgaatactggcgcgaccagcccggcatcagtccggcttccgcagcccgtctgattcgcgtggtcgatccgtcgacgcgccaatccgatgaagaccgccagctgaccgccaccatgctgtcgctcgccgtcaagaaggccatcgccatttatccggggccgtcggacatgtatcgcggcatcgacatgagccaggccacgccggtgggcttgagccaaatgattgccgccgaccaaggcaagcagtatgcggcaggcatcaccagcaccatcgtgattctgccgctcgccattgatgaggcacccaacgcgcaacagttgggattgagcgaatcggaagatgcgctgctgaacctgctcatcgtcatttctcagcgcgtgggcagcccggtattcgacctgaaccagatgaaggcgacctgccagaactggcaagacggctatattgagctcggcaaattcaccggtgcatgcagcatggaataccagcggctgggtgccacgcgctctgtgggctggcaatggatcctacccggcgtattggccgccgtgctgggatttggttcgctgctagccaacagctttatcggatacccggtggctggtcttatcgggctgccgatattcctggtcggactgttctgctcgatggccggcgcgatgaccgtgctcactgatcaagggcaggatatcgccggccggactctgggccttaagcgttatatggaagacttctccaacttcaccgaccggggtaccgccgatttggccttgtgggattggtatatggtctacgccgccgcgtttggcatttccgatcgcgtgatgcgtgaactggccaaagcatatcctcaggtcaacgacccggcttggctggatgccaacgcctccaactcgttgttctactggaactaccgcccgtatggctggtacagccaccgtcataatggtccattcgaccacgatgctgccgggcagatggacctaggcgttggcggcccagctccggcttacggaggcacgtcgtttgccggcggattctccgacctcggctcgcagctgaactccggtctggcggacatcagctcgaccatcagcgcggcagcaccatccgccgattccggtggcgatttctccagcttcggttcgggcggcggctccggtttcggcggctcgttcggtggctcaggtggcggctcgttcggcgggcggtagcgcatgcctatgtcgaaacgcattgttcgtgccctgggcttaagccttgtcggtgcgctgattcttgccgcactctgtgccggtgccttgattctcggcacagatggtgccgacctgagctaccgcacgcttgattacgatgtgaccgccaccgccgacggcgatcttaaagcacggagcatatcgatatcaagttgcgcaaacgcaaggatgacgatggcaagaccaaaccgtggagatcggctggaatattcccaccaccgtaaaaaccaacagcatcaagttcacggtgagcttcaccatgcatgacgtggccaccaagtggaaggacgtggcgaccttccaatgggagccattcggtgagaacaatcaggtgtcgattggtacggtcaccggcacggtgcatttccccaaaggtgtgaccgcgagcaactcgtggacttggctgcacactgaacaaacctcggaaaccggccgaaccaaggatggcagcttcaccttcaccgtaaatgatgtgaaaagcggcgagtacctagacgtggtggccgctttcgacgcggccaaggcgggagatatggctcgtgtcgagaccgacgatcatctgcaggagttgaaggaagacgaagccgacgacgaacggttctggcgcaatctggaacgccaacgcgccacaaggcgcctgaacaactggatgaccaccatatcggccggcctgatattcgggattattggtgttgttgcagccttacgctcctccggacgttcacgttaccgtggctccatcgaatattggcgcgatcgccccgagctgagccccgcatcggcggccaaactcatcgatatcgtgacttccggcgacaaacccgacattcccgagcgccaactcgtcgcgaccttgctttctctggccgtgaagaaagtcattgctgtgttccccggttcggcggacctgtatatcggcgtggatctgaaacaagtttctccggtggagctcagtcagcgaatcgggtccgatccatacaagcgcaataatgcgcgtaccaatagcacgattgtgatgctgtggcagtccgattacggcgtatctgagggatttgatgaatcagtattcgtcgaatccgtatttgatggatctggatctggcggatctggatctgccgcatctagcgtgtccgatgcacaccagcccgatctcagtgcttctgagcgggcattgctctatctgctcaccgtgatttccgagcgcgtaggtcgtacggcatttgacatggatgacatcaaagacgcctgcaaggattggaaagacggctacaaggaactcgaaaagttcaccaatgcgtgcaagaccgaattcgcggcggcggatatcgcgccgaaaaccgagaacggatggctcattcccggggcaatcaccgtgctgatcggtggcgccagcatattcatcaacggtttggccggatatctggtggccggggccctcatcggcattcccctgatgacggtcggcatattctgcttcctgatggggaattcctacgtgctgaccgatcatggtcagcagatggccgggcaatgcttgggtctcaaacgatatatgcaaggcttctcgaacttcaagtaccgtggagtcgcggattcgacgctgtgggattggtatatggtctacgctgccgcatttggcatatccgaccgggtgatgcgggagctggccatggcctatccgcaagtatccgatccggaatggcttgatgccaatgcctccgacacggtgttctattggaattatcgtccgtacgactggtatgggttgcgtttctacaatggctcggcgttcgcggattccgtggctgacagcggattggccggagcggtgccagcgttcgggggcacgtcgttcgcggctgggttctctgacctcggcacgcaattgtcgtacggatttgcggatatcaccgcgacaatcaatgcggcctcgccatccggtggctcaggcggctttggcggtagcagcggcggttccggcggcggttcgttcggcgggcggtaagcgatgtgcttctgaaagtccctatagctttgaaagtaaaaggcccggtgtcataagacatcgggcctttctctcaaaatcgaggtgaggagacctcaacagtcaggtccaacggggcgaaagtctgtggcgccgccgagaagattgcctcgaagctagcgtgacctttctgctacaacacagcataccagcctccaccgaagctcaccagtacactggactgaccaaaccaaggtctactagcgtgccactttggcgcggtgtcgttgtgtcaaccggcataatgacgtctcaaaattcaagaggaggttctcatggtaggcaacgaccatgacaaccgtccgagacaagaccggcaataccgggaaggtctgatgaccggcctgttgatcgccctggccaatcaagttggacagtggcggtcgacggccatcatcattgccgcactggtattgctgggaatgagtctcagacgaggccactgatctatcagcggaacagccggaatccatggggttccggctcctcgttttcgctgaactgggtatgagtaagttgcgttttctattccgtgaagttgcggaaatttcatagattgattgtgcgggcaggccgagagtgtgaaatccaacgggatgcttaggcttgattgtggatatcgagtttccataagtttcacgaagggaatcaccatggcattgttccgtaacctcggaccgttctccaccaccgccatcggccacggcgaaatgccgctgaccatcgaaaacaaccgcggccatgaggtcggcatcgaaaccctgcatgcctcgctggacgccggctgccgccacatcgacaccgcttgggcctactactgctccggcggcgaggagcagaccggtgaaaagctggtgcgcgaggcccttgagacctggaaggggccgaaggacgaggtgctggtggccaccaaggtgggccacttccgcaacttcaccgacggccgccccacgtgggatgtggacggtcgcccggagaacctgattcggcgcggcaaggagagcgcactggcgctcggcgtggacaccatcgacctgctgtacttccaccgcccggacccgaaggtgccgtacaacgagtccgtcgaagccatcaagcagctggtggacgagggcgtggcgcaggaggccggtatctccaacgcctccatcgagcaaatcgacattgcgcgcggcattctgggcgacaagctcgtggccgtgcagaaccagtactcgccgattcacctggagacccaggacacgctcgactactgcgccaaggtcggtctggccttcgtgtgctggagcccgctcggcggctaccgtcacccctatgatgagaccaagttcgacccgttccgcgaggtcgcggcggcccacggcgtgagctaccagcaggtcgtgctggcatgggagctcgccaagggcgaccacatgttcgtgattcccggcgcccaccaccccgagaccatccttgactccctcaaggccgaccagctcgaactcaccccggaagaactcgccaagctcggctgaactttctcagctccccttgtcaggggagctgtctcgcgtagcgagactgaggggtagtcgctggagtagtcccgggtagtcccgcaaggagataattgtgcgcaaaaaactcatcctcgacctcgataccggcatcgatgacgcgctcgccatcgcatatgccctaggcagtgccgacgagatcgatctgatcggtatcacggccacctacggcaatgtcgcggtgccgctggccgcgcgcaacgcgctggcggtggtgcacttgttcggccgtgacgacgttccggtctatcccggagtcgaccatcccatcgccccggcaacattgccgaaaatgcgtggcaccacaccagacgagcggacccaggcctacgcgcgctggcagaacggcggcgcggacggctggcaaacggacgcttcgtgggcaccaactcccggctcggtggcggtccaccatcccaacggcatcggcggcgcaatcatccccgactccccgcgcgctccggaagcaccaggctcggcggtcgatttcatcatcgccgccgcgcgcgaatacggcccggacctggccatcgtacctacgggcgcgatgaccaccatggccaccgtattccgcaacgctccggacctgaaggattccggcgtgaacgtgacgttgatgggcggtgcgttgacgctgcccggcaatgtaagcccggccgccgaagcgaacatctcccaagacccagagtcagcagactatctgttcaagtgtggcgcacgcaccaccatgatcggcctcgacgtgacccaccagaccgcgctcacccgtgagaaagcccatgaatgggcgtctctggggacgccggccggcgacttcctcgtcaccatgaccgactactacatcgacttctacctgaagaaccagccggagattcgcggatgtggactgcacgacccgctggccgtggccgccgcgctcgacccatcgctggtcacgaccttcgggttcaacttgcaagtcgatctcgagggcccgttccgaggccgtaccatcggcgatcgttcacggctccaggaccccgacaaacacacccaagtcgcattgggcgtcaacgtgccggaattcctcgaccgtttcatgacccgcgtcaccgccgccgcgcgcgggtgaacgattacgcttcggcagggaatagggttctgcgtcaagtgcgtctgcgactcgcatgatggtgttgaacgagggctgcgaattcgggcgaagcgccttatataaggattcgcggccgaggccggattttcgggccacattggtcatgcctcgtgcgcgtgcgaccacaccgaacgcatcttgcacaaatgcgggatcatcctcttcgagtgcgccattgagatatgcgatggcatcctcgtccgaattgatgtatgagaatcaccaaaactcaaccacctatttcacatacccgaaaaaacagaaaaagaatcagatggtcgctggattttccctgctcttttcgatctgacgtttgagatattcgcccagcccatccacgcaccaaagtgggatgttcgtcagccaagattgcttcctatagcctatttctcctatacggataccgtggagcccgtatctgttgcagacatacgagagacttctcgcacgaatattggaagaggacttcacttcgatgggaaaaacctcgtctccctgttccattacgaaatctatttccgcatttccttgaggatttgggttagcccaatagcggggtctgattccttgagctaccagctgctgacatacgtattgttctacgaacgcgcccttgaattcggaaaagagcttcgacttgttcaccagagtattcacgtcgagaccggacagtgcgcccagtatgcccgtgtcttccagatagatcttgaacgtgttaagactctcatatccgggcagaggaatatgcagagcatcgaggcgggggactttggtaatgatcccgtagtccgtcagccaagtgagcgcttcctcatattcgcgggcgcgggctccttgcctgacaacaccgtaaacgaatttgcggttctccttggcgagttgtgatggcagtgtgttccatacaagccggatacgctcgcccagcatatatgcggcatgcttggaaaaatcaagatcgtaggcgttgagaatatcttgttggacagttcgcacatcctgcggaatcccgttatccaggtgagcgcttaatgctgctggcatgccgccgacccacatatatgttttgagtaggtcattcatctgaggttcgagagcttgtggaatgtcctcgaaccggccttcacgtatggtgtcggcgatcatgtcttgtccgatgctgtccagatactcggcgaaggagagcggatgtaggttcatcatggtgacttttcctacaggaaaagaggttttgccgtgcttggatattcccatgtaggagccggtggcgatgatgtcatagtcaggtgcctgctcggtgaagtatttgagagaggtcaacgcgagcggactttcctgtatctcgtcaaagaagagcagtgttctgccggggagtatccgttgattggcggcgagttcgagctgacggattattcgttgcgggtcaagatcctgctcgaatatcccggatagggatggccgctgcatgaaatcaaccgagacgatgttgtcgtattgtccattcgcgaactcgttgacaagccatgtcttgcctgtctgccgtgcgccacggatcaggagaggcttatggtcaggtgtggtcttccactgcttgagcgttttcagtgcttttcgctggagcttcatgacgaatatcctatgataaatgtgtgacgcttacacatttatcatatcataaatgtgtaagcatcacacattttttatagtttattgcagtcgcagtagttctagcgcaacggataccagccgatcggtacgggtcttgatcgcttcggcatcctatttggttatctgtgaggctcagccatcttacgcggtataaacgttaaggagcaatcaaagggcggtctttctgagactaatctcagaaagaccgccctttgcgatggaataaattgagtgtggaactcggtattggtttgaaagactgtttacagcccgggaatcagaccgccgggcggatcgagcgtgaggtattgctcctccagatcgatgtcggggaccaaggcctccacgaacggcaccaacgcggtcttctcgaccacatcctcgcccttggaattctggccggttaccaccggctcggtcaaacgaatcttgagcagtgactgagcgggggagtcgaccacatccaccactttgccgaccacttggccggcgggcagtcccagaccgttgccctcgactagacgggcctcaaggccaataagatccttgggataccattcgtcggcttcgagcatatcttctgcgtcgtcgacctcgccgtagagttcgacaccgtttagggcctcggcggcattgcggtcgtcgacgccctcaagcttgagaatccaacgatccttgaacgtgcgcgagccctcgacgatgtactcggtctcgccatcctggctgtagagcacggagtccggctcgaagcgccactcgggatcatcggtgtacaggcgcacggtgacttcgcccttcaggccctgtgcgcggccaatacgagcgaccctcagcaactcgagctgctgagggtcgccgtgcatgtcttgctgtgccatgctgtgaattgttccttatcggttatcgacggacgtccatgatgtcaacgcggaccttgtgatcagacagtgcctgaatcacggtgcgaatcgcgttggcggtgcggccgctacggccgatcacacggccgatgtcttccgggttcacgcgtacacgaagcagttcgccgcgcgcgttctcatgggacttgacggaaacatcgtcgggaaaatcaacgatgttcttgatgaggtgttccacagcctgtgcaagcatagctagcctttcgtttccgctcaggcctcagccggagcttcttcggcggcctcttcagccggggcttcctcagcggcggcagcggcttcggcttcagccttggccttggcggcagcttcggccttggcggccttcagcttctgagcctggttctcaacggccgcgatgcgggcctcggcgtccgggccagcctcaacggtcttcagggtgccttcggcaccttcaaggcccttgtacttctgccagtcgccggtgatgttcagcagcttgaagacgggctcggacggctgagcgccgacgccgagccagtactgagcgcggtcagacttgatctggatggtcgagggctgggtgttggggttgtaggtaccgatctcctcgatgaccttgccgtcacgcttcttgcgggaatcgacgaccaccacacggtagaaggcgtagaacttcttgccctgtcgcttcagacgaatcttggttgccaaaatggctctccttgtaatgctaggtgtgcgggttctcggtttgccatgtggggcatgaccggccggaatccacgtgtcctcgcggctcggggtgtagagggcgccacgcgcgcgcgaataaccgtactagtgtaacgcggaagccggatattgcgcatcggtccggtcgtgacgcacggaatcgccggacggacggcgtgtcggcggcgcacctaccgtcttcatgactgatagcctgattgatggcagtgcgagacgggaaagggggcgctgatcgatgggtgagtgcgtgatcggccccggtgcccgggcgcgtgtggatgcggatgacggattcttcttcggcatgggggccttcgagaccatcgcggtatccggcggcgcgcccttgttgttggacgaccatctgacgcgtttgggtgagacgttgcgatacctcggcatcgaggcgcgtcgcgccgatctggagacgatggtgctccgcgcatgcgccggactcggcgcatcggacgattcggccctcaagctcacggtcaccgagcgcaaccgcgtcgtctcgttgagacgcaacccgtatgccgcgccgggggcgaagcgcgtcttccgctgcgacttcgccgatgtgcgcaggaacgaatcctccccctttgcgcgcatgaagacgctggcgtatgccgaaaacatcatggagaagcgtcgcgcccgtgaccgcgccgtcgacgagccgttgttcctcaatacgcggggcgaggtcgccgaaggggccgtttccaatatcttcgccgtcatcgggggagacgtcgtgacgcctcccgtctcctgcggtctgctgcccggggtcatgcgccatgccgtgatcgggttcacgggggccgtcgaacgcccgatcatgcccgacgagctgcttcgggccgacgaggtgttcctcaccaactccctgatgggtgccatgcccgtggccggtatcggcggcgtggaattcgaaccggggagcgtgtcgcgcgacgtgaacgacgcctatgcccgcatggtggcgcggacgcgggcccgggcgcagacgaaggagttccggtgagcgcgcaggtgttcaagctcaggacgttccgaccgcttgccgacatcgtggagcgcgtgcgcggcgaggaacgcttcgcgttcctggactcctcgatgccgggggcgcaggggcgctactcgatcctgggactcttcccctatcttgtgatcgaacacgggcggggcggatgcctcgtcgacggcgttgccgtggagggtgatttcctcgatgtcgtgaagaagcggcttggaccctgcgatggcgcgcgcgatccgcgtctgcccctcacgggaggcgcgatcgggtatctgggatacgatttcggccgcgaatcgtgcggcgtgccgaccaggcacgatcccgtcgcggccacaccggaggcgagcatggtcttctacgacctgctactcatcgaggacgtccggtcgcgggcgttgttctgttgctgcca

SEQ ID NO: 2429 - DNA, 3110 bp, Unknown
  R50_10m  MAG No. k141_11812
cattcacggtacatccgcggcctagaccgtctcaccggatttcgcgggacattccgggcgttcagccatgggcgtaacctcggcggatcactgaagagaggagcaccaaagacggccgcgctattccagatgcgtcatttcgaaatgaaagcccggcagaacgccggaatcgcaacgatcgacaaatcgccagacgatacagggccgggctctcgctcaggaaacagggcatgtccagcgcccatttaccggcgtcggcaatgacggcatcgccgccaccttccacgtctcctcccgatgaccgaatcgctaattcccgcccgccagaaccccattgcatcgtgtagacgggatatgggataatccacaaggtgcttttgcttgggaccgaggcgccgcgatgacacggaaaatccagggacgggcggcatcaaacgggtcgttcggaacccccgaaaccggacgcatcgttccacagtgtgtcatcacggaatccaagcccggcaaaacgttgaaattgcaacgataagacaggataagacacttatatggcagaattcgtatttcagatgatcaaggcccgcaagtcttacggcgaccgcgtgattctcgatgacgtgaccctgagcttcctgcccggcgcgaagatcggcgtcgtgggcccgaacggcatgggtaagtccaccctgctcaagattatggccggcctggagaccgtgagcaacggcgaggccacgctgaccccgggcttcacggtcggcatcctgcagcaggagccgccgctggacgacaccaagaccgtgggcgagaacatcaagatggcgttcggcccgattgccgagaaggtcgcccgattcaacgagatcggtgaagaaatggccaacccggacgccgacttcgacgcgctgatggaagaaatgggcaagctgcagaccgagatcgacgccgccgacggctgggacctcgactcccagcttgagcaggcgatggacgccctgcagtgccccgatccggacaccccggtcaacgtgtgctccggtggcgagcgccgccgtgtggccctgtgcaagctgctgcttgaggccccggacctgctgctgctcgacgagcccaccaaccacctggacgccgagtccatcctgtggctggaacagttcctgcaccagtacaagggcgccgtcattgccgtcacccacgatcgttacttcatggacaatgtggccgaatggatctgcgaggtcgaccgcggccacctgtacccgtacaagggcaactactccacctacttggagaccaaggccaagcgtctggagatccagggagccaaggacgccaagctcgccaagcgactgaagagcgagctcgactgggtgcgctcctcccccaaggcccgtcaggccaagaacaaggcccgcctggaacgttacgaccagatggagaacgaggcacgcaacaacaagaagctcgacttctccgagattcagattccggccggcccgcgcctgggctccaccgtgcttgaagccaaccatatccataaggctttcggcgatcgcgtgctcatcgacgacctgtccttcacgctgccgcgcaacggcatcgtcggcgtgatcggcccgaacggcgtgggtaagtccacgctgttcaagaccatcgtgggcctggaaccgctgaccagcggcgagctgaagatcggcgacaccgtcaaaatcagctacgtggaccagaaccgtgaaggcctggaccccaacaagaacctgtgggaagccgtgtccggcggcctcgacttcatcgaggtggccggcgtggaagtgccgacccgcgcctacgtggccagcttcggcttcaagggcgccgatcagcagaagctgaccggcgtgctgtccggtggtgaacgcaaccgtctgaacctggccctgaccctgaagcagggcggcaacctgctgctgctcgacgagcccaccaacgatctggacgtcgagaccctggaatccctcgaaaacgcgctgctcgagttcccgggctgcgctgtggtgatctcccacgaccgttggttcctcgaccgcgtcgccacgcatatcctcgcgtgggaaggcgacgacgacaacccggccaagtggtactggttcgaaggcaacttccaggcctatcaggagaacaaggtggcccgactcggtgaggatgcggcccgcccgcaccgcctgcacaagaagcttgtgcgcggctgagatacgccggcattagtgccacaacgcgctttatacgtcgaaagccgtccctcaggggcggctttcccataattgctccatggctgccccgccccgcatcccataaaatcccacagtcacctacggcaacgcaccggcaacacaccggcagtgcagcagcaacgtagcggcaacgcaccgcataaccaaccgtttaccttccaaacagtctcgttacatttcgctcccggaactcttaacccccaccggatagactgccaaccataggttggaatacgataaccgaatatcgaacacagcagaacaggaatcgaggaacgccatggctcaggcaaccaccgtaactccattggaccatctggtgaaggtgctgaagttgggcgagccttccgcttaccgcaatcacacatacatcaatggcgagagtatgtacttccccactggccgcgtctacggtggccaggtcatcgcccagtcggtgatcgccgcgtccaaaaccgtgggcccttcacgcctgccgcattcggtgcatggctatttcattgccgccggcgatattcgtcaagacctgctgtttgacgtcgagaaccttcgcgacggccgctcgttctccgctcgtcgggtcaacgtcacccaagccgaggggtcgattctcacggccatcgcctccttccaggagaccggtcaggagggtgtggaatttgccgatccgatgccggaaaacctgcccgatcccgaaacgttgacttccgccaaggaactcatgcagccgttcgccgaaaagtcgccgttcgccaattactatgccgagaaatcgccgttcgatatccgccacgtgacgccgaccgtgatgctgcgcgcggacaaggattccgccgagca

SEQ ID NO: 2430 - DNA, 7064 bp, Unknown
  R50_10m  MAG No. k141_12235
agttgctgggcgcggtgggcgaggactccaacgcggacttcctattaggcaagctggatgaggccggcgtcgacaccgccgatatcctgcacgttgaaggccccagcggcaccacggtaatcaccgtgagcgctgagggcgagaataccatcgtctattcgccgggttccaatgccaaggcaagtgccggctatgtgcaatcacatcgcacgaccatcgccgaatgcgcggtattgggactgtgtttggagagcccgatctccaccgttatcgtcgccgcacagaccgcgcatgacgctggcgtgaccgtgctgctcaacgactcgccatttatggacgagctgcctcacgaactggtggaagccacggatattctgctggtcaaccagcatgaagtggctcagttactgggtctgccggacggcgatgtggaatcactcgactggtatgaggtcgccgaacgattcaccgattacggattcgaccgggcgatagtgacgcttggtgcgtcggggtcggtggtgatcgagaacggacgttggcatcgcgtatccgccgcgcaagtcaatgcggtggacaccaccggttgcggcgactcgttcatgggaactgtgctggctggcttggccgctggccatacgctgctgcaatccgcgcaaatcggctcctatgtctccgcctatgcggccaccaagcttggtgcccaaagcgcctacggcaccgccgaagaagtcatcgcctacttcagctgacctataatcgtacatatgtgcgaaaccctgagcctgttttccgaacccaccaaggtgtggttcgagcatgccttcggtcagccgaccgaggcacaggctcaggcatggccggcaatccattccggtcgtaatgtcttggtcatcgcacctaccggctccggcaaaacattggctgcgtttctctcggccattgaccggctgatgaccatgccacgcacgcggcgtgccggtgtgcgtgtgctgtatatctcgccgttaaaggcgctcgcggccgatgtggccaagaacctagaacagcctttggagggcattgccgcacaatgcgaggcgcaagggctgcccgtgccgaagatcgcggtcgccactcgttcaggcgacaccaccgcacaggagcggcggcgcatagcctcccatccaccggatatcctcgttactacgccagaatcgttgtatctgttgctcacttcgaaggcagggcggattctcggcactgtcgatacggtgatcgtcgatgagattcatgcagtggcgggcaccaagcgcggcgcacatctggcggtaagtctggaacggctggagaaccttgtcgcggaatcgcgcaagcgagatgcaatcgatgcggatgctgatgagggcagtgataccgccatcgatgctggcctcagtgaccttcatatgcagcgcattggtctatccgctacggtgaatccgcctgaagaggcggcgcgattcctgggcggcggacaaccggttaccatcgtgaatcccggtgggcggcctgcaatggatctgcgcatgattgagccgttggaaaacatgcgtgatttgcagtccgtgaatgccaagcagcgtgtcggtggcgtggaggctgaacggtccgctccgcatatcagcggtgtcacgccggccatgcagcgacttgccgaacgcaggggcattgtgccggtggatgatagagatgtttcttccacttctggggacgattctgatgcgagtgatgcgttcgattcctccgcgttggttggagcggcgggcgaccgtacctccggttccatctggcccgtggtggaacgcggtattttggatgagattctcgcgcaccgcaccacattggtgttcgtcaattcgcgtggtgtggccgaaaagctcaccgcgcgcctcaatgatctctatgcacagacccggcatggcaccaatcccgacactgtgcgggatccgggctctccggaaggccgcgaagggttctccacacattacgatgctgtggtcggttccaccaccatgcttgtcggctcgcatgagggcgatgatgtcatcgccatggctcatcatgggtcggtctccaaagaccgtcgcaaaatgattgaggaacggctcaagcgtggtgaattgcgctgcgtggtggccacctccagtttggagctaggcattgatatgggctcggtcgacttgatgattcaagtcgatacaccgttgtcggtctcctccggattgcagcgtgtaggtcgtgccgatcatcaggtcggtggcgtctctcacgcattgttctacccgctcacccgtcagcaaatcgtcacgggggccgcaagtctggaagccatgattgccggcgatatagaaccattggccgtgccgcgcaatccgctcgatattctcgcccagcagaccgtggccgctgcctcgatgcacgatttgaacgctgatgactggtatgccacggtgctccgtgctgcgccgtttgccgaactgccacgtgacatgttcgatgccgtaatcggcatgatgtccggcgaatacaacagagaggaattctcggccttccggccgcgactggtatggaatcgggataatggcctgatttccgcccgtcccggttcgcagaaagtggccgttacctctggcggtacgattcccgatcgagggctgtacaccgtggtcctgcctgaggcggacgccggcaaaggccagcgtcgcgtcggcgagttggatgaggagatggtctacgaatcgcgcgtgggcgatgtcattacgctcggcacctccacatggcagattcaggaaatcacccgtgatcgtgtggtcgtgactccggctccgggccgcaccgcccgtctgccgttctggcacggtgaaggcgctggccgtgactacggtttcagccgtaccatagcccgcttcacccgagaaatcgccgccggattagacgtgaagcggactggggggagttctgccgcagaaggcccagctgtcccaaccttcatcccaacaatcctcacccgtctccaccgagacggcctagaccccaacgctatcaccaacctggcccgcctactctccgagcaacaagccatcaccggcacagttcccagcgaccaaaccctcatcgtggaacggacccgcgatgaagacggcggctggcgcatcgtactgttaagccccttcggccgccgcgttcacgaaccgtggtccatggccatcagccgcagactgcgccaacgctacggtttcgatgggcaggtatatgccgccgatgacggtatcgtcattcagctaccggacggtgacggacatattcctgctcaagacctgttccttttcgacccagaagacctcaaagcagatgtagaacgtcaagtgggcgagtccgtgctattcgccgcacgattccgcgaatgcgccgcccgatcactgttcatgccgcgatccgacccgggccgtcgcgtgcccctatggcagcagcgactgcgcgccgcacagctcctgcaagccgcacgtatggtcaagaacttcccgctgctgctggaaaccgcgcgcgaatgtttgcaagacgtatacgacatgcccgccctgaacgaggtgatgaccggattgcaagccggcaccattaccgtgaaggacgtggagaccgagccgtcatcgccttttgccgagaacattctctttggcttcgtcggcgtggtgatgtaccagtatgaccaacctcaggccgagcgcagcgcgcaactgttgtctctcgatccgcacgtgctcgaacgcttgctcggcaccaccgacatggcacaagtgctgaatccggacgtgattcgcgaagtcgaacaggaactgggggagcgcactttctggaatgaacttgccgacgatgatgtgactggtcgcgtgacccgttacgccaaaacccatggtcctttcaccgccgatcagctcatggccgatctgcacctcgatgctacggatgccgtgcatactttggatgtactggctgccaaaggcgagttgctgcaaggccactttgtagatgatgacaagcaaggccaacagtggctccataaggacgtattccgccgcattcggtctcgctcattggccaaggcgcgtaaagcagtcaagccagtagaaccagaggcgttccagatgtttcttatcgaccgacaaggtatcgggccggtcggcggcgaacgatatgaaggtgccgacgggctcatgcgcgttatcgagcagctggagggcatagcactgcccactgcactctgggagtcggcggtattccccgcacgagtacgagactaccaacctgcattgctggatgagttgctgaccagcggcgatgtggtctgggtcggctcaaaaaccgggggaaccagtgcgatggaccccggtgaggttgctttctatccggcggattcaatattgctcagcggtgtggaacatggtacgacatcgaacgcttcagacgccaccatgccggaagcgattctgaccgcactggactcagggggagcgttccatgcccgtcaactggtggatgccgccaaacgtgtgtggaatgaggccgcggagccggacatcaatccaaacaccggtgaaatcattccgcaagagtggagcgaacagcagttcaaggatgccttgtggagcttggtctggcaaggtaaggtcaccaattccagcttcgcgccggtacgtgcattaaccgcaggcgcagcaagcccgcgtaaatccactacatcacgtcgtcgtgggcgtgtcgctccgattcaccgagccactacggatatgacgttaggaggtttgtggtctgccgtaatcgggcaagctgaagccgaagacactgatcagaccgagcaggcgctcgcactggtcgagacgttgctggacaggtatggcgtcatcgcgcagccggtgatcgacaaggaaaatatcccgggtggctactcagcgttgtatccgatattgcagcgcatggaggagcatggtcgactggtacgaggcatgttcgtccgtggtttcggcgcggcccaatttgccgagcgcgacaccgtggatgcgttgcgtcatccgtcagagcatcgcggccagtccgtggtggcattgagtgtgctcgaccccgcaaatctcagtggctccgccatcgcgtggccggacgcgcctgccggtgcgggtaaaccggcacgccgtatcggagccacggtcgtgctcaatgcgcaaggtgcgctactatacgcggctgccaaagccaagcacttgacggcgttcgatcaatcggtcggccatgaacccgccgccaatgattccgacgaacaaatgcgcaaggccgccacagaactggcctacgctctcaaacgcaatggcaccggttccgtgacgttcagcgacatcaatggcgaacccctcaacgcccgtcaccccttcgcccgcatcctccaccagtccggcttcaccccagttccccaaggcatgcggctgtactgattgagcccagctatcgaatgcggtagttggagccgcgttgggtcatgatgaggccggcgtgggtgagcttcttatccagtgtgtagagggcgttcctgaggagcccttgttgctcgaagaatgggccgccgacgagcttgaccaattcgctggtgttgacaaactggccatcagccttgaccagtgcttcaagcaaactgtattccagacgggacagtgaaattgcggtgtgtgtggatgcgtagtaggctttgcgattcgtggtatccaacgtgagattgccacgaatgatcatggtgggggagtcggtggcaagcgagccgacgtatgagagcagttcgccatcggagaatggtttgctcagtacggcatccgggtgtcgtacattagctcgtgcgctagcggcagcattgtccgtgcactgttcggcttcggcatctgagttgtttgcgtgtgaatccgcgctgaaggagctgtagggcgtctcttcgatcggggcgtactcgtcaggcagcgctcgccagcggctgccttcgccgatggttttgctgagtggcgtcgaagtcagcagcagaatcttgacggaggcacgggcattgtgaagggattcgatgagttgctcggtggagatgccgagcagggattcatcgagaatcactgcgtcaaatagctccttggtgaccgcggcgagcgcgatactgccggtgcttgccaaggacacctcatgacgacaggcaagcagcgcaccacgaatggcgcgggccaacggttcattggatacggcaaccagtagtctcatcgccacctccttgatgcttagtgtaggtcgggtttagggtctcttctctatgtgtttggctcactatcgttcgctcctcgcctacaaacaccccactgggggtgtttgctttacggctcggcccatcagagggagcttaattgaggttacgcaatgaaggcgatgggggaggcgaggtccactccggagccgtctcggcgcatatcgggcttgggaagctcgaccggggagcctgcggatgtggaggcatgcaacgggtagagaccaacccaggcaagaatcagcgtgttctggcccttgaggaagcgctgggagcgtacgccaccggtagcgcggcccttggtggggtacatttccagcggggtgaccttggcggcgccgttttcggtgccgggtagtgcatcggagtcgccggccacggtgagcaccaccgcgccggagccggaagtcaaaccgttctcgccctcctcataggtccatgccaccttgccggcgggaaccacgttgaatgccgccacacgggcgccctcggccagcttgatgccggccataccgcccgcggtgcgaccctgcgggcgcacgttcttcgcctcaaaggtcagtagcgaggaatcggaggagatgaacaccagacggtcgtcatcctcggccacggcggcgaataccacttcgtcgccatctttcagatcaatgacgggccaggaatccatggtggtgggtgcctcacggttccaacgcttgatgacaccggtacgggtaccgat

SEQ ID NO: 2431 - DNA, 13424 bp, Unknown
  R50_10m  MAG No. k141_12303
cgcctgacgcttccgttccgcctccgcagccgcacgctcacgttcctgctgaatgcgaatctgctcagcctgctgcgcctgggcaagttgtgacttggcgaaagccaattgctggttcacgccttcaatctgagcctgtgcggcagcattgcgagcactgagctcagcattctcgaatcgcgcattctccagcgaggtcttggtctcctccagctcctcgcttttgacgcctcgagccatctcctgacccttatggcgccccagcacgaagccggcgaagaggccaagccctgcaccaaccactagcacgacgatgacgataatcacggttcctatttgctcaaacatggtacctagtatgtcatcgatggtgaatgacggtaaatttttaccgaattcgacggtttcaagccgttaaacggacgctcagcagcccacattggacgcttggccttatcacagtcgagcatcaaccgttattatgctgtgtcgtatccgagcgtcagacggcctttcatgatttgccagcgcgcgtcatcatgcggcagaactcgtcacgatttgacgagacgtgcgatggccgcggaagcctccgcaagtttttcatcggccacctcgccgccctggaccgacgcctgccgcacgcaatggttgagatgatcgtccagcagcaataacgccacggatttcagcgccgagttcgacgccgaaatctgtgtcagaatatcgatgcagtatttgtcatcctccaccatctgtgtgatggcgcgcacctgcccttcgatacggcgtaatcgtgcgatgaccttggccttgtcttcgtcataaccatgcatcgcaaccccctgatacttatccgtcagctgaacacaccccatcatataccctctaggggtatagggtatacactgttgttcagtgcattaggaatgggaaggaacagttatggagttcagcatcttctcgaccgccacggcgctgatagtggcggccgcattgacatggctggtcctgcggttcttcttcggaacgcagaaggcaacggccggggccatggacgcttccgacgaacgccaatccgcgacgatcaccgtcaagggcgggtactcccccgccgtggtgagcatgcgtgcgggtacgccgatcacactgaccttcgaccggcaggagaccggcgaatgcacctcgcatgtggtgtttgctgatctgggacttgacgccatgctgccgggcaacgccaccaccgacgtgaaactgccggcgttgccggcgggcgagtatccgtttgcgtgcggcatgaatatggtgcatgggttgttgagggttgagggagaggacggctcggatgagaacacgccccttcctcatcctgatgcttcgtatacggcacctaccgccgtggatgcggcggagggggagcgccgggaggcggctgaacgcgccaatgagatcaaggcgctgacgaagctggtgattgtgggcgcggtactgacgttgccggtattcgccgtcaccatgctgcatatggccaatcccacgctggtgccgcattggatggtgaacccgtggttgcaggccatcctgatcacgccggtgatgttctactgcgggcgtccgatccacacggtcggcttccccgcgttggcgcatcgctcccccgacatgaactcgctggtctcactgggcacttcggccgcctacctgtattcgctggtgacctgcatcgccccgtgggtgttcccggaaggctcgcgcgaaccgtatttcgaatcggttggcgtggtcatcaccttggtgctggtcggccgccttctggaaaccaaggcccgcgaaggcaccggcaaggcggtgcagtcgctcatcaaactgcgcccgcgcaccgcgcacaaactcaacgccacttccgcagacaatgtggacggcatcgaatggcgcaatccggcgtatttcacggacaccgacatcgacgccatcgccaccggcgacctgctggtcgtcaagaacggcgagcgcgtgcccacagacggcatcatcgtggccggcgaggcgcatatcgacgaatcgatgatcaccggcgaatccaagccggtttccaaaaccgtcggcgatccggtaaccggggccaccgtgctgctcaagggcgactgcgtgatgcgcgccacccaagtcggcgcggacacggtactctcgcagatcgcggcgatggtggcccgcgcccaggcgaccaaggcgccggtgcagcagctggccgataagatcgcccggtatttcgtgccggcggtgatgatcatcgccatctggacgttcgccatctgggtgtcactgggcccggtgccgcaactggcgcatgcgctggtcaccgcggtcagcgtgctgatcatcgcctgcccgtgcgcgctgggactggccacgccgctgtcggtgacggtctcgctgggcttgggcgccaccaacggcgtgctggtcaccagcgccaaggcgctggaacaggcgcgtcgcatcggcaccgtggtgttcgacaagaccggcaccatcacgcgcggcgtggtggacgcggccgccgactgggacaagccgagctacgagcaggacacagtcaaggaaggctcgcgcgaggccatcgcggcgttgcgcgcacgcggcatccgcacggtgatgctatcgggcgacaaggccgaggtagccgggcgcatcgcccgcgaagtcggcatcgacacggtgatctgcgaggtcaagccggacggcaaggcctactggatcgccaaactgcagcgcgaacgcgacgaggccgccgccaagtccgcggatggcgcctcccgcacggccgcgcaatcccgcactctgattgcgatggtgggcgacggcatcaacgacgcccccgcgctggcccaggcggatctcggcatcgccatcggcaccggcacggacgtggcgatgcagtcggcggacgtgaccttgatgagcggcgacttgcgcggcgtcatcaagaccatcaacctgtccaacgccacgatgcgcaacatccgcgagaatctggggtgggcgttcggctacaacgtcatcggcattccggtggccgccggcgtgctctacccgttcaccggctggctgttgagcccgatgatcgcgggtctggcgatggcgttgagctcggtgtgcctggtgctgaacgcgaacaggctgtatgggtcgaacatcaacgcgggcgttgtcgatggcaccgctggctcgggcagcagcacggcggatgtcgaatcaaccggatcggccgaatcagccaacgccgccaacatcaccggctccgccacatccaacgcgcctcacgagccaaccgtcatcatcgacgatcgcaccacgctgaatcacaccaatcacgcatctgaccaatccaataatccaaccaacaaggagaacactatggatatgggaatgcacatgcaccacaccgcccccgcggacggcgaaaccgccaccgacccggtgtgcggcatgaccgtggcggtgaacgccgacgcgatcacgcgcgagtatgagggcaagtcctattacttctgcggcgaacactgtgccacgaacttcatgaaggccccgcaggtgttcctggagcagtagtctctgcgtttacctgattcaacgacaatggcctccgcccaaaacgagcggaggccatttgcatatatgaatcaatcaacgaatcagctggcgaagaagaacacgaacagccaagcgccgatgatggcgccgatgatcggggccacgaccgggatccaggcctcgccccagcgggaggagcccttgtgcgggatcggcagaatggcgtgcagcagacgcggcatgaggtcgcgagccgggttcaggccagggccggtcgggccacccatggaggtcacgaggccccacacaatgaagccgacgacgatggaggcggcggcgtaatcctgcttgccccaagccagggacaggcagcacagggcgccgaagacgagcaccagggtgccgaacatctcgttgaggaagtagttgaccttctggttgtccgcgtcagtggtgcagaaggtgcccagaatcgcctcggcgtcctcggtctccttgtagtgcgggtagtaggtcaggtagacgatgaactggccgagcagggcgccgagcagctgggcgacgatgtacggcagcacgtcgctccacgggaacaggccgttgacggcctgggcgatggtcatggccgggttgatgtgcgcgccggagacgctaccgaacataagcaccgggaacatgacgccgaagccgtagcccatggcgatgttcaaccagccggcgtggtgacccttggtgttcttgagctcgacgttggccacggagccgttgccgaagatcatcagaatggcggtgccgaagaactcggcggccagcttggtaaagagagagtattccactgcttcttcttttctcttcgccgcgcaacaggcatggctgactgttcacggcattctgtgtgattggaaatccgttcgcggagccggcgacgcgatttacgctgggcgcgaaagcaaacgtggcgattgtacactttgccccacgacgaaatgctggcaggatgcgatgtcgaatgtccagccgaatgcaatgcccaaaaaagccaccggaatcagccgaagcgaccttgactctcagtggttgcgaatgacgttgcgcaggggtaggacgctggtgggcgagacggacagttcgtcgattcctaggcacaggaacgtatcggtcaggctcaggtctgcgccaagctcgccgcagatgccgcaccagatgccatgacgatgggcagcctcgatagtcatctggatcatgcgcagcacagctggtgaatgcgggtcggcaaagcgttcgagactcggggtctgacggtcacaggccagcgtgtactgggtcaggtcgttggtgccgatggagaagaaatcgacttcggcggccagctcgtcggccatgatgaccgacgcaggcgtctcgatcatgacgccgatctggatactctcgttgaagtcggtgtgctcgccgcgcagctcgcttttggcttcttcaagaatccgcttggcgtcgcgcacctcctgcaccgaggtgatcatgggcagcataatggcgatattgccgtatgctgaggcgcgcaacaatgcgcgtaactggactttgaaaatctccgggcgggtcaggcagatgcggattgcccggtaaccaagcgcggggttatcctcgtggtccagattgaagtagtcgacctgtttgtccgcgccgatgtcgagtgtgcggatgatgaccggacggtcgcccatctcctgtgcgacttgtctgtatgcatcgaactgaaattcctcggtcggccagtcctcgcgttccagatacaggaactcactgcggaacaagccgatgccctcagcatcgttggccagcacggcggctacgtcagagggacggctgatgttggcgtacaggtggacccgctgaccggacttggtttcggtgggcttgcctttgagcttccgtagtaggctcaggtgttcctcagcttcggccttcctgcgctggcactcggtcagcgtggcctcgtccgggtcgacgaacaccacaccgctggcgccgtcgattacggcaacgtgaccgtcatcagtcgggtcgaaggcgtcgccgataccggtgatggcgggcaggcccatcgtgcgcgccagaatcgcggtgtgcgagttcgctgagcccttggcggtcacgaggcccaaaaccttagcgcggtcgagctgcgcggtctcgctgggagcaagatcttgggcgaagatgatgtggctttcgccgttctgcgcaatcccgttctgcgcaatcccgttctgcacagtaccgttctgcacagcatcgccttgtatactgccatcctgcgccgtgctatcgcgtttgccttgcagcacgttcatcacgcggcgagaaacatcctcgacatcagcggctcgagcctgcatggtcgagctatccatcgcagcgaacatggcggcgaactgttcggcgacgctcttcaccgcaaattcggcgttcaccttgtcttgcgcaatcaaaccttcgacgcatcccgcatagtccgggtcctggagcataagccgatgggcgtcgaacagctcggccttgttttcgccgaactcagcggcgacgttgtcacgcagtcgcctgagctgagcgacggccatgtcacgggccgcgcggaatcgatccatctcagcctgcggatcgtcgattacgcggcgttctacagcatgatcggcggcggcgagcacgcggaccgtgccgatagcaatgccagcggatacgccaacgccctgtatcgttctcattacaggtgctccttgaggaatcgctcgaactctgcggcagcgacagcttcatcgttgccctgcacccgaaccgtaacctcgtcaccttgttgaacatcaagtcccataacaccgaagatacgcttggcatccacggatttgccgccgtaggcaacggtgatgttcgactcatattcccgcgctttggcaaccaaccggccagctgggcgggcgtgcatgccttcggggtcggatacggtgaacgcgaatatctgagacatgacgccgctccttacacgtccggccgtcacgcgcgaagacggcctttccgcaccagctacggactgatgctggaaaaaacaaaaaaccggaatctttcgattccggttgtctgtgcccccgcagggattcgaaccctggacacgctgattaagagtcagctgctctaaccaactgagctacaggggcttggttagatgttgaagtgttccttgcaacaggtgataaatatactcagatttgaagcgaatgcaactctcggcgtgtcgcgtctatttccggcgtttttgctaatacaaaaatcccccatgcggcgcgaaccgcacgggggatgatgcttaagctcagactcttggtctgtgtgattccagcactaggccggaatgactcactcggccacgaccttcacgaagaaggaagcggtgatctccgggtggagggccaccttggcggggaaatcgccggtggtcttgatggtctcgacctcgatggccttcgggttcaccgcggccttgtcggacagagcgatggcgatggcctcgttggagataccaccgaacagcttgccggactcggacaccttggcggcgatctcgacggtggtgccctcgatggcggccttggcggcgacggcgtcctcgcgggtggcgacggccttggccagacgagcgcgcttcatagcggtgatctgagcctcagcacccttggtccacgcgaaagcgaggccctgcgggaacaggtagttgcgggcgtagccggacttcacgtcgacaacgtcaccggaatggcccaggttggacacggtcttggtgagaataaccttggtttcagccattgttcaaagcctccctaactcagcgacccgaagtggcgtacggcagcagggccatctcgcgggcgttcttgatcgccttggacagctcacgctgctcctgcacggtcacgccggtgatacgacgggaacggatcttgccgcgatcggaaatgaacttgcgcagcagcgcgacgtccttgtaatcgatctcggtgaccttggcggccttcagcgggttcggcttcttcttgaacggcttgaccggcggttgcggcctcttacgtgacatgatgttctccttataaatcttgatattgattgctgctggcagcggggaggtaagtactgatcagaactccgggtcggaatcgtcgccgccgccgaaatcggaggaagcgccgaacgtggagaagctaccggcatcagatgcaccggcattgctccacgggtcggccgcaggagcggacgggttggcgggagcggcaggctgctgggagtatccagcgccaccaccctgatagccaccgttgtaaccgccctggccaccggcataaccaccttggccaccctggttgccatagccctgattgggttgctgaccaccctggaaaccaccggaacgaccttggaagccgccctgaccggacgactggcgggtcacctgtgcggtggcgtagcgcagggagggcccgatttcatcgagctgcatctccacgacggttcgctgggaaccatcctgtgcctgataggaacgctgctggaggcggccggtggcaatcacgcgcatgcccttcttcagggactgggcgcagtggtcggccaggtcacgccaagcggagcacctcatgaacagcgcctgaccatcctcgaactggttggtctgacgattccaggttcgcggggtggaagcaatcgtgaagctcgccacggtcgcgccgctgccaatagcgcgcagctcggggtccgcagtgaggttgcccacgatggtgatgacggtttcgcctgccataacggtccttcttacttaccttgaataccagctgttcagctgactaaacgcttgattcagcccttacgaaggatcttcgtacggatcacggattcgttgaggttcagaacacggtcgagctcatcgctggtagcgggctcggcggtgtacttcaccacgacgtagttgccttcggtcttaccggcaatctcataggcgagcttgcgacggccccagtaatcgggctcatcgaaagagccgccttccttggtgacgagttccagatactgctcggtcagcttcttcagaccgcgctcatccagctcaggatcggcgatgaacatcagttcgtacttgtgcgcagacatcacccacctccttcggactattcggccacggacgttccgtggcaggagtgtgtatgcgtgttagcccatgacgcagcaccaaaccggcaccgcatcttcgggcaacttggacagtctatatataaggcgggacagggtatggccatattcctgccggtttcgcgatgcccaccattttggccaagcccgcgcagccaagcccgcgcagccaagcccgcgcgccatcacccagtattgtccatttcgagcctcgccctatggtcatggcgctgattttgcgggtacgatagtgctcgaagaagcatcagaagaaagggggactatatgttctgtcctaattgtggcgcagctgtgcgcgaaggagcgtaattctgcggttcctgcggcaaccatcttgccgcggcgtcagctccagcagcagcgacgcccaccgcacccacgcccggtcaacccaccggcgccgttcccacgaccgcacagcctgcggctcccgcaccatcgattccgttgcccggcgcagcggctgtgcagccgacgcctcagcccgctgcacagccgcaggcccagcccgcaggcggaccggcattcaccgcaccgaccacggccattccgaacccagggcagcccggcccatcgccggctcccgccgctccggcacaaccccatctcttccagcccactggtcaaggaactgttcggcgcccccaacatgcagaccatcggcattgcggccggcatcggtacggcagccgccttggtgctttcgattttccctgcaatcgcaatgaattccatgagcaccgcagcacccagcctcggggccgattcaacactgaaccaagccgttggcggcatgttcatcaccggcaacggcatgaacttcttccactacctgttcctatcgttggtcatgggcctgtctggcggtattcatttcgacatcgtcgacctctcatcctccagcatggacgccagcaacatgatgtcgtacccactggggctcaccggcttggcattgctggtcggcaccgcattcggcgcattcatgctggcccgttccaagagcattcgattcaagttcaccggcctgatctccggctttatcaccggattgctgccggccgtggtcatcacgctgcttgcggccatcacggcggcaccactcgccagtggcaccaccatcgtggccaaggtgaccggcgccacagtgcgtacgttctttatggcctacctgctctccgcgctcggcgctctggccggctatgcactggcccaatatgcttccgattccaagaatgtgttcggagctacttggcagtgggcacaccgcgttcgcggatacacgcgcacggtggtcagcgtcttgagcttccagctggctttgctcttcatcgtcggcctggtggccctgttcgccgtggcattctcctcaggtcagggaatcctgatactgacgttcccggtcacactgctgatgatcggcgagttcttctttacctggggaaccttcggcgccattacactgaccgagtccggtcagctgccgcaggatctcagcctgttcagcatcaacctcagcgttaccgtatggcctatttggatcctgttcgccgtgttcctggtcctcaccttctacacggcattgcgcgtctccgcacgcaacctgtacgaccgtgcctacatgggctggcagcactgctggaaagccccgatcgccatcatggtgttctgggcgattgccacgctgctgatgggtactatgggcaaccgcacctccgtcacgcaagttcaggccaccggacctgccatgtggtacttcctggtcatgggcctgtgggcattcctggttgaggtcgttgcactgacgttcggcccgaccatggtggtttccatgccgggactgcgggccctacttgtaggcggcactgtgcgtgccacgcctcagcctgtggtcgactacatctatgccagcggcgcaatggtcggcaagtggcccacgtggggcacgccaagcgccggcgtgggtacgggcgcaaacgctgcgcagcctcacgtcaacgtcacgccgacgtccgccggccagcctcctgttgctggtgtcggtgtacccgcgcccgctgccccgggtgctccggccgcccctgcaacccccggtgctccgggcaccacattcgcaaccgcggctcccaccactcccggagcggcaccggtagccgcacctggcgcgacctccaccaccatgaatgagcagcagaagaagatcttcatcatcgttggtgccgtggccggcttcctcgtactgttcggtatcgtgtatggcgtgctgtcttccgccgtgttcagcgcgaagagcgtggcgaacagctatgtggccgccatctcctccggcgactacgacaaggccaacaccatcgccgatcctcacgtggatacgaaccagcgcgcactgctgaccagcaaggcatcctcgggcgagaacacgcacatcaccaacgcgcgcatctcgcagacttccaacaatgccgatggcaccgtgagcgcccagctgacgtacacgcttgaaggcaaggaggtcaccggcgattccatcaagatggtggccaacggcagcaagttcctgatcttcaagaactggaccgtcgccgaaccgttggtcaagaccatttcggtatatgcgccaagctcgctgggcagcatcaccgtcaatggcgtgaccgtaacgcccaagaacgccgtgaacaacgacgcggacgaaaccggcaactaccggctcaaggtgtaccccggcgtctacaaagttggcgtggtgaagtccgactattacaccgccaagaccgtgtctctgagcaccaacagctccgatagcggcactcttgacgctcagcctacggacaagttgacgtcggaaatcgacacggcggtgaagagcaagctggatgaatgcgcggcttccaccgatgcggaaccgcagggctgcccgttcggctactacacctccaattccagccgataccgcaacttcaagtggacgattgacggttatccgaaggtcaccagcgtgagcctgtcggatagctcgttcagcaccgacgaaggtgatgtgacggcgaattacgagtaccgttacagcgatggctgggaaccggaagacgattccagcactttctcggtgtacggcaccttcaccatcaaagacaataaggtcagtgtcgagttctccgaataatttcggcaatctcaacactcttacgaaataggcaccccgccgtggcgttcgctgcggcggggtgcttgtacactggttaaggcgtaaatcacacagcgactcaaacaaaggatgcgaacgcatgtcggcgattcttgaaggcactccggataaacgactcgtattggtcacgggccgcgcctaccccgagctagctgagaaggtggccgaatgcttgggaaccgaaatcctcgaaaccacgtcctatgactttgccaatggcgagatgtacgtgcgtttcaccgaaccggtgcgtggtgcggacgtgttcgtgctgcagtgtcattcgggcgatatcaacaagtggatcatggaacagctcatcatgatcgacgctttgaagcgcgcctccgccaagtcgattaccgtggtggcgcccttcctcggctactcgcgccaggataagaagcaccgcggtcgtgagcccatcaccgcccgtctgattttcgatctgttccacgccgccggtgccgaccgcattatgacggtcgatctgcacgccgctcaggagcagggtttcttcgatggtccggtcgatcatctaaccgccatgccggtgctgctcgattacgtgcgttccacccttgatctgggcaacaccaccatcgtgtccccggatgccggccgtatcaaggtgtccgaacagtgggccgccaagctaggcaatctgccgctggcgttcatccacaaacagcgtgatattactcgtccgaaccatgccgaggcacatggcatcatcggcgatgtcgacggccgcgactgcgtggtcatcgacgacatggtcgataccgccggtactatctgcgaagccgtgcgcacactgaacgaatccggcgccaagtcggtgaccttggtcgccactcatggcttgctttccggcccggccgtggagcgactggccaactgtggcgcgcatgaaatcgtgtttatggacaccgtgccgattcctgaagagaagcgcctgccgaatatgaccgtgctgtcttgcgcaccgctgctggccgcgggtattcgctccgtgttcgaggaaggttctgtggcgattctgctcgacggcctgcccgaggacatgcgtccgcgcaatatctatgcgtgattgatacgccgaaaatccttacgaaaaaacgccgcttgactatagttgggtgtacgtaagacagtattgcgccgagatcgacgaagcggcacgaaaccgcatggagctgatcgtgcggtcactggcagagcaaaacggcgtgaccgagcaactgaaagccgaaaaccaaatggaatgggtgcggcagatgaacgcttgcaaggcacaggcagaggagattgtgaaagcggaattgatttatgattgagtgagaaaagtccgggcagaaaactgtcc

SEQ ID NO: 2432 - DNA, 12539 bp, Unknown
  R50_10m  MAG No. k141_12531
atttgggcaggcctgttcgtttatatatgcattgtaagtatgcctaaaaaaagaagaggcaaagatacgcagagcatgaaaaatgacacaattccgattacgacatgtgaagccatcgacgtatccaagtcgggcacattgggatataagcttcgaatgacggatttcacacaagaaacaaccggtatcatcacccaacagagaaaacctaagcccagcactgctgtaagtctggagccatacgtattcaaatcactgcagggtgggggagaaagtgtcaacacgctgcaaacgaggctgtaattatcgcgttcagcccatgtcattactgctggtgaaagcagcagtaatcccagccaccatagcacgcgtctggccttgcccaaagccacatagcatctactcgccttagggaatttggtagctgctgctttcggtgccaaagcacatttctcgccggaaaaactttctgacatatcttctgtgccgtgtttcttcccaatgccatcgatcataaccggattcgctttgcaaatgtggcgttcgttcccggcgtcgccctccgccttgatgccgtccgtggacccggtgttcccgcgcccgcccgctggcttgtccatgtcccctccgatctgtcgaggtgcccgttccgcgcgtccgttctctgcgcgcccgcccggcgtgcgccgtcgccggccagtctagggccggatgacgcgagcggggaggcccgcgccgtcaatcggcacggaacctccccgctcgcttttgtcggtcggtcaggcgcggatcagcctgtgttctgcaggccggcagcaacacctgaaacggtgcagaggatcagatagatgaatcctgcctgctggctttgcgaaagctcttccttgtccaccttcttgcgcagcgacttgagcgccagcacctgggtgacggacagcgcgtccacgtatggggagcggatgcggatggcctggccgagcacgtgacggtgctgcagcggccacttgtcacccacgatggccagaacccacttgcgggtgagctccatctcgttgagcaccttctcattgaggtcctcgcggtcgccgagggcaaggtacatcctggcgatgcgctcatccgtcttggcgatggacatctcgatgttgtcgatgaacgtggagaacagcggccattcctcgtaagcctgacgcatggtctccagatcgccgaacttctcgcatgcggtgccgagaccgtaccaggcggccaggttgatgcgggcctgggcccaggagaagatccacggaatcgtacgcaggtcgtcgagcgacttggcgccgaggccacgcttggccgggcgggagccgatcggcagcaggccgatttcggtcagcggcgtaacgatcgagaaccacggagcgaagccatcggtgttcaacaggtcgaggaaacggttgtgcgcggcctcgtcgagctgagcggccatgtcggcgtacctctcggtcatctcggtgttgcgcttctccacactcggcgcggactgcagcaaggtcgccgcagccacggactcgacgtggcggatggccagcaccgggttgccgtaacgggcgaagatgacctcgccctgctcggtgagcttgaagcggcacttgacggaaccgaccggctgggcgagcaccgcacggttggcggggccgccgccacgacctacggcaccgccgcggccatggaacagggtcaggtcgatgtcgtgcgactcagcccacttggcaatgcgctcctgagcggagtgcagggccagcgtggcggaggtcgggccggcgtccttcgaggagtcggagtagccgagcatgacctcgagcttgttgccggtggccttcagacgagcctgaacctcggggatcttgatcatttcctcgagcacgtccaccgagttctgcagatcctcaagctgctcgaacagcgggatcacgtcgatggtgggcacgtcctccgggtgggagaaggccaagcggttgagctcgtagacatccttgatgttctgggcgctcttggtgaaggagatgatgtagcggcgggcggccttgaggccgttgcgcttctggatggcaccgagggcgcggaaggtgtcgagcacctcgtgcgtcatcggctgcagttcgccgcgctcgccgtgcaggccgtgctcgcggatatccgcaagggcgcgggcgtgcaccacggagtgctgacggaactccatctccaccatgtggaagccgaaggtctcggtctgccagatcagatcctgcagcgggccgtaagcggaacgcttggcgccggcggcggccagcgaacgctggaccaccttgaggtcggcgaggaagtcgtcgcaggagtggtacatgaggtcggcatcgcgctcgatggtgtagtgcagacgatcggccatcaccagcatgaccgcgcggtgcatctccttggtggagatcagggcggccttgtcggtcagacgctcgctcatttccttctggtggctccagaggctcttgagctcggcgctcggcggcgtggtctcggcttccatcgtgaggttgcggcccacggtgcgggtggcttcctcaagggcggcgattacgtgatcggagaacttgcgggccacggcgcggctcaccttggcggtgacgttcgggttaccgtcgcggtcggagccgatccagctgcccgggtggaagaacgcggggcaagcgggctcgacgagaccggccttatcgcccaggacccagtcgtcgaagcgacggtagaccttggggatggtgttgaacagcgtgttgtcgaagatgtcgagaatcgtgtccgcttcctcaaccggggtcggcttcttcagcgcgatcggagaggtgcggaacagggcgtcgatctcgttgtagagacggcgcaggcattccttcttatccgagccgccgaggcgcttgtactcctcaagcaattcggaaacgcggcggatcttgccttccacggccttacgacgggcctcagtggggtgcgccgtgaagacggggtggaattcgagctggttgagcagttccttggccttggccgggccagtctcattgatgagctggtggtaggcgacggtgagctcgttgatcgggtcgaccgcctggtcaacggacacgttgttctcgcgctcgtggagcacggaaacacggtagttctcctcggacaggtttgccagatggaaatacgtggcgaatgcgcgggccagcagctgggcgtcgtgcaacgtcatgttgtcgatgacgttcacggcctccttcaggccatcctggtcggggttcggatccttcagctcggcgaaatgctcggcgctggcctccaccgcgtaatgacgcacggtgtcgaacgtagacagcagttcggggttgtattcgcccagtacgttacgcaggatctcaagacacagatccatgtcgtacttcaggctttcgggaagatcatgctcctccgggccctttcggccggtcccggtagtgacgatggcggcgtcagcgggagtgatctgttcttcaggtgttgccatataacctcctttgccgaataacaggttgctcggtctaccggtcgtctgcggctcctccgcagttgttgaggccagtcgttgcgagcccacagcccatattcaacgtggttgttgtgtgggcaatagtgtatccccgcgaaatcgctatttgcgttacggagtccatatagtgcgccaagttgtccacctatagagaccgaatatcggacagcatatgagacactgtccgattcgcggaagatttgagcgccttacgattgccggcgggggaggcagggagtagtaatgagggatgtgagcgaacagaagaaaaaaagtgcgcccgaagcgaaaggcgcaacggctgtacgtaaattccacacccactccattccgctggacatggaagatattgcgcgcgattgggaaaaaccggtggtggacgccggtatcgccgccaaagccagcgtgattgtacgggtcggcatgctggacctgggagccggcaccggctccttccgcgtgcgtgaaatgatgcaccgcatcgcctacccgctgggcgtgcacgtacgcgccgacgtgaacctgacggatatcgaggccacctgcacggatggtcgtaaccgcatcaccgaagtcgtggatttgccgaccaccggcgtgaacaccgaacgtatctggctgctggaacatttcgccgactggttctccgtgaatctcggcaaggggtcgatgtatcacgtcgattcgcaactgtccgatggcgtggtcaagcatttggacgaacgtgacgcttcgcagtattcggccgatctggccaagcgcctgcgcgaacgtgccaaggccgaggctgaggcggccaacggcagcgtggacgagacgctggatcttgcgttgaaaaccaaggtactcgtgacctccgtggccaagtccttggatgatgacaatggagaagcccaccgacttttggcggacagcgcggaaatcactccggtcgaagacaaagcggccgaagagaaggcctacgacgatgccgaagtgtttaccggtgactccaatgagtcggttgaatcggcgaacgcggcgaatgccgaggcgggcgctgagggcgcggcggcgaacggcgcaaccgccgaaagccctgctgcaagcagtacgaagtgcaagaatcgcgtgcccaaggaatacgccgaacacttcaacgagcgctccgacgaagagaaggccaagggcggtatcaccgtgcggcaggcgcacgagcggctcgatctgattgagcgtcgcaagccgctgtacaagccgtggttctccggtctggcctccgccctggcctgcgcggccttcgtgttcctgctcggcggcggcccatacgacatgatcggtgcgttcgtgggagcgggccttggccagtggatgcgtcgccggctgtttgcataccatctgaaccagttcttcgtcacctttgtgtgcgtggccgcggcggcgctcgcctgcaccggcaccttgcgactcatcggcattttcgacccagtcgcgctctcgcacgatacggcctacatcggcgccatgctgttcgtgatccccggtttcccgctcatcaccggcggactcgacatggcgaaaatcgacttcccctcgggcatccagcgcgtggcgtacgtgctgtgcatcatcctgatggccacgctggcaggctgggccgtggccgtgatggtgcacctgcacccggaaggctttgagccattggggcttgacccgtgggttaacggattgctgcggttcgtggcggcgttcgtcggcgtgtggggcttctccgtgctgttcaattcgccgcagcgcatgtgcctgaccgccgccctaatcggtgcgatcacggacacgctgcgtctggaattgcaggacttcaacgtggcacccgagatggctaccttcatcggcgcgtttctggcgggcattctggcatcggcgtggcgttcatccgtgcgacgtggctggctaccgccgcacctcggctacccgcgcatctgcctgaccgtgccgtcgatcgtgatcatggtgcccggtctgtatatgtaccgtgccatgtggtacctcggcagcttccagaccatgaatgcgctggactgggcgttccgtgcgttcatggtgatcatctgcctgccgatcggcttggcgatggcccgcgtggtgaccgacaagtcctggcgctacgacatctgaccgtcatcttggctcccctcaggtgaggggagctcggataaaacagcgtctcagtatggaagcggtggaaggtgcttgagcccttgtatccactaccatcaggcgaagtgcgttgcggccgtattcacggctgtgacggtctgtatgacgccgctccggcgtcaatcgcatatcagcacatagttctgccatggcggtagccgcttggcgtcatgattgaggaggggtcgcagttggccaacgatttctggattctgctggccatggtcatctattttgcggccatgctgtccatcggcttcgtctactccaagaggtccaactcctccgccagacagtacttcgcgggcgggcgcggcgtggggccgtggctcacggccctgagcgccgaagcctccgacatgagcggatggctgctgatgggcctgccgggcctggcctacttcaccggcgcggccgacccgatgtggaccgccatcggcctggcgctcggcacctatctcaactggaagcttgtggcccggcgactgcgccgctactcggtagtggccggcgatgccatcaccattcctgacttcttcgccaagcgtttccatgacaagaagggcgtggtctccaccatcgcggccgtgatcatcctggtgttcttcagcgtgtacgtgggcagctgcttcgtgaccgtgggcaagctgttcgccacgttgttcggtttcgactaccacgtcatgatgatcatcggcgcggtggtcgtgttcgtctacaccgtggtgggcggctacttgtccgtggtgatgaccgacttcattcagggcatgctcatgttcttcgcgctcgtggtggtgttcatcggcactgtggccagcgctggcggcgtcgacaacaccgtggaattcctgcgtgccatccccggctacctgtccagcacgcaggtggccgcgcccaagctggacccggccaccggccagcagctcgtcgaggcgggcaaggccgtgttcggcgcgccctccgactacggcatcatcaccatcatctccatgctggcgtggggcctgggttacttcggtatgccgcaggtgctggtgcgcttcctgtccatccgcagcgtggaagaagtgcgcaagtcccgaatcatcgccacctcctggtgcgtgatttcgctgggttgcgcagtgtgcatcggcttggtgggacgtgcgatgatgcccaccgaactgctgacctccaccgatgcggaaaccattttcatcgtgctggcgcagaccctgctgccgagcttcatgtgcggcgtggtggtctccggcattttcgcggcctcgatgagctccagctcctcgtatctgatcatcggcgcttcggccatgggcgagaatatcttccgcgggctgctgcaccgcaaggccaccgacaagcaggtcatgatcgtggccagggtcacgctggtggtcatgttcctgttcggcattctggtggcatacgaccagaactcgtcgatcttccaggtggtgtcttacgcgtgggccgggcttggcgcctcattcggcccgttgatgctgtgctcgctatactggcgtcgcgccaacaaggccggcgccgtggccggcatgctgtccggcacggcggccgtgctgatctggcacaacctcgtcaagcccttggacggcgtattcgccatctatgagctgctgccggcgttcatcatttcgctgctgttcatcgtggtggtttcgttgctgaccgccaaaccgaacgagcgtatgctctacgagttcgaccactacatggacgatccgctgcccggcaccctgccgtccggcaccgtgctcgtcgacgagcccatggaagccatggagtccgaggtccgcagcggcaaatgacacgtgcctgctgtgcggtcgcctcgtatggcagaggagtggcttttttgtggttcggcaggaaccattgaggccaaaacggacttcgaggggctgatttgacgttctggagaggtctactgccgtttcaaggggctgatgcctgagtagacgcggctccaaaacggcggaatggcgttggcgtaaggacattgatacacgtggtctagcggatgatcagccccttgaaaccgaagtagacctccggcggaggccaaatcagccccttgaaatgggttttgaataccgtagcgcggtgcggacggtgcggactgactctaccgggcttattattcctgcgtcgtcggaataatcggcagcagaggctcgaatttcagccgtttgtacagcggaatacggcgtagctttcggacatcgctaatttgctgggtggtttgccgcatcgtgagctggaccgttttgcccgtaacctcctgtatcctttcggcaacccttcgggcaagggcctcttctcccgcttcgtcgccaatatctaatttggtgacttgaatgtacttccagccagcgtcttcgatcatctggcggcgtctcgcgtcattcagccattgcccggcatgatgagagccttcgtattcgatgcatatcttgaattcagggtatgcaagatcgagatatatgggtctggtgttgtttcctacgaatattggataattcacctgcgggcaatccagaccgtatttcaagagaaccaaacgagttcgtgtttccatggaggaatctgtgcccgcgcgcgccaaaagcagggcgcgacggcatttgttatacccgcggaacaaatacgaattggtgccattctctttgtcggctcgcacctgggcctcggcctcatcgagatacagagaaagggcgtcgatggttgttctgcagagccttcgatctcgtcgcatcatggaatcagcgagaacgatgagttcttcaagttcgagatacgcggagaacatggcccatgtgcaagctggtgaagtgcatgtgaattgtccctcgattatgaccgtgtctagtgggaaaggccatacaaccactttgacccccacaatgtgccgtttgtcattggcgtgtggaatcgcaacaatggttgtagttgcaaggcctctgtgtttgcttgatatgcggggtacttcaattgacaaaagctccaacgctgttgtcagggcataaggtgggcgccatgcgcttcgtcgttgaacatctgcgcacgtctgcattcgttgatacttctgcattgtcagctcggtcaatgccgttgagctacccatgatgatcaccccttcgtgatgttcgctttgtcctcgcagtgtagggtccggctaccggccctgtctaccgccccaatttttcggtggataaatgtggataagtcggtggataaactatgggcgttcatcgcagttgcaggcatcccgcaattacatggaacgtaggggtttgcaggcagccagcgggaatcgccgccgacggtgcgattcagcttgaacgaatctccatggcgttcatgcaaaggtggcatgatggcgggtatgagtagcttggtgcgtattgtcaatgccggtgttccggggtctcagggccacgtggatgtggtgcttcgcgatggggttgttgcgtctgtcggccctgctggaacggtctcggcttcggacggcacgatgcagactaaggcgcatacgacatcgttggcatacgcgacgaatgccattgcttctggcagcgtctcaatcccaacgtcggcctccgcacctgctgacgaaaccaccatcgacgccgacggcctgtgggttattcccggcctgtgggactgccacacgcacttcacgcaatgggctaagacgctgggccgactggacctcatcaatgcccgttccgccgccgaagcgatggacatgttgcgccgtcatctggatgagcgccgcgccgccggcacgcttgacccagatgccttcgtggtgggcatgcgattccgtcactcgctgtgggccgacgacgagcagcccacactggccgcaattgacgccgtgaccggcgaacagccggtggccctctccagcgcggacatgcactgtggatgggtgaactctgccgcggcccgcaggcttggcgtacatgtggacggatccggtctggtcggcgaactcgaatggttcaacgcctacaccgccttcgacaaggcgccgggcgctgctgaagagactgaccgtctgctgcgcgaggccgaacaggacgccgcaagcaagggcgtggtgggcatccgcgattatgaaatggccgaaaacatcgatacatggaccaatcgtttcgcggccggcattaacggtttgcgcgtggacgctggtgtataccccgagcggttgcaagccgccattgacgcgggttggcataccggcaacccactgccgggcagcgccgggctcggccatgtgggcgccatgaagctcatctcggacggatcgctcaacacccgctccgcctactgctccacgccgtattcgggcatcgagccgccgacgtatggcacgctgagctacacgccgcagcaaatcgaagactatatgcgcctagccaccgagcatggcttcgacatcgcctgccacgctattggcgacgaagcgaacaccattgcgctcaacgcagtcgccgccacgcacgcacatggatcgatcgagcacgcacagatgctcaaacccgtcgatatcccgcgtttcgccgagctggggctcacggccagcatccagccgcagcacgccatggatgaccgcgacgtcatcacccgtttctgggccaacccggccggtatcccttatccgttcagggccctccacgacgccggtaccacgctgcgcatgggctcggatgcgcccgtggccccgctggacccgtggctggccatttccgccgccgtgttcggctccgaaagctctgaccgcgagccgttccagcccgagcagtgcctcgatgtgcgcacctcgctggcagcctcgaccgccactggccgtgaccgccttgcattcggcgacccggccgatatggtgttgctggacgccgacccatacgccgccgatactccggaagccatgcgcgctatgccgcaacacgtcgtaatgacattgctgtgcggggagcgtacgtattgatgcaagccatcggcatgaagtgaccagaggtccgtcttgatagccgcgttgcacggaaaacatgttgtgttttttgaattgagagttactaacgcttgattctccgtttcaaggggcggatttgagcctttccggaggtctatctccgtttcaaggggctggtcatgcgctcaatctcagataaaatcccattcacgccagcgtcattccgccgtttttgtgcctcgcctacttgagcaacagcccctcgaagcggagatagacctccggaaaacgagaaatccgcccctcgaagtgaagataggacacagcagacgccgcaatgcaaaaaacgccgtgtcagttgcccagttggggctgacatggcgtcttgctacgagcggcgggaaaatcagtacttcatgcccatggcctcgcgcacctggtcgagggtctcctcggcgatggcgttggcgcgcttgttgccgtcgtgcaggatgtcacgaatggagtccatgtccttggccagctcggcgcggcgctcgcggtgcggggccaggaactcgttgactgattcgatgacgtatgccttgagtgcgccggcgccggaatcaccgatctcctcggcgatgtccttcgggtcgcggccggtcaccaggccggcggtggtcagcagggcggagacctgcgggcgggcaaccgggtcgaaggtgatgcggcgctcggaatcggtcgggctcttcttgatgagcttggcggtttcctcggcggtggcgcccagcatgatggagttgccgtacgacttgctcatcttgcggccgtcgagacccggaatctccggtgcctcagacagaatggcggccggctccgggaacaccgggttcttcttggcgtaacgctcgttgaaacggcgggcgatggtgcgcgtgatttccacgtgcggcaggttgtccttgccgatcggcacgacattggccttgcagaagaggatgtcgcacgcctggtgcaccgggtaggtgagcagcagaccggtcagcgcgtggccggacgcctccatctcggacttcacggtcgggttgcggtgcagctcagcctcggtgaccagggacaggaacggcagcagcagctggttctcggccggcacggcggagtgggtgaacatcatggtcttgttcggatcgatgccggcggccatgtagtcgagcaccaggttcagcacgttgtcttggatgtgctcggtggtgtcgcggtcggtgatcacctggtagtcggcgatgatgatgttcgtgttgacgccgcgctcctgcatggcgacacgctcacggatcgagccgaagtagtggccgaggtgcagccggccggtcgggcggtcgccggtcaacatggtgaaggacgacggcttggcctccagcttggcgagcgtttcgtccgaacgctttttggccgcgaggaagctcgcgcttatctcattgcctgccgctgtcagttgctgctcgtcggtcatgcgaaaatcctttaaatagggctcagataaacgctttttatggtaaaagtgtgagccgacaacgaacaagccactattagtggtactctctattgttgatgaatcgaacagcacagtaatcgcagggggtcagatgggccgcggacgtcaaaaagcaaaacagcagaaaattgcccgaaagctcaagtacctgaccaccgataccgattacgatgagctggcaaaagagctgagcgagcaggagccgggaa

SEQ ID NO: 2433 - DNA, 4929 bp, Unknown
  R50_10m  MAG No. k141_12740
cggccgttgtctttgtcatggttctggcacactccttgaactactgatatatctacgcttagtatacgagacgagggcctgatcatcgtcctcctcttttgatgggaaaaacaatgatccggtcccgacacttcacatcagggtctcgaacttgccgaggaagtcagtgaacgaaagaatgttcgccatgctttcgccgaacaccgagttctgcacgccgaaccatccaaccatggaaatggccatcacgccgccgaagatggcggaacccattttgccgaatccggtccaacgggacagcagactggtggacaggccttcacgcgccgccgcagtacccagcgcccagctaatcacctgcaatagcactgatccgagcattgtcgctcagaacgcgccccagaaactcatgccgtagccgagggatgcaccgagcaccagctgaaagacacagcatatgctgccgatacggattaccagaatcctccagaacggctgcttggcctcggccggaacacgagacagggtgtagccgctgtcctgaatgggctcattctgtgtctgggatatcttgcttgcggaatcctcattgccggcaacttgcgtttgtgaagacgccatatgccactccttttcgagaagacaacaaatatggcgctattgctacccccgtggccaacgtgttacgaaagtatgaagagagtacttataacggctgatcatcggtgatcaaaaaccgcagaaaatagcgaatcctttggtcacatcgtgattccgacagcgaaaatccacataatggacatatccatatacggcagctgaaacacaaaccatcattttcccgcttgtgaatatgtaacactagcgcaacctcagtgtcacatattcgggaaatccagtggacccgcgcccgctactcccctcagtcgtctacgacgacagctcccctcagagaggggagccaagcaataacccgcagcagctcagcgcgtcatttcctcgtagatgcgcttgcagtcagggcagacggggtatttggacggatcgtgcttgggcacccagaccttgccgcacagcgcaaccaccggacggccggtcgcgcgggattccgcgatacggtccttggacacatagtgtgcaaagcggtcggcgtcgccgccatcgtcgcgcaccggcgactccttggtctccggacgttccagcacggaggttccggcaccctggtcggggttgcgcagcggttcggcgtcattggagaacagatcagcaaaagtcatagtgcacttctttcctcgtactgtacgattcaactgcatcccatcatagattcccatcgcaaaccgcgaaaccctccgcatgtaacatgtggccgcacgaagcgcaccattgcacaccattcgcggtaggctataaggcatgactatcgcagtatgccccggctcgtatgaccccgttaccgccggacacttggatgtaatcgagcgctcggcgcggtttttcgacgaggtgcatgtggtggtggccgtcaacgccgcgaaaacaccgatgttttccgaagccaccagagtcgacgtgatccgccgtgcccttgacaaagccggttgcaagaacgtcactgtttcttccaccgacggcctgatcaccgactactgcaagaaggtcggcgccaccgttatcgtcaagggtctgcgccagaacggcgactatgaagccgagctcggcatggcgctggtcaatcgcaagctcgccggcatcgaaaccctgtttttgccggccgatccgattcttgaacacatctccagttccatcgtcaaggacgtggcccgccatggaggcgacgtgaccggcatggtgcccgattgtgtcgtgccgatgctggccgatgccctggccgaggaacgtcagcggaaggactgatgcactaatgactatgagcgatgaccaccccactggatacgtcgatctgaccaaaccgaatgcggacgccgcatcgtccactccggagccgtccgccccggaaccgcccgcgtctacgcaagccgcgccggcacccaccgaagaggccgatgttctcgccggatcgccgcccgccgcgcctacccctactccggcacagatgcaggccaaagcgcaggcccaagcagctcagcagacccgggcacaagctcagaccgctcaggccgccggcactcgcccctcgttcatgaacgaaatgcccgacctgcgagaaaccacggacgacgacccggccacggtcaagagccgcgaggaattcaccacggtgtatgacatcatcgaccagctcgaggcggcactgggcgaagcgaagtccagcatattcgcccccggcatggtgaaggttgaccgcgacgaattcaccgaccagctttccgagttgaagaaaatgctgccggtgcagttggagcgcgcctccgccctcatgcgcgaggccgagcgccgtctggaatcggcacagacccagtccaacgccatcgtcgcctccgcacaaagccgcgcagccgacatgatcaaggacgccaacgaacaggcacagttcctggccggccaagagaacgtcaccgagcttgcacggcagaaagcgcgcgcgattcttgaccaggcacagaccagagccgaccatctgacccaaggcgcggaccagtactgcactacggtgatggaagggctgtcccagcagctcggcaaactcagtcgggatgtgcaggccggtcttaacgtgctggaagagcgccagcgtgcggccggcgaacagatgccgcacctgacgctgaacgactatcccgaagcccagtaacgccagcagcaccagcaacatcagtaacgcgaataacgccagtaacgaataactccagccaacatacgaaaggcaccaagaacagaccatggcacgagttgaagattccccgtgggccattccggtagcgcagattgcttcgcgcgccggtcaatccaagccgattgacgccgatttcccggccccttccggcattggcgacagcatcgtcggcatcaaggatggtgagcccgtacatgtgagcgggcagttcgattcgattgtggacggcctgatcttcaccggccgcctggtcgcgccattcgtcagcgagtgcacgcgctgcctgaagccgattgacgaggactggccggttgatgtgacggtgttcttcccgtatgagtcgggtcaggacaaggccaacggcaagggcggcaagaacaagaaggacgacgagatcgacatcatcgccggcgaggacgagtcggaagacacgtatccgctgctggagaacggcgcattcgcggacatcgaggcgatgatccgcgacacgctggtcgaatcgctgccgttgcaaccactgtgccgaccggattgcaggggtctgtgctcgcagtgcggtgccgatctgaacgaggatcccgaccatcatcacgatgtgacggatatccgttttgccggattggcggggctcaaagcccagctcgaggccgagcagaacggcgagcaggccgagtgacgcgcgcctgaacggagtttgtacgagccgtgcgttaagataacggacgcttaagctcaattgttcgaacgaaatagaggatactcaaatggcactgcctaagtacaagacctcgcgcgccaacacgcactcgcgtcgcgcgaactggaaggccaccgctgctgcgaccgtgaactgcccgaactgtggcgctccggccctgccgcacatggcttgcccgagctgcggtaactaccgcggccgcacctaccgctccgccatccagccggctcacaccaagtgagtcctgcgataacggcttgaatgaaggccctgccatcgacgggtggcggggtcttcgcataagtgcaccattacgtacaccatcgcatcgcaaacaacacaacacacaacacatcaccatcgcgtgaaggaccatacaacaatcatgagcaatgaaaccccacagcagccgacgccggccaacgagcttcttgaagcgttgggcaccactctcagcccggatctgctcgtgcaggcactcacccaccgctccttctcgcatgagcaccccggcgtggccaattacgaacgcctcgaattcctgggagacgcggtgctcgaactggtctccactgaaacgctgttcaccattcacccggatatgaccgaggggcaactggccaagatgcgcgccaaggccgtctccgaagacgcgctgagtgccatcgccaaaaccaagctcaaggtgggcccctacattctgctgggtcacggggaaaccgagcagggcggcgcggagaagaactccattctgtgcgacatcgtggaatcgctcatcggcgcgaccttcctggaacacggcatcgacgaggcacgcaaggtgattcaccggcttattgacgacacgctcgccgaagtggccaccgagggcccggcacttgactggaagacctcgctgaccgtcaaggcgcacggcctcggcaaggatgagccggtctaccatatggaggtctccggcccggagtacgcgcagatcttcaccgcgcgcgtctcattgggcgagaacggcgacatcatcggcatcggtaagggctccagcaagcgtaaggcgcagctggcggccgccgaagcgggctggaagtcactggactcgctcaagacgcggactaagtaagcccgctgtcagatttgcgaatagactgataccaacatgagcgacgagtcgtgccggggccacaagtctcggagaagcgactggaatcagacacgcgggcacccggccccatcccaaggtcgggcaggttcgcggcaaaatctatgaggtgagaggaatcatggctttacccacgcctttgcaggcattcagcggtgtgccgaaaatcaacgcggcacccgaccagcagaccatcgtcga

SEQ ID NO: 2434 - DNA, 27615 bp, Unknown
  R50_10m  MAG No. k141_12905
accccggccttcttcgccacatcgcgcatgccgaccatgatcgcaccttccccgtcatcactgttctatcgccgtattctcacgtgcttaccgctaatattacattcatttacatgctctcgaacctgttcgacagtccggcaacgaaatacagcttcttagtgtcgactcccgcggaggcgagggccttcagcagcggcttggtctggtcgaatgcaatcaccagcgttgcatccggactggcggccttgatggcggttgcgctcagatttctttcacgttactcagcgaccgtccgtgtaacgtgaaaattacgccggattggcaagcagcgcaatgccgaaaccggcggccacgcaaatgagaggcaccgcgacggttgctattccatagcccagagccagcgtaaaacgacgctggcgaatcaatgaaaccacttcgttgagcgccgtggagaatgttgagaaaccaccgagaaatccgacaacgaacatcatgaccgtgtccatatccaccgattgcgaatagtaggacatcatggcgatgcccgcgcatagcgaggcgacgccgttgatgacgagcgtggatagcgggaagttgcggttcgttcttcgattctcgcggttccagccttgttgaattgacacgtcgagcacgtaacgggccatggctcccagaccgccgaacagacagatcatccacatcatcagcgcacctccccggtagtcgggtcggcgacaagcgaaatctccgcagtgatcggtttgggctcgaagctgggtggaagcgggttggccggctgctggattggctgcgactgctgaatctcgggcagctgccccaagtctggagtatccggctcgcgcagcaacggatgcgccggctgcgtcagctgaggaacggccagcggaggaatctgcggaacgcggcctgtctgcataggctggctggctggcggcggcacggttggtgtttcgactcgcggaacctgtcccgtctgtgcaatctgctgggccgtctgcgcggcttccattgcggcctgcgcggcagaacgcgccacgtcggccactttcacatggcgtacgccctgcgtgtccgattcggcagaatcggacacggaaacagctgaaaacgcaccccgaacccgctttcgagtactccgtgacagcagtgcctgcatcagaaccacgccggcggcggcagtgagcaaaccgcctgcaaaatttcccgcaagatagccaaacgcactggcgatatgccgctcgtgcagaccttccaccgtttccagcatcacgccggacatcgtcgaaagcccgccgagcaagccgagcccaacgccacggctgacaacctgccgcacccggcgacgcagccacgaagcggtcgccatgaattcggtcagcatcgcgaacaggaagcaggcgaccatattcgacacaaacgtgcccacaacgaacggcgtcccgctaaccgacggcagaagcatatccaacgcatgccgacagccgactccaacaaatccaccgacgaacaccacaacatacatcagtccgtcggcgagcggattgaaccgcgcctgcatacgtttcatcggtgccaggggaatcgtaggcggatccatggtgttagcggcgggcgcggttgcaccagcatgcgtcacctcaacagcgtcgattgcctgcgtgatgggatgcgagtcctcacccgcagtcaccacgtctcccggcgattgttcttgcgattccattgcgctccccctgtactggccttccgcggacagcgttgttccgcccataggccgtgcaacaacgagctgggccgcggttgccgccttcctaacgcatatgagtttacacggagcgccaacgtatgcaccctggatgtccgattccgcagattcggacatccagagtccagccgaattcagccaggctcagtcaagccgggcatcacacagccgccgcatcgcaggtcgcacctcgcgctcctcctcgccactgaacagcaccaccagatagtcgccggcacgcagccgtgtatcaccgcgcggcacgatctcgctttcgccgcgacgcaggccgatgatcagacacccagacggccaacgcacgtcacgcacccgcttgccatccgcaatcgcccccatttccaatggcagttccataatgccgctgcccacatggcttgcgatcgccatctgcatgccttgcgcgcgcacgtaccgctccagcaactccccataaatcggtttggtgcgcagcaaatcggacaccaacagcgcgatgaaagcgacggccgcgaccggcagcatgtgcgtcaacgttccagacatctccacagccaacagaatcgacgtgatcggcgttttcacggacgcggcgagcgtgcccgtcatcacgcacaccgcaaacaccgccactgcgtcggatggcagatcaccgaatcgatgcaacacttcaccgcagatgccgccggccaacgaaccgaccgcaagaatcggcatgaaaataccgccaggcgcgcctgagccgaaactcgtagatgtgaacagcatcttcgccacgaacagcagacacagcattcccaagccgacgcgcgcatgttcggcggtatcaatcagattcgagccgccgccgagcacatcgggcaaccagatgccgacaggcaacgcgatcgcaatcgcaatcatcgggcggctccatgccggcagtttgccgtacagcgtctggaagccaagcaacgagcggttcatcagcgaaccaaccaaaccggccaccaatcccaacggaatcagccacacatattcttccaacgacagctgaccgatatcaccgaaatccaaaaccggacgcagaccgaaacagtattttgagacgaaatcggcggtcagcgatgcggcggtggcgcccatcagaatcgcaggggaaaaactccgatgcaccccttccaaagcgaacatcatgccggacagcggcgcgctgaacgcggcggacaagccggccgcggcaccggcggtgaccagataatgctcctgcatgtcctcacggcggcggccgcgcaaacggtgggatacacactgcgcgcccgacgcaccaatctgaatggacggcccctcacggccgagcgacagaccaaacaacgcgcccaacagtccaccgacgaaacggactggcagaatcgtctgccaacgcatcttcaagccgcatatcaccacgccgttggtctgcgggatgccgctgccaccagccatcggctccttgccgaccatccacgcgattgctagcgcggccgccaccgcggcaaccgcccacggcgcaatcagccacggggtctcgcgaatccgcgcatatatccaacgggacgcatccgtgccgtattcgatgccgagacggtatacgacaaccagcaatcctgaaaccagaccaatgactatgccggccgccgccatcttccacttcaagtggtcgaatcgcggaatcagccggcggatatcatgtgccgcgtcgttaccagtcaagccgggaaattcgttgcagacggtcagtcgaccagcgaattgatctggatgacatggtcgcgctgcggaccggtgccgatcgcggagatacggcagccgctcagctcttccaaacgcttgacgtaggcctggcaggtggcgggcagctcgtcgaaggagtggcagtcggagatgtcttcatcccagccgggcatggtctcgtaaatcggcttggcggcggcgaaggcggcctgatcggtcggcatgtcgtcgtgacgttcgccgtccacgtcgtaggccacgcagatcggaatctccttcaggccggtgagcacgtcgagcttggtgagcacgatgtcggtcaggccgttgacctgggaggcgtaacggttgacgactgcatcgaaccagccgcaacgacgcggacgaccggtggtcacgccaaattcgtgaccctgctgacgcagccattcgccggactcgtccagcagttcggtggggaatgggccttcgcccacgcgggtgacgtaggccttggagacgccgattacgcgggtgatcttggtggggcccacgccggtgccggtgcaggcgccgccggcggtcgggttggaagaggtgacgaacgggtaggtgccgtgatccacgtcaagcatggtggcctgagcgccttcaaacagtacggtcttgccttcgtcaagcgccttgttgagaatcaggccggtgttggccacgtacggcttgaggcgttcgccgagcttcagcagctcctcggtggtctggtccacgtcgatcggacgacggttgtagagcttgaccagcatctggttcttctggtgcaggctggcctccaccttgtcgtgcagatggtcggcgttgaacaggtcatgcacgcggatgccgacacggttgatcttgtccgcgtaggccgggccgatgccacggccggtggtgccgatcttgtgcttgccaaggaagcgttcggtcaccttgtcgagggtgcggtggtagggcgcgatgatgtgcgcggcctcgctcaccttgaggtgggagcaatcgatgccgcgggattccaggccgtcaatctcctcgaagagcacttccggatccacgaccacgccgttgccgatcaccggggtcaggttcgggttgataataccggagggcagcaggtgcagggcgtacgactcatcgccgaccaccacgctatggcccgcgttgttgccgccgttgaagcgcgcgacgtaatcgaccttggtgccgatcagatcggtagccttacctttaccctcgtcgccccactgagcaccgataagaacaattccaggcataacacacctccgcattcgcacgattccgccggaaacagactaccttacaccctctactcggggcgcggccatctcacgcaatcgggcttctggtgtctttgccgcgcgttgcgcgaggcgggccgacaccaaggcgccgccacggcgaatgacagtttatttgggtgttatctgagtgctttgccggccgagccgagttgcttgcatgcctcagccacgcgggcggacatggattcctcggccttgcggccccaggaacgcggatcgtagaacttcttttcgcccacttcaccgtcgatcttgaggaccttgtcatagttctcgaacacatggtcggcaatcgggcgcgtgaacgagtattgcgtgtcggtgtcgatgttcatcttgatcacgccatggctcacggcttctgcaatctcttccggacgggagcccgaaccgccgtggaacaccaattcgaacggcttgccgttgggaaagtcgactatgccggcggcgctgggcagctcaccctcgaccaccgcgcgcgccacacgggactgaatatcaccgagcagggcgggacgcagcttgaccacgccgggcttgtaggagccgtgcacattaccgaacgtgaaggcggccatgtatcggccacgctcgcccaaaccaaggcgacgggccacttcaaggccatcggccggcgtggaatagagacgttcgtcgattttggcggaatagccgtcttcctcgccgccgaccgcgccgatctcgatctccagcaccgtgtgcgcggcctgcgacttatcgagcagctcctcggcgatgtccagattttccttgagcgacacggtggagccgtcccacatatgcgactggaatgtgggctcctgaccatgcgccacctgatcggcctcatgtgcgagcagcggttgcacccattcgtccagatactgcttggcgcagtgatcggtgtgcagggcgatggtgatgttcgggtacttcgcggcgacctcgtgtgcaaaagcggccaaggccagcgatccggtgacacggtcgttgacgccgatgccggaaaggtatgcggctgcgccgacggacacctggatgatgccgtcggattcggcatccgcgaaccccttcagcgcggcgttcagcgtctgcgagctggtcacgttgatggcagggtaagcgtagccgccgcgtcgtgcggcgtctagcatttcggcataacgttccggtgttgcgattgtcatggcttcattatcgctcggggtgtgcccgccagactaggttctggagccaggcgagctgtgaactatctcacgaggaacaccatgatgataatcatggcgaagccgaccaaatcggtcggggtaaagaccgcgccggcgaataggacaccggtgatagtggcggttacgggttcactggtgccgagcatggtggcgcgcattgcaccgcagcgctgggtgccgccgaggaatagccaataggcaccgaatgtgccgaacaccacggtgaataccatcagaccaatgccgaaccagtccaacgcgggggcggtggtccacgggcgcacgagcggcagcagcattaggccggaaacgatgaacatgacgccgctggccatgaagttgccccatttggccattaatgcgatgggcagaatcgcaagcagtgacgtgcatacggcatcggtcagaccccacagcagaccgggcagcggcagactgagctggctgagatcgccgcctgtagcgatgagcaccgtgcccacaaaagcgagtaccacaccgatgctttcgcgtttgccgggcagccgtttgcccataatacatacgaatacgagtacaaccagcagattgagcgtctgcagcactgtggccgtgccggaattggtccagtcaatggccttcaagtaggagacctgcaccatgagcacgcagaagaacgcgcacagcaggagtctcgggtaggaacggtagtccttaagcgagttgatgaacttgtcaggcgtgaagattcctgcgcaaaccagaaagatgacaccggccaatagctcgcgcacgcaggcgatccacagcggatcggcgtgatagtcgttcatcaggagtttggagacggtggcgttgacgccccagaagacgcctccggcgagcgccagtccggcaccgacgaagatgtcgtgcggagtgcgttcgagggttggcgttggttggccattggttgcagcggtcttgggttcacacatcgcccatcacgatacgcggacgacgtgaattgttctcatatagcggtcatacggcaggaaaataagctctcaaaagagggaaaaccgttgaaatttcaaggaaaatcgatggagcggacgacgggagtcgaacccgcctctaaagcttgggaagctttcattctaccgatgaactacgtccgcatgtgcgcttccacgcacgagaggcaagtgtatcacctatgcggcaccttgcgccatgtgccggtttgagttctgtgctggactagtgaattgcgcgcgtggaatacgtggatgcggccaccggagtgccgttcatttcattggccatttgcatcaggcgcgcgatgcgctgatcagtcggcggatgcgtggagaacagtttggagaaaccgaccgcggagaacggattggcaatcatcatcgcggagacggactgggtgccggccgttttgcgcatgggcgtggtctgggcaccataggagatcttgttgagcgcggaggccagggcctcggggtcgccggtcagcagactgccgtcttcgtcggcgtcgtattcgcgagtacgggagatggccatctgaatcagtgatgcggcaatcggcgcgagaatcacgctgaggagcacgccgatcaagccgagaccgcctgaattatcgcggtcgtcgcgcgagttgccgccgccgaaatacatcagagaataaccgaggtacgtgatgacggtggccatggcagaggcgatggcggaggtcagaatgtcgcggttgtacacgtgcatcagttcatgacccagcacgccgcgcaactcgcgggcgttcagaatctgcaggatgccctgcgtgcagcatacggcagcgtgacgttcgttgcggccggtggcgaaggcgttcggactcatggtgggcgcgatgtagatgcgaggcatcggcttgccggccttggcactcagctcgcgcacgatctggtagatttcgggggcttcctgctcgctgacctccctggctcccatggatgcgatggcgagtttgtcggagaaccagtatgagccgaacgtggtggccaacccgataatgacgtagatgcccagcgtctgctgcctgccgcccgtggcccaccatatcagcatgatgatggcccacatcaaggcgaacagcagcgtagtcttcaggccgttgaaatggccgtgcacccgtactttggcatccatgaggctcacactaaaatcactgcctgaatattggctggatgtgcgccgaggggtgaatcggatgggggttggcggtgcttacggtgcggttgacggggatcggaatagcctgtttacatgagattgacgatgcttgacagtgcggttgcttggcctgttttaccgctttaccgctttaccgattggtctgatcgggacgctttgcttgtttggcctgctttggctgcttggatcgtttggcccatcggcctgctcgactggcatgacactggcttttatataaataagaacgctggcgtataaccggcgttcttatttatcgatgtatcaatcgcgccgattgctgctggtgcagttgccggtgcgatgagctgatagtcaatcaggccagagcgagctcacgcatctggtcgggctcgatgaccttcttgtgctcgcggccctccttggcgccttcggcgcgctcgaaggcgtcgaccttcttccagccagcgaagtcaatcggcttgacgccgcggctttccagcagtcggtcgatggattcggggtcgcgatcctcggccacgcgaccaccttcggcggccttggccagatcctcaagcatgttggtcacgatggcaagtgcgtcggacttggtggagccgatcaggcccaccgggccgcgcttggcccagccagtggcgtacagacggtcgcgcacttcgccgccgtccgcttcggtggtgatgcggccatcgccattggcgttggccaggtgagcgccgtgctcgtcgtaggtgatgccgggagcctcggccggcttgtagccgatggcgtggtagacggcctcaaccgggtagtcggtgaactcgccggtgcggctcatcttgccgtcggcactggtttcggtgcgttccacgcggatggccttgaccttgccgtcctcgccgaggatttccgtgggtgcggagttgaagtgcacgtaatacttgcggtcggccggattgccttcgaagtcgacgtcgccgtcatcttccatgtcttcggccatctcgcggatggcgaacagttcctcgaccatctggcgggtgagcttgtccttgccggccacctcgatggtctcgtcgtccaaatcgaagtcgtcctcattgatgatgagctgcacgccgggcagcttctccatctcgcgcagttcctgcacgctgaacttggcctgggccacgccacggcggatgaacaggtgcagcaccttggccttgttgcggccgatgccctcgtacacgttgtcgggaatgtcggtcttggccttgaggtcgtcggcgttgcgcatgagctcgcgggccacatccatggccacgttgccgccgccgatcacggcgacgttctcggccgtaagcggccattcgcgggcaccggtggggtagccgtcataccattcgacgaacttggcggcgccgtacacgccttcaaggtcggcgccgggcaggttcagcggcttgtccttgaccgcgccggtggcgaacagcacggcgtcgtagcgggcgagcaggtcgtcaagagtcacgtccttgccgaattccacgtcgcaatagaggtggatgttcgggttgtcgagcgtcttctcaagcgcggaggcgatgaacttgatggacgggtggtccggggccacaccgtaacgcaccagaccgaacggtaccggcagcttctcgaacaggtcgatgcgggccttggtgccgaggccgagttcttcgcccagtttcttgagctggcgcaggaagatatcggatgagtagacgccggccggaccagcgccgattacagcaatgcggagttcagtattcacagattcagtcacgcgctctagcctaacgcaaagccttccgttgcaacagagggcgagtggtgggaattctgtgtattaggccatagtttgtgcgtttgggaaacctacgagcactgctaatgtcagattatgggtttccctattggtcaagttattgccgttctcattccaagaagcatgcgaggcggatcaggcccttacttcggatacgtttatgctgcaaggcggttatccacgcatttatgacacgagaatgccgctcaatctgttcttctcgaactacatcgacacttatatcgaacgtgatgtttccgaatatcttgatgtacgcaatttggctgaattccgccgattcttgactctttgcgcactcagttccggagcactcataaactacaccaacatcgccaatgaacttgatgtaagtccgcgaaccgtaaaggcatggatgtcgattctggaatcaagttacatcgcattccatctcatgccgttctacacgaacgcacgcaaacaggtggtcaaaacgccgaaactctatttttatgacactggcgtgctgtgtcatctcttgggcattcggacggtcgaagcactggttgcgcatcccaagttcggcgatatatttgaaaacctcatcattgcggaaaccatgaaacagcatttgaacgccaatcaggagccacaattattcttctaccgcgatgccagcaaggtcgaggtggatttgttggatttcaccgatcctaacaaccgtatgctcatagaaatcaaatccggacaaacctatcatgaccggttcgcccgccatctcactttaattggcaatgttctcggtataccgtgtgagcaacagtacgtaaccagtcgggttgagcatagttatgtctcacaaggaatccgcgtcacctccgcccctcgattggctagaaggccgacggtaaagagccgccgcagagcagtaggaattctgtgcaatcagtgaatcccttgaggcattaaagacgtcacctccaacggctctttacgacctcgattgcattcattaggtcatttcttcgttcattaggtcggagagtgctgaagccatcccttggaacggcggggtttcaagggccgctccgaccaaggaccgacctaataaacgtcaaatcgacctaatgaataactccgatgctattgctgctttcgtgggtgggatttccgtttccgccacgtcaccaaccgtatcgccccgattatgtttcgatgcggtggactcgacatacgaccatcccggtcagtcaactgacctacaaaaacagcagaagcctcatattcttaatcagtcccgatcaattagggcagtgagggcccagaggatgctcaccacgtcgatggcctcctggaggaaggcaccgacgacgaccgggataaggttgaacgcggcggcaatcatgccgatggtggcaagcacaaggcccgcgattacggcttgaagcatcacgcgcttggtgcgacgtgcaatggcgatggcgcgcggcacggcggcgatattgtcattcataatgaccacctgagcgctttcggaagcggcggtggacgtgccatcggtcatggccacgccgatatcggcaacagcgagcaccggggcatcattcacaccgtcaccaaccatcatcgtgacggttttgccggctcctgtagcggccctgactgcggctaccttatcctccgggaacagttcggcgtgaacctcgtcaatgccgacttcgctggcaatgatattggcggaagcccgcttgtcaccggtaagcatggcgagctcggtgacgcccaactcatgcagtttggcgagcactgccttggcgttggcgcgcggcacgtcgcgcagcacgatgcgcgcgatcagccggccgtcaacggacacatacgacgccatctcatccggctgcagcaggccaaagcgagtgcgcaggtcatctttttgctgagctccccctcttagggggagctggccgcttcgcgggctgaggggggcagcctcgccgaccgccaggaatccatcctccccggcggccgcgaaagacagccggccaacgcgcaccgcgtggccgttcacctcgccggaaacgcctttgccggcgtcttcattgatgttcttgacgaccggatactcccgtccatggccgggccagctggcctccggctcggggcataggcgctgaccatcctcgaaccgctggcgcagtcgggccatcgcctccacgccagccttggcaatgcctttggacaggatgtgcaccgagtagctttccaccacgccggccatcatcagcacatggtcttcgttgagacgggttgcggcgccgggcagcatctcgacgcgcacgacctgcggctgcttgacggtgagcgtaccggttttgtcgaagaacacctgcgtgacgcggccgagattttccagcacgtcctgcgctttgataagcacgccggctgcggcgaggcgtccggttccggcgatgtacgccaccggtgcggcgatgagcagcgggcagggcgtggccagcaccagcacctgggcgaatcgcgtcggcaccccggacatcgcccatgcgatgccggcaatcatcagcgagagcacggtaaagggcacagccaagcggtcggcggtttttaccacggccgggcgcgactcctgcgcggaggccacgagctcgaggatgcgctggtactgcgaatcggcggccacctgggtggcacgcatggtcaatgcagtcgagccgttcaccgcgccggacatcacgcgggcgccggagaacacttcacgcggcaccggctcaccgttgatattgctcaggtcgagcgtggccgtgccggacagcagctcaccgtcaaccggcacagtttcgcccggcagcaccatgagtacatcgcccagctgcacctgctcgaccggcaccgtgtcgaagcggtgcgcggcggccgcagccgacgccaagcccacacgccggaagccatcggacgaatcgcccttatcggtagcaaacccacaccccacaccaggcaggttgacgacgtgtgcggtctgcggcgcggcttccataagcgcggtcagactgcgctcggccttggcttgggcgtattcctcaatggcctcgccggacgtaatcatcagcgtcaccgcccaacttgcccagtattcggcgacggccacggtggagaggatcgcgaccacggccagcacatcgactccaacctgcccgtggcgcaaatcgtcaatcatgccgcgcacagtgtcaatcacgataatcagcaccaatgcgataaccagccactggccgaagcccggattgccaagtaccggaatcgccatcgcattgccccacggacgccaatcgcccagtaaagccagcggaattgcggcgatgacgacgaccggaagcatcggcacaagcttgcagatgtcgagaattttggtgaagaatctgatgagtgcgcccatcattgctccttacgctcgtatacggagtcgattgcggtacggcaagcgtggcccgcgcaatcggcgctgcggtcacgccttgttaacccaccggcggctttgcctggggcttcgctttgctcggctcccgcgcgaccttccgatacacggcgtaaagaaatgttcagttttgtattgaattatgcgctttgttcggagcaccgcccgaactcagtgcttgacctaccctatcaacgagcgttgcgcgacatgccggatatcgaaactacgttggcggcatgggcgcagggcacaatagcgcatacgaaaggcccgtggcaggagtttgctcactgccacgggcctttgcttgtctgacacggtgttcagcggttaccgctcaacaccgtgtgacgttgtcgagtcggctttaccacaggccgaatgggtcggagaagccgccgccgtcaccggtgccgccatcgctgttgccattgccgttaccgttaccgttaccgtaaccattccggccgttgccgttctggttgttctgcttattctggctgttaccgttggaatcggagctggacgaaccgttcaccgacgactcctcctgatcgagcgtcacgtccacatccatggtcttgccgtcgcgcacgatggtcagcgtcaccttgtctcccaaagccgcggcacgaacgtaaccaagcagcgagtagttgttgttcaccgcgttgccgttgaaggccacgatggtgtcgccctccttgaggccggccttgtcggccgggccgccggagacgaccgcgctgccggtggcgctggacttggtgatggtcgcgccgccgcgagtcacgccgtcggcttcaaccgtgtcggacttgatgaccacgccgagggcaacgtgcttgaccttgccgtccttgatgatttcgtcggccacacgcttgacgaggttggacgggatggcgaagccgatgccgatcgaacccgcggagtcggatgaggtggcggtcgaggcgatggacgagttgatgccgatcacctggccggccgcgttgaaggtcgggccgccggagttgccggggttgatggccgcgtcgatctggacggcgttggtgacgatctcgttgttgttgtcgtcggtcacggtcaccgggcggttcagggcggagacgatgccggtggtggcggtgtcgtcgtagccgagcgggttgccgatggccatcacgttctcgccgacggcgagcttgtcggaatcggcgaatttcacggccttgaggtcgctcggcgggttgtcgagcttgatgaccgcaagatcggtggtggtgtcggtgccgacgagcgtggcggaatacatgttgccgttggcaagcgtcacctgaatctgctgggcaccggagatcacgtggttgttggtgatgatgtggccttcggtgtcgatgatggcgccggagcccttggcggtgccgttgctcaacgcggtctggatggagaccacggagccggagacatcgctggcgacggtctgccagtcgggggcttcgccgctcttggcggtggcggacccggagccggacttattcgagctgacgttggacagcgaattgctggtcggcaaggtgatcaggccgctggtgagggcgccgtagccgaggcccaggcacagggccgcggacacgacggcggcgaccacggcgatgaggatgttgctcgccgtcttggacatgccctgcttggcggggccgggctgaccgggctgtcccggctgggtcggaccttgaccgttcggcgtaccggtaccgggagtgccgaaaccgaacagaccgccctgctggggctgctggccattccggccattctgaccggactggctggcaaacgggttgccgttgttctgctgcggctgcgtgggcggattgaacggattgccgttgccctgcggctgcgggttattggtgtagtagggattgcggttgccctgctggccctgtggggtttgctgcgcaggctgaccgaacgggaattgctgcgtgggctgggcattgctgccggcctggccgccctgctggccctgtgcctgagtcggggtcggaccataagcgccatattccggggccggacgatacagcggagttgtggccgaggtctggcctgcggccggtgctgccggagaagccggcgaggaggagaccaccgtgctctcgcccttggcggaggcgtagtccgggatgggctcggtggcggcagtgtcggtagcggcttgcgtaggctgctgatcggcagcgagggcggccgaggaaaccggggcttgctgctcgctggaatcgctggcgttgccggcatcaaccgagtcgccacccacaaacgggttcttcggctcggcgttgccggtatcggcagtactattggggttttcgttattccgcggggtctggtcgacgccctgcgggttaaattcgtcagccattgctgctccttttcctaaattcctatcacgtctgttcggcggctattcgggcacttgcccattgccacttctcgtgtgctacctcagtagtaaaggcagtcaatctggaggttttctgaacgttgattgaaagtctatgcgtaatcatcgcagagtcttatgggcatctcggcttcgaggggctgatttcctgtttcgggaacatctacttgcacttcaaggggctgttcgcgcggtcaattccgagtatcaagggccctcatttaacgccattccgccatttttgcagccggcctacttgaccgggagccccttgaagcggaagtagacgttcgggagcggcgaaatccgcccctcgaaaccgagttcttcacaatttccggcccttttctggcccttctgcctaaagtgaacatatgacgatcagccttcttgaacatccgttgggcgcacagcccggacagcccggcgaccgcagcgccttccatttcgaaacgatcacccgcctgccatccacggccagcgggcttgggcgagacggtgcccgatacggccgcaccggcatcattcacacgccccacggcgatattcgcacgcctgccttcgtgccggtgggcacgcaagccgcgatgaaggccgtgctgcccgagcagatgaaggatctaggcgcacagtgcctgctggccaacgccttccacctgttcgagcgcccgggcgaggacgtgctggacgcggccggcggcttggcgcgtttcatgaactgggatgggcccacgttcaccgattctggcggtttccaagtgatgtcgctgggcgtcggcttcaagaagacgctggcaatggacgtgaccggcatgaagtcggacgacatcatcgccaagggcaaggagcgcatggcctgggtggatgaggccggcgtgacgttcaagtcgcctttgaatggtgacgcacatcgtttctccgctgagatttcgatgggcatccagcacaaaatcggcgcagacatcatgttcgcgttcgacgaactcaccacgctgatgaacacccgctcctaccaggaggactcggtggagcgcaccttccgctgggcccgccgatgcgtggacgagcaccagcggctgacggctgagcggctgggcaagccctatcaggcgctgtatggcgtggtgcagggcgcgaattacgaggatctacgccggcgcgcggcctcgcagatcgcctcgctggacttcgacggcgtgggaatcggcggcgcaatcgagaagcgcatcattggagacacctgcgcgtggatctgcgacgcgatgccggagaaccgcccgcgccatgtgctgggcatcgcctccgtggacgatatcttcgcgtgcgtggagaacggcggcgacaccttcgactgcgtggcccccgcgcgctgcgcccgcaacggcgcgatctacacgcgcgccggccggtacaacatcaagcgcgcccagcataagttcgatttcgggccgctggaggagggatgcgactgctacacatgccagcattattcgcgcgcgtacgtcgaccacctgctgcgcgcccgcgagttcaacgggtttacgttggccacgatccataacgagcatttcttcgtgaagctgctagacgacatccgcgcctcgatcgacggcggatactttgatgagttccgcgacgaagcgctggcccacttctacggcaacggcgagcgccggccagggttgtgagtttttctccttcgttgcggcttgtgctgaacttctctctgctcccctcgctgaggctgagacgttaagcaaacagcccagtgggctgtttgtagtcgaaggtgagacgatagtcgaaccagcaggttgcaggcaaggcccgtccttaattgcggacgagctgtcacgaagtgactgaggggagtgccgccaccctcaaagatcacggcgcccgcaggagacccacaagcgatatatccctgcctcccatgcgacacgccgaagattgcatgattacccagccgggtgtaagttagtcgattgtctgcgagtgtggcggaatggtagacgcgctgtcttcaggtggcagtgagtgtatgctcgtgggggttcaactccccccactcgcaccagcaactaaagggctggaatcggaaggttccagcccttttgctttgtccgggcacgcgccgtttttcaggggggcttaggacttgagacttatggcccaactttcgtggcggaaaatgtcccggtacctgcatcaatcgtttgacgttcaagccaggccagaatccgctgtcccggttcgcgatttcgggcgatctttgcaaaccgggacaatttttgttgccccggtataaatgtcaatcgatttatgcgaaaaccgggacaacgtgccaattccagaatcggccttattccgccgattccgtctgccagacgatatgagttgaggaaaccggagtgtcccggttcacgaaaacaagccgaaatcgccgaccgggacagcggattctgccccggtcgacaggtcaaacgattgacatatgaaccgggacaaatacagatcagagagaagcccatgaagcagatttaactttcctcaactttccatccgccataaactagcattacataacatcatgaaccgagacgaaaccaacgaagtatctggagtcaccgacgaccagctcggccgaacggccgagccgtacgaatccggcaactggcggggcggcgtcgggagcatcattcgcagcaatccgaaatcaggaaccgacacaagtcggacccagcagacacgcataatacgagttcacagactcggcgatgtattccgcaaccgcaccaccgaataccgcaccacggaagaactgtaagcattacgaaatcaaccttgattattgcgcgggcctatactaggttacggtagcgtaggttagtggtcggaagagcgtcgccggccatagcgaggtgatcagtatgagcgtttccatcagcacgccatctggacgaaccatggcttccgccgcaacagttgcgccttccgcaaccgcgagtcaaaaatccagcgcaaacgccaaccccaccgcactggaccgtgcatcggcccgatacagggccgcgcaatcgcgctaccgccaagccaaggccgcactgaaggcgatcaagcgccagatcgtccccgtggatgcattcggcaatcgcaagccgcgactgcgcggatggcttcacctcgccaccctgccgctgtgcatcgcagcgtccatcgtactcatctgcatcgcgccggccggctcggtcaaagcggcctgcgcggtgtacggcgcctcggccatgctgctgttcggcaacagcgcgctgctgcacgtcgtgccatggcgcagcgcgaaggtgactcgcgtgctgtgcggcatcgattattcgaacatcttcctcatcatcgccggcaccaacacacccgtgctgttcgcgctcagcccggcgattcgccggccatatctcacggtaatctggacgaccgcggcgattggcacgatactgcatatcgtctggctgcggacgccgaactgggtgttcaccaccgtatacgtcgtgttgggactggccccggtaacgcttattccgcagctctggacggctcccgcagtaggcccggcgccgaccgtgctcatcgcgtgcggaggcgccgcgtacatcgccggcgctgtatgcttcgcgctgcgcaagccgaaccccgtccccggctggttcgagtttcacgaggtgtttcacttgggcacggtcatcgggtatgcctgccacgtcgtggcgatttatctgattgtctgtgcgctgtaggttcgctcgcccagcaccgaggcgggccttcatacgttacgagataggtccttgatcagccagccgtgacggccgccttcatagacttcatcggtgagtcgatagccgcactgctcatagaacttgtagtggtcgttttccgagtgcacggcggtcatggttccgccggcttgcgcgatgcggcgttcggcgtcagccagcagccgcgagccgatatgccggccttgtgcctcgggcagtaccgccaggcgcgcgatgatgtatcgcccgggctggtcgggatgatcggggtccgcgtagaaccgacaggtcgctacggggtgattctggctgggctgaatgggctggctgcgtgaggccaattgcgcggacgagccagggcgattgggcgcatcattatccgaatcgaacaccagcagatgcacggacgcggcatcccattcatcgaactccggccgccagtcgcgttcgcggatgaacacctgctcgcgtatggcgcgggcggcggcgggcagccggtcgtatgcttcgattcgtatggtcatgagcgtcagtgtaatgcgtcacgataaccgacaaagcccggctcggtggacgagctcgggcccaagctcggcaggctcaggccgtacgcgcgatctgcacggcggtgccggacgcggtgaccatcagcatgccgttgtcggcgccgagcacctcgtagtcgatgtccacgccgaccacggcgtgcgcacccatcgcctccgcacgctgctgcatctcggcgatggcctcgttgcgggcacgcatcagctcttcctcatagccctggctgcggccgccgaacatgttacgcaggcccgcgccaagatccttgaacatgttcacaccggataccacttcgccgaagacgatgccctggtagttggtgatggtgtatccgtcgacggacggggtggtggtgacgagaatcatggcgaggctcctttggcttgtctgcgtagataaatcactgccgagagtcggaccgttcccgaatctcacctcggaaacggatcgcttctcttggctaccacaatagtcggcagcgtccacaccgacattttcgacccgtccgatcgcataatcaaaagcatcaggatcgatatgcaaaaccaccgaggatcgtggatcgcttgtggatcttgaagcgttgtatcctggttgttcatggagcgggaacgcaaaatcattaacgtcgtgggagctgcaatcgtcaccaacggcaccgtactatgcgcccagcgtggcccgggaaagtcgttggccggatactgggagttccccggcggcaaaattgagccttatgaaacagcgcggcaagccttgcaccgcgaaatcgaagaagagctgttatgcgaagttgaggtcgcggaagaggtatgtaccagcgaatacgcctacgactttggaaccgtgcggctcaccacattcatctgtcacctcatcgccggtacgccgcatctcaccgagcacaccgatatccgatggctgaatcctgctgatatgccgacattgaactgggctccggtagatcgcgaagcagtcgcgattatcgcgaacaaacaactgacgctccgatgaacgcgccacagcgcagtcaggcagtcatcaaacgatccgaatcgcaagggaacagggcaacatgtctataaatctggtcagcacctcagactctccagccaacacgcaacatcacgattctgatccaaccccctcgatcctcgaagatgtcatctcaggtctgatcgagccgcgctcagatgctcccagcgaatataagccgaccctcatcgcaaatcgccccggtggattgaccatgcacgaggaaatcggcaattccttggctactagcgattccttcgacatttctgtcgcattcgtctcggctgaggccgtgctcagcttatttgaagacttcagaagtcaccatgaaacagcgacccgagcgggcacactgattacctcaacgaaaaatcatttcaacgatcccagggcattctgggagctgctgcatcttcagaacaccactggtgttgacgttcgcgtgtgggaaggttcccgtaatacctcagtttccgcaatggctcaaggacaaccattccatcccaagggatatatcttttctcgccgcatgaaagacggcacaccctattacgacctgtacgttggcagttccaatctcactggagccgcattgaccacgcaacgcgaatggaatctcaaagtctcatcgcgggcggatggagagctggtcgggcagttccaggatgaaatcgactcacaggtggctgattccgttccgctgaccgaagagtggatcaaacagtatgaggaagatttcaagaaatacgccccaccgcgtcatgagattctgcagtcgcttgaggggcatgacattcagccaaacgccatgcaacaggaggcgttggcgaatctcaagaagattcgtgaacaaggcgagcaccgcgcaattatcgtgtcggccaccggcaccggaaagacgtacctttccgcattcgacgtacgcgaatgccagccgaagcgcatgctgtacatcgcccagcagcagatgattcttcaaactgcaatgaagtcttaccaaaaggtgctcggctgcgatgaatccgaattgggattgtattcaggcaccagcaagcaacaggaccgccgctacgtattcgccacggtacagacgatgcggcagccggaggttttggcgcaattcaaatccgatgaattcgactacgttctggttgacgaagttcatcacgctggagccgaaggatatcagcgcgtcatcaatcatttcaaagatgccgacttcatgctcggcatgaccgccacgccagagcgcaccgacggcatcaacatcttcgagctattcgggcataacatcgcgtacgaaattcgcttgcaaaaggcgttggacgagaacatgctctgtccattccactactacggtgttgcggaataccttggctccaacgacgatccgaatggaatcgcccatcgtctcgatgtctccaagggccttgatgcgaaggactcgaaacagctcaagtacgagatcgagcagcttgccaccgaaaagcgagtccgctacatcattgacaagttgcaggaatatgggcagttcaacattccggtcaccggactcgtgttctgcagtcgacaggaggaagcccataagctatcccagctgtttaaccaacagtggaatcaacaagccgaacgcccctatcgcaccgctgccgttaccagcacggacgatgacggcaggcccgtgtcccaaacgcagcgagacgaatacgtccgcaagctcattgaaggcgaactcgactatctcttcactgtcgatatgttcaatgagggagttgatattcccgccgtcaaccaaatcgtcatgttgcgcagcaccgaatccagcattatcttcacgcagcagctcgggcgcggactgcgcaaattcccgcacaaagaaagcgttgtggttatcgatttcattggcaattacaacaacaactatctgattccggtggcgttatacggcaacaccggcgaccgcgacagagctcgcaagaacctgcagagaaagtcaatcggcctgtcgtccatcagtttcgacccgatcgccaaggagcgcatccttaagtctttggacaccgccgactggtccgacatgaaaaagctgtccgaacagtatcgccaagtccgttacgagctgggccgcatccccatgcttacggacatctataactacgacccctcactgccgtataccatcgcatcgaagcgcagcaactatcttgatttcgtgcgttcccgtgaaaaaagcctgggcaaaggcaaacatcatgaagcgacatttgaggatcagttggagccggtgaccgacgttgaagacgcgatactcaagatggcagcggagctgctgctgcccggattgcgaccgcacgaattggtcattcttgctcagctatgccatttcgtcagcgaacggctcgacgacgacgtaccgcagcattggagtgcgggctcgccaatcggccgcagcgaattgctcgatgcgattcgtactgaattcccgcagtccgatagttcagacacgcaattcgactctgcgatcagcgtgctcgattactcatatttcaccggcccaaactgcaatcgtttcggcaatcagccattagtcgaagccgtgaacagcaccggcacagaaaacggtaccgcatatcggttgaacagcagattcgccgatatgcttgccacgaacagaacgttccgtatcttctttgcggacactctgcgcaccggtatggccaattgccgagatatattccgtgaggccgccgacaggcaacaggtctttgatcacatgttcttgtacgaacgcaaatattccatggcagacgtcatgcgactgtgcggatggaagaaggagaatactccgcaaaacgtgggtggttacctcctcgacaaggaaaccaataccatgcccatcttcgtgaaatacgcggcaagtcaatacgaagatgaattcctgagcacacaggaaatgaaatacttcagcaagaatggacgaactccgcagtctcccgaattccaatgggcgcttaacggcattggcccgaattggggccagacgcatttcgtcccgttattcgttatgcgcaaggcggaagaggccgagggtaagtactactacgttggccacgttgctgcgtttgacaaccctcagctcaccaccaaacctgacgcaagcggacaaggcagcgtgaaggtcacgctgtcgatcctgcggttggcccggccaatcgatccggagctctatcggcatttggtcagctgatgcctctcaactccgcaagcgtacggcggcggccattccgccgtcgccgtaggtggggtggagcatgaaggcttggctggcggcgatgtcaccgcgcatcaacgattcccacatggttaagcggctcatggagatggcttcaacgccgaggatggcgtcggcgatgtgcgcggcgtagagatcgcggtgcttggcgatcaggaagcgcatgagatcgaggcgcttggtcatgctggtcacgtttgaggaggccggggccgtgcggtactcgatcagcggctcgggggcgatgccgatatgggccgcgtcttttgcgggattctctgtatcccaggcactcccaaaacctccgacatgctcagtaccgccagtaaccccagcaccgcagatatcgttttccaccgtcaatccgcactccaacaacgacaggaagaagtcccagtcctcgaagccgccgcgcatcgactcgtcgtagccgccgcagcactcccacgcgacacggcgaatcatgcacgtggccgggcagcaattatgcgacacgaacgcggcggcattgccaccagtcggctggaccactgattccaggacaccgaaagtctgcagccagccggatgcagcgaccatcgttttgtcggcggacaacatcgacaacgtgcgctcaatgaaggccggccgcaaacggtcatcgccatccaacaccactacgaacggcgtttcggcggcggcgatgccacggttgcgcgcggcggaaggaccggcgtttgcctggccgatgaggtcgatggccacaccattcgcatccatcgccccgtgccggcaatcgtcgagagtggcgttcagcatctcgacggatgcgtggtcatcggacccatcgttcacgatgatgatccgttccggacgaaccgtctggggccaatgacgactcgactgcctcgtgaatcaacgggccctgattgtagctggtaattaccactgtcactgctgccatggcggcaagtctatcgggtccggacgtgggccatccaccggcgctgcgcgctgcctcccgccagtggggaggtggcgcgctatccccggctaacgctgatgcatgtgtgcgggcacgggtttggtgcggactttggtggtgaagtagtcggactcaatcttccacaccgtgacgctgcggacctgcgcatcagtgaattccacattcggcatatgcgcctgctgcgccatcagcgtctgcaagccgtggcggcattcatccagatcctcgaccagtgacgccgtgccattgccgacgatcgacttgaacgcctcaccccaattgcacgtggtgcggcccgccaccacctcgcagtcggtctgcatggtgaaagccacgggcagtcggccaccggcggcggcgcgaatcgcgtcgagcttgcggccgcgcggcgcggagtggaaccagagcgtcagcttgccagtcgcctcgtcgtaatcaaagccgaaattcagcggcacgatagtcaggccctcggcatccgcataggccacttcaacgatgtcgcaggcggcgatgatcgcggcgatccgctcgggatcggtcacctcgcggtccgcacggcgcatcatgcgatgctcgccggcgaccgtgtgctcatcctcacgcttggcgggcttgcgagcgcccgcgatattctccatgctcatgcctgatcatccccatccacaaccgcaatccagtcgccgtagccttcctcggccatgcgcgagcgcggcacgaagcgcagggcggcggaattcatgcagtagcgcaggccgccgcggtcggccgggccgtcggtgaacacgtggcccaagtgaatctgtgtgtccgacgtgcgcacttcgatgcggtcgcggcccggaatgcggtggtcctcatgctcggtcagcaagtcaccggcaatcgggcgggagaacgcgggccagccgcagccggaatcgaacttgtcttgcgacgagaacagcggttcgccactgacgatgtccacgtagatgccgggctcaaactcctcgtcatactcgttgacgaacgggcgctcggtagcggcgttctgcgtgaccgcgaactgctcaagcgtcagatcccagatgcgttccacgtacttttgacggcgttttacgttcgcgattgcggcgaccggcacgtggcaataccccgacgggttgttcctcagatagtcctgatgatgcgcctcggcgggatagaagttgcgcagcggttcgaccagtacggccgggcgctgcggctggcggtcgaccagctgctccagagccgccacatacacggcgcgctgcgtctcgtccgtgtagaacatgccggtgcggtactgccggccgcggtcctcgccctgctggtccacggagaacgggtcaatgacctccagaaacagtaatgtcagcgtccgcaggctgacctgtgccgggtcaaactcgactttcacggtttcggccgcatcggtgccgcccgcgcatacctgctcgtaggtcggcgattcgacggtggattgcgcgtagccgaccgtggtgtccgtgacgccgtcgacgttctggaagtagcgctccagcccccagaagcagccgccggcgaagtatgcgacctgcgcggtgccgtcgccgcgctcgttgttccgttcgttcatgcgtcccacgttactacgccatgacggcgcgcgccgttcacgaccgcagcgtgctgagcatgccggccacttcggcgggcgtcacgctgggcacgtaggcgcgcaccaccgcgagtccgatctgcggcaacgccgccgggtccgggtagcacacgtagaccggcgcttcggtgggctggaacttgcgcttgaagttgaacagcgagtggaagccgtaggcgggttccatccagtcggcc

SEQ ID NO: 2435 - DNA, 7199 bp, Unknown
  R50_10m  MAG No. k141_13000
caccagcaccacgacagcgatgacgcacaccgcgatgccgaggatcttggagacgtaatccatctccttttgcagcggggttttctcatcttcggtggcggagagcatgtcggcgatcttgccgacctgcgtgttcataccggtgccggtcacgattgcgcggccggtgccttgcgtcacggaagtgccgttgaagatcatgttggcacggtcgcccagcgccttggcttcggtgagtgtgtccggcttcttaccgaccggcacggattcgccggtcagggaggcctcggcgatgcgcaggctggccgcgttgaccagtcggccatcggcggagactgagtcgccttccgcaaggacgatgatgtcgccggggaccacgtcggcggtgttgatgcgcatgactttgccgccgcgcagcaccgaggtctgcggggccgtcatttgggcgagcgcctcgaccgcggcctccgccttggcctcctgcatgtagccgagcacggcattgacgatcagaatcaaaatgatcacgatggcgtcgaacggcagcacttcaccgccttccgcgccgggctgcgcattggccttttcgatgaaccatgcgatcaccgagatgatggtggccgcgatcagcaggtagaccagcgggtcctggaactgggccaggaatttcttccatttcggtacgggcggggcggtggcgagctcattcgggccgaatttggccagtcgacgcttggcttcttcctcgctcaggccctgggatgggtcgacattcagggctttggccacgtcgtcggcactggtcagacttggatcagcttcccccaatagcgcttcctgcgcgcgcacttcttccgattccacgacctcgttcgttgcggtcgcggacactgcggattgatctttgagatcatccataatgttctccttggtattgccgcggagtagtcagccttgcggccgctgccgggttttctctcccggctggacgcacaggactgcgcggttatggacaccggcgcaactgctgccgatgcatacgattgctattattccataactgcgtggcgcacttggcgcacagcgtaatagcgttttgcctagaacaggcgacgcaaccaggcttcagccaaatcaggccaacactgcacgcattcgacgatgtgcgcatagaagccgttgccagcggtttccgcattggccagggacaggccgtggctgccttcggggaacaggtgtgcttcgatgctcacgccggcggcccggcaggcctggatgagcattagcgtattctccacgggctcggcttcgcggtcggaggtcatggcgtagccgccaccaggcaaaatcaggatggccgggcgtatgcggtccggttccatctcctcgctgttgtcggccacatagccaaagaatcgcgcctcgttatataacttaagaatcgtgagaatcaaagcaattcataacctaggaatagtgagttttacggcattatataacttaggaatcgtgatataatagctcataaatccttgaaaatactaggaatatgagcttaacatgtataagagaaaagtatacgaccatctacggcgatggaaagcagcgagcaagggtactactgcgttaatgattgaaggagcccgccgcgtcggcaaaagcaccgtcgccgaggaattcgcgaagaacgaataccgctcatacatccttatcgactggcagaaggctccgcaggcggtacgagactcgttccgcaacaatctggatcatttggacacgctgttcatggacctttccgtctattacggcgtacgcctgcatgagcgtgacaccctctttattttcgacgaagtacagctcttcccctttgcccgcagcgcggttaaacaactcgttgcggatggtcgatatgacttcatggagactggctccctgatctccattaagaagaatgtcgaaaacatcttgattccctccgaggaagaatcggtgagcatgtttcccatggattttgaggaatttctatgggccagaggagaagaactactcgccgatgcgatacggcaatcttttgcggacaggcgagcaatgtctccgctgctggacaacaaggcggaacgcctgttccgtgaatacatgctggtgggaggtatgccgcaggccgtagagcgttatctgggaacatccgatatgggcaatgtcgatcgagtgaaacgccaaattttgcacctgtacgctcaggacatagagaaatacggcggagattcgaaagaacgggtcaaacgtatcttcgatgaaattccagggcaactttccaagcatgaaaagaagttcacactgtcgtctttaggcgaaaacgcacgcgaacgtgaatatggcgatgctttcttctggttggatgaatcgttcctgatcaaccgctgcatgaatgccacggatccgcatgtgggcctgcgcctacaccaagaggactccacgatgaaatgctatatgggagacaccggcttgttagtaacgcaagtgtttgccgaccgcgcatacacgtcgaatgagttgtaccgcgatatcctgttcggcaagctggaagtgaatgaaggcatgctggtggagaatgtcgttgcgcagcagctccgggcctcaggccatcgcctgttcttctattcccgatattcccgtcaggcgaaggaccgcatggaaattgattttctccttatcggggagtattcaaatgccgccatgaaggccagggtctgccccgtggaggtcaaatcgacaaagagatacaaaacctcatcgctcgataagttcaagaataaattcgacagccgggtcggcatgcaatatgtgctgcatcctagaccaatgcgcgttgaaggagaccgcctatatctgccgttgtatatggcgcattgcttgtgatgattctagaacgtatcgcagagaatgattctcaataagaaaaacgtgaggattacgatgcctcaatcgcacatgcagagcgtcatatcagtgagatcccgccgttgcggaccatgtttgattgtgcggaaaagttcggatgcctcacacttttcttgacgggaattatttactgtgaggcattgcgcaggttggcggccatggcgcggtcgcgcaagcctttggtgagcttgagaccgagggttacggcgatcaggactatcgtgcaggcgatccacagcgttcgaccgccgaagttgctgatggtccagccaccaatcagcggcgccagcgcaatcgataccgaccacactacgttgtagacgccctggtacgtgccgcgtgccgacgcgggtgccatggcggcaaccgtagtggtggcgatagggaatgtgcccagctcacccagcgtccacagcactacggcaagcgcgaatccgccccaggaatgggccgcggcctgcaccgcatagccgatgacggttacggcgaggcccatcaccagcacgcgtgaattgcccatgcgcgagaacagtttcatcgcgggaatctgcagcaggcacaacataccgccattgatggtgagcagcaccgaatactcgcccagccctagaccaaggtccgtcatggcaatgggcaggccggaggtgctttggaagtacacaaggaagtagccgaacatcagcagggagaagccgaggaatggcgtatcagtgagcacgcgccgccaattgcgagacatggagcccttggcactggcagccggtgcggcatccgagtgattcggcccctcgacgccggcgaattccgcatgcgtaacactgcgttcgtcttcatggcgcaccgcacttggcaccgatacagtaatccccaaatgccgcacctcgcggaagaacgcaatcagcaatatcgtgacggctatcatcaccgccgcttcaacgtagaacatcagcgaatacgagatcttgaccagctggttggccacaatcggcccaatcgcgtacccaaaattaatcgcccacgattgcagtacgtacgcacgttgctgacgttcggcgggcaccacatccgcgatatacgcggcgatgaccgggctgggcagtgaggcgaacgcaccatagacaaacagggccgcgcctaaagccacggggtcagtgagcacggaaacgaccagcagggcagccgctgcgccgatttcgccgatgataatcatggattggcggccgaatctgtcggacaaggtaccgccgaacaggcagccgataattgcgccgaagccgtacatggccacgactgtgcccaccacaccctcatcgaggcgcagcgcggaaaccaaatatatcgacaagaatgaggtcacgaagcgacccatccacagaatcagaatcgccaaccataatccccaatacagcagggacagtccgaatatcatgcgctgcttcttcactctcaataccttaccggctaccgacggcggaatagccgcgttttggcgcggggtgctgggacaatagcacctatggctatcaaaaaaggaccgaccaaggggtcgggtggcaagcatcgcaacaaactgaagggttacggccccactcccaaagccgaggaccgcgtctatcacaaggcgtataaggccaagaaagcggccgaacgtcggcagatggccgacccgcgtctggcagcccgccgtcgagtggacaagttcgcttcggcggatacttcggatctggtgtacggccgtaattccgtgctggaagcactgcgcgtaggcgtaccttcttccacgctgtacatcatgtctcgtattgaacatgacgatcgtactcgcgaaatcgtgaaaatcgctggtatgaacggcctgcacatgctggaggccgatcgtctggagatggatcgtatcgcccgctccggcaaccatcagggcgtgattctgaaggtcgatccgttccagtactcctcgctgaacgagctggccgatcgtgctgagaagaaggccaaggcaatggaggccgcgaattcggcggccgcccgtattgctgcgcgaccgctgttcattgcattggacggcgtgaccgatccgcagaacctgggtgccgtgattcgttcggcggccgcattcggtgccaatggtgtgattctgccggaacgccgttccgcttcagtgaacgccgccgcttggaaggtgtctgccggtgcggccgcgcatatgccggtggcgcgcgtggtgaacctgactaaggcacttgagggcttgaaggagcgtggatactacgttgtcggccttgacggtggcggcgataagctcgtcggcgagactggctttgaatccgatccgctcgttgtagtgctcggttcggaaggcagcggtttgggccgactggtgcgcgaaacctgcgacgcgattgccggcatcccgatcagctcgtctgttgagtcgctgaacgcttcagtggcggcgggtatcagcctgtacgcggtgtccaacgcacggcgcaaggctgcggcggagtgattgtcgcttgaggccgtaataggttgtacacacaaagaagcccctctatttgaggggcttctttgtgtgatgggctcacctacagacagtccaccggattgtccgcttaatgactccacactgccgcatccggatcgtcatcggggttgtagccgtcgtcgtccgggtcgctgtaggtggattcgtcgtcaatgacgccggaatcggcctcttcgttaagttcggcgagtgccttggaatcaaggttgtagctcggcagaacgttgtcgatgtagctggtcacggcctcgcccatcggcacgtcgtggccggccttctccgccaggaaccagcgatggtcaagcacctcatggaagaactgagcaggctcgatctgggagcgatattcgcgcggaatcatacgcacggtcggctcgaacacctcgcgcatccaatcggtggccacgatttccagatcctcgccctcacgccacgtggaggcacggtaggcgtcaaggtcgttgagcagacgacgggcctggttctcctgcacgtcaaggccggtgaggcgcagcagcttgcgggtggcgtagccggcgtccaccacgcgcgggcggaccagcacacgcttgccgtcctcggcggtcttcatttccagctcgtccacgtcgaagcccagctcgttgagcttgttgacgcgctgctcgatcttccacatttcgtccgggttgaacttgtcggtgtcggtcagagcgctccacagcgagtggtagcggtcgaccagccggttgcccacctcgatctcatccacgtcgccgggcagtagcttgccggacgccaaatccataagttcgccgatgatgttggtgcgggccaagtcgatatcgtattcgcgctggccgtcggtgagctggacttgcaggtcaccggtctcggcgtccaccaggaaggcggagaaagcgtcggcgtcgcgcaggaacaggacgttcgacagggacacatcgccccagtagaagccggccaggtgcaggcgcaccagcagcacggcgagggcgtcgatcagtcgttcggcggtgtccgggcgcaggttgcgggcgaacagcgcacggtacggcagtgagaacttcaagtgccgggtgaccagaatcgcctccagcggctccccttcacgggtgtgacggccggtgaccacggcgatcggggtcacagttggcagttcgagcttctgcagtcgacgcaggatctcgtactctcgctcggccacctggcgcgtgatctccttcatggcgtacacctcgtcgcccacgtgcacgaatcgcacgacgtggcgggagatgcctcgcggcaggttggccagcaggtcctcaggccaggtggccaagggcttgtgccagggcagcgtgaacatctttgggttcgagctggcggcggtgattttcagtgcttgcggttccgctgaatcggcgtgttcgtcttcggctttgacagacgtggccttcagcgcacgcggatccatctggggcaattcgttcaactccatgtgttcgattttacgtgtcgttcgcgatgtgtgctcctttgccacgacttcggcgcgttatgtttacgggaaaaacaccgtttggtctctccctcagaccgtctagaaggcaaaagaaaagccccgcagctatgcagggcttttccaacgaggtcataagagaggaagagaataacctcgtttaatggttgacgaagcgattagacctcg

SEQ ID NO: 2436 - DNA, 10500 bp, Unknown
  R50_10m  MAG No. k141_13124
cattatgagtccgacacggtcgtcggcgcctccccgtcgaggcggtgcatcgacacgcaggtcgaacgcaggagccgcaggctgttcgccaggttcgtccccgacaagagcgcgctggccacggcgcgcgccgaatacgactggcccggcgtcgccatcgcagcctagatgccgaggtcgtccttgtgcttgttcatgtcctcgacgaccttcttcaaggtgtcgtagtccttgatgtcggcgtcggactggatgactgcgtagtccttcttggcgtattcgttgacgatcttcttgttgtagatgataccgtaccactcgaccgcatacggcatggtgtaggcgtcgtcgccgaccttatgcgagttggtcttgccttcgtcgttgagcagcttgtacacgtcagtgtcctgcaacggttcgagatacctctggtacttggcgaactcgtcgtagccagcgatgatgaacatggtcggagcttcggacttggccagttcggaggtcagcgtggactcatagctgccggaggacgcgatctggatgtcgacctgcacgccggtctgattggtgtagtcctgcgcaagctgctgcagctgatcgaccacctcaggcttgccgttcaagaaataaacatgacccttattcggatcagccgcagtgcttccgcaggcggcgaggctgaacatggtgacggccgcaacgcccgcggcgaggattctcttcatgttcatggtgctcatcggcgttatgctccttccgcatataccgaacatctgtgtccggcgatctgttcttctcaaagggggccgctgaactatgctcagcgactcgttaccgtaagcgttgatgacaacgacatcacgcgatgcaattatgtacataatcggcgtgttgtcgggggattacttgatatttcaagcgttttctcacaccctctgattgcagctctggtgaatacgttgccaaggtactgtgcatgaatcggcaaacaggcgattccccgtgggccacgcccgttacaatgacgtgtatccatccgcccgcccctcaaggagatgaatcatgggctttatgtctccggattccgcattcatgcgcggactgagcaataccgtagatgccatctggatcaacctgctcatgatcatcaccagcattccactgatcaccatcggcgcggcgctcacggctggacacgatgccgcgcggcgcgtggcaatcgcggaaggtcacgtcaccgcgaactatttcaaggcattccgcgcgaatttcctcaaggctacgggactatggattattttcggcgccacgggagctggtctcgtgtattcatgggtggtgttgcagatcacgccgctgctcatccccaaaatcggtctgaccttggtgtggatcatcggattcgaatgggtgtgggcgttgcaggcgcgcttcgagaactcctttggcggagtactggcgaacgcgttcatcttcggcgtctcgcgcattggtgccacattggtattggtcacgatcgacgctatcttcctcggcctgctcgtcgcctcatgggtctacatgccgcagggcctgttcctgctgatagtcctgggctacggatcggtgctcatgctgcatgtgccaattctcgagcgcgtattcgccgcatgcgtcgccctgtccggcacgtccgacgcatccgccccgtccgacacgtccagcaccacgtccccgcaaaggcaatagcacatgggcaaagtcacactgcaggacgtcgccaaggcagctggagtctccaccgccaccgcatcatgggcgatcaacgacaacaagaacgtacgtattcccgaaaacacgcgccgcaaagtccgcaacgtcgccgaacgtctcggataccattccaacgcgtttgcccgaagtcttgcgcgcggcaaatccgatctaatcggtttcatcagcgacggtgtcgccacatctccattcgccggacgagtcattcaaggcgcgcaggacgaagcatggcgcaacggcaaaatcctgttggtggtcgacaccgacggcaatgcgaccattgagcgaaaggccttttcgttcatgcttgagcatcaggttgagggaatcatctattcaagctgggtgcatcgctccattacgccacctgacgagctggaacgcactatgtccgtattggtgaactgctttgacgaatcgggtcgattccccgctgtggtccccaatgaagtgcagggcggacagtccgctaccgagttgttgctgcaggcggggcatcgtcatgttgcattcgtgaacgagccaaccgcatcgcctgcgtcggtcggccgcctcgaagggtatcgtcaggcacttgccgcacacggattggcatacgaccccgcaatggtcgttgacgcaacagccgaccaggaaggcggttacggagcggccgacgcagtgctgaagaccggtgccacggcagtgttctgtcataacgaccgcactgccatgggtttgtacgacgcgcttcgcgagcgaggcttgcgtgtgcccgacgatttgtcgattgtcggattcgataaccaggaggtcatttccgcacacctgcatcctgcactcacgacggtcggactgccgcaatatgaccttggtgtattaggcgtacgctcgttgctgacgctgaataagacgcccgacgccgactacgacagcagcgaaaccgatcgcatcgaagatagcaaaacgcaccgcttcgagccattgctggtgggctgtccttcagtgatgcgcgattctatccgcgcctatcgcgggtagtcggcagcgcgagacacgcgccattcctagaggtgtgcgtcatggcttgacaggtatagtttgaatgtttatcatattgcttaatcgcttaaatgcttaagcgattaaatcaaatcaggacaatacaataaagcatgtttctaatgcgcggagctgcgcagtagaaacagccaggataccgttcgccgcgaaactgcacacaagtccggtagcccgaccacagagcaattggcgagcggtcgtcaaccgaccatataggagtgataatcatgccaaagctgtactaccaattccctggcacgtggttcggcgattgcatgccgttcggcaagggcaacgagttctttctgtatcaccagcgagacaatcgcaatccggaaccattcggcgaaccgttcggctgggatctggccacaacctctgatttcgtgcattacaaggattgcggtgtagccgtgccgcgcggcagggacgacgagcaggatcagttcatattcgcgggatcggtgtttgaaggggaagggcaataccatatcttctacaccgggtacaaccgcgattacccccagcgggacaagtcggcgcaggtgctgatgcacgcagtcagcgatgatttgtaccactggacgaaaacccagaacgccatcaccttcactccgcaagaaggctacgatccagacgattggcgcgacccgtgggtcattcgcgacgacgaacatgaccagtatctgctaatcctcggagcccgtaagatcggcccgaaaacgcagcagaccggccgcacggtgaagttcacgtctaaagacctcaagaactggacgttcgaaggtgacttctgggctccgaacctatacacgatgcatgagatgcctgatctgttcaagatgggcgagtggtggtatcacatcgttacggaatacagcgatcggcacaagatggtgtatcgcatggccaagagtctagaaggcccgtggatcgcacccgatgatgacgcgtttgacggcagcgcctattatgccggacggaccttcgaactaggtggacggcgaatcctcttcggctgggttgccaccaaggaagactgcgatgacgtaaagaacttcgaatgggctggcaccttcgtccctcacgaggtctaccagcgtaccgacggcacacttggcgtgcgcattcccgacacggtctgggatgcgttcaacgaacgcgagcaaatcgtgacgaatgcggtaatcgacggtactgacgctcgccgtaacgccgtgctggccgagggctgcggagacctgtattcgtttgaagcggacgtcatgttcagcgagggaacgcgatccttcggtctccgcgtctaccgcgatgaggcaagcgagcgtggctatcagttcatcttcccgattggtgagcatcgctacgtattcgaaggcagcccgaacttcccgtggttcaactgtatgaatatcgggctagagcggccaatcgaactggttgccgggcgtgaatatcacattcagctcatcgtggacgacaccatcgccactctgtacgtcaatggcgtcgcactcaacgcgcgtatgtaccagcacccaggcgacgcattaagcatgttcgtcaccgacggcacgctcaccgtcacgaatgcgaccatcagtcgtggactcaaggaggtgtgagccacagtcaccaccgtatgtttgcgaaccgatacgttcgcctgtgattcatccgtacaccatatgaacgccgccgggcgcaaccggcggcgggcctccaacctacgcgcggccagcgggcacgacttgtgcaatgacgatgtccgctcccccgccctgtattgcaacaacaacgaagttatggcattccataggagggaaaccatgaagaagcttatcaaagcaacggccgcaatggcagcggcaggtctatctctgggattgatcgccgggtgcggttccggcgactccaatgcagataagggtcatgtctacttcctgagcatgaaagtagagcaggctgatcagattcgtgagcttgcagataatttcaccgcagagaccggcatcgaagtagatgtcgccacagcatcgtctgacacatacgaacagacgctgaagagcgagctcgccaaatccgaagcgccaaccgtgttcgatgtggacaacaacgacttcctcaattggaccgattactacgcagacatgtccgatacgaacatgtacaaggacctcaccaagcaggactacgccatgaagaatggcgatgaaattggcgctgtgccttacgtgatggagcggtacggcatcatctacaacaaggccttgctgcagaagtattttgatgccaactggtcaagcgtgaaggacgttgagacgatcaacaacttcgatacgctgaggaccgtggctgacgagattcaggcgcataaagatgacctcggtatcaagggcgcgtttacgtcagcgggcttcgatacgagttcgatcaagcggttcggcgatcagctcgcccacgtgccggtgtattacgagtatcgcgatcaaggcgtgacgcaacttccggccacaatctccgacacatacattccgaatttcaagaagatcttcgacctgtatatcactgattcgaccacgccggccagccagctttcgagcgccaccatggatgacgccaattcggaattcgcgcttggcgaggccgtgttcctgcagaacggcacgtggggttactcgcagatcaaggatcagaacgtacctgacgaggacatgggcgtgctgccgatttatattggcactgaaggcgaggagaaggccggcctgacagtcagcttcctgtacgttgcgatgaacaagaacgcttccgaaaaggatcagcaggcgacccgtcagttcttggactacatcctgcaaaacgatgatgcacgcaagttggtcaccgacgagatgggattcgagacaccgttcaagtcatatgcagaaaacggatacaagaccacgaatccaattcatcgcgccaacgacgcctacgcagtcaagggcaattacgatatcgtgatctatcctttgccgagcacacaatgggtgatgagtctcggcaatgcgatgctcgagtacgcacagggcaccggcgactgggatacggtcgcgtctgccttcgtggatggttgggcgtcggaatacaagaccacgcactgattcgaagcgaccggcattgaagtggtaatcgggatttagcgtcctgattatcactcgggaatacgccgcttagcatgctggtgtgctcgtgagcacgttgcttacgagcacaccagcatattccgtattggggtatgggttaccgccgctgcgcaccgtgacttgcaagtcctctcagtgacggaaattctagaggaaaatggctacgtcgagaatttacgtcactgagagcccgccagcgcacgaaattctcgcgcaatgggattattccgagaatttgcgtcgctaagaacccagagcatccgattattgcggttctttgcgctcagcagccaccagcgcaataggcagctagcgttctgcgtcagcagttcgttgacaaattcgctacccctcagccccgcttcgcgggccagctctcctgacaaggagagccggaaacgatatcaacgaactactggcgcaggacgcgccggtatccgaacagaacgtcagagcccgcgcagcagcggctcggcgatggcctggaccacggattcgggcatgtgggaatcgtcgaactcgtggccgggatagctgctcttggtgctttccagcgtatgcagcgcattgagcgcacgagcgccgtcagccttgatgagccggtaggcacgttccttggccagatagtcgatctgtgcgttgtacagcacagtgaacgcatcctcaatcgccggatcgtcggcgtaccgcagtccgttcgtcgcgtgaatcgacacggcctgcgtgaccggcgcatccgcaaccgtgacggacaggctcagcgcctcggtgtcgtacgacacatccggcacgacctcagcgccaccaaccgtcacaatcaactcgtcaacggcgaccggtgccacaccggtgaacgtcaccgtccacgtgcgctgctgcggcaccgccgccacattgccggccaccggggcaatctcgaacgcgttcaccgcaccatcggcctcccagcggaagtccatatgcgtcaccgcgagcgcggaatccgacggctgcgcctggttggtgccatcgtcctccttgaggtcgaacgcgccgttcgcgcccgggaacacggcaacctccagatagcgcggattatccacggagttgaggctgccgttgagctcctcgtccagcggctgcaacggcacgatgccgccggccttcgcgaagaccggaatgccatcgagcccacgccacgcctcgaacttgcggccttcggcagagcccgcctcgtaccgccgtccggtgaagaagtcgaaccatgtaccctgcggcagccacacgtcggttttcgccagctgcgcgttgcggtcggacggcgtcacgatcggcgcgacaatcagctcggtgccgaagcggaactcatgctccaccccgtacgcggtgacattttccggcgactgccagtacatcggctcgaccagcggacggccctcggcggcggcacgccagttcatcgtatacagatacggcagcagttcgtggcgcagacgcagcgcgtcatccatcgagcattccgtctcgggacggaagttccacggttccttgccgttaaacggcgaatcggtcgaatgcagacggttgatcgggctgaacgcgccaagctgataccagcgggcctccagctcctcgtcgcggtagccgaacatgtggccgccgatatcatgactccaccagccgtagccgatgttcgacgcagtagccgtgaagtacggctggaacttcagcgacttccacgtcacgactgtgtcgccggagaacccgaccggataacggtgcgagcccgggccggcatatcgcgagaacgtgagcggccagcgcccgtcacgggcggagtcgagataatgcatgtggttcagcatccacagcgggtcaagacccttctggcgggtcacgccgccctgctgccagtccagccaccagaaatcggtgcccagggcttcgagcccatggtgcaggtcgaagtacgcttccatgaatcgcggactggtcagatcgaactcgaccggctcgccgcccgccgggtcaatgcccatgtgttcggcgactttggcatagccgtcttcaaatgctcgaacgccgtcgcgcgggtggacgttgagcgtcgtgcgcagtccatgctcgtgcagaatgcgctggaatcgctcggggtcggggaagaattcacggttccacgtgtagccggtccatccggatccatacttcgggtcgacattgtcgaccagatgccagtccatgtcgatgacggccgtggtgaacggcaggccttcctgctcgaagcgatcgacaagctccagatactcggcttccgtgtactggtggtagcggctccaccagttgccgagcgcgaagcgcggcagtagcggcgtcgggccggtgagcttgtagaagtcctgcacggcttcgatgtaccgatggccgtatccgaagacatacagatccttgccggggtgctcgcgcggaatgacccacatgccgaatgggttggcctcgcccttgacggtggcggcttcggcgccttcgacgatcacgtttgatgcggaatcgtcgagcacggcccagccgtcgcgggagatcacgccgagccccagttcgatctcaccgtcgaccgcgtccagcgtacgcgcggtgccgcgcaggttgccgtcctgggcttcgccgtagtgccacgtattcatctgggaattcgccacgcctttgacgacgatgctcagaccttccttactgaacggctgcatgtcgtaggtgaggcgcagcgccggcgtatcgatgatgagcagcccgtcgcgctcggtcttcgtgaacttcggcgggtttgaagtgccgtccgcacggttcgcgccatccgcaccgttcgcgtcatccgacaaccaatcgcgattgacgatcatttgggtggcgtggtcttcgaacttgccgttgtcctgccattcgaggcggacgagcgattcggtgatgatgccgatgcgccaacggtcgccttggatgaccgcggccgggttcatgcccggatgggtggccagctgtggaaaggtggacattggtgtgctcctttgctcgtgttattttccacgttgttgttagtgtatccatgaaccatcgccgccgtgcgggcctcagacatcgcgatacgctccgtcatggtccttttcatgcggatatactgttaccgacggcgacacgcatcgggggcattcatgcggcgatggccgtggtgtcgcgcagcatcagctgcggggccacggtttcaaatcgcggttcggacaggggtccttccatcgcggcaagcgctttgcgcgcggcaatggcgcctaggtcattcgggcgttgccgcaatgtggtcaggcccattttggcgctgaaggggatatcgtcgaagccaattactgacaggtcacgcggcacgcgcagcccatattgcggcaaccggtacagcaccggaatcgccatttcgtcggtctggaagcagactgcggtgggcgtgggcgacatggtggtcagctgggcgagcgccgcgccggtcgtatcctcatggccggagcagcgaatctgctcaagcgtgacgtcaggatgggccgcagcggcatcgataaggccttgcagtcggttttccgcactgaagcgcagttgactggtgtcatccggcgcgccgtacacgtaggcgatgttgcgatggccgagcgaaatcaggtgttcgaaagccgtatgcatgcccagcttgtcgtcaatgcacaccgcgccgtcaagtccgatggtggacggggtgttgatgccgatgagcggcacgttcacgtctttcagacgactgacctcatccgggtcgatgtcgaacgagcagacgatgaccgcgtccacattgcgacgaaccggcagttcagtgaagaaatcatgccgttcccgcgcgttcgacaggccgtatacggagatgtcgtatccggccgggccgaatacggaattgagcccgcggaagacattggcattgaaccagacggcaatggtatcggcatgcaggagtgcgatgcggaacgattgtccggatttcaacgcggccgccgaccgggagacctggaagtcgagtttgcgtgcggcggcgaggactcggtcacgtgtcttcggcagcacaagattcggtttggcgaaggttcgtgacaccgttgacacggatacgccagcctctttcgctaccgcttgaatgctcgcttttgccatggcaacctcgctcatcaacagtggataacaatcccgctcaaaagacaacgttatcatacctaagcgagcaacatgcacgccacgctgtctatttagaagtgcaacgcccctgttcgtcggctaattctagcagttcgtcggtgaatgccccgggccgaacccgggttctagatagaagcgcaacacccgctctatggttggaagtgttcaggttctaactggagaaggtgttgcgcccatgaggaaagtgtattcccacttgtcggcacaggaacgcatccggatc

SEQ ID NO: 2437 - DNA, 3944 bp, Unknown
  R50_10m  MAG No. k141_13168
cattatgagtccgacacggtcgtcggcgcctccccgtcgaggcggtgcatcgacacgcaggtcgaacgcaggagccgcaggctgttcgccaggttcgtccccgacaagagcgcgctggccacggcgcgcgccgaatacgacatctacaaggacatccccgcgccggcgcgcatcgaccgcacctgggacaacggcaccgaatcctcctgccacatgctcgtggacgaggcgctgggcatgctcgcctatttcgcggacccgtactcctcctaccagcgagggtcgaacgagaaccgcaacgggcgcatccgccgccaccttcccaagaggaccggtttcgacgacctgacggacgcggacctgcaggccatcgtcgatgagatcaacgacacccccatgaaggtcctgggctgggaaacgcccaacgaggtttggtaccgcgagctcggcaagccaatgtcaaagacaagccacccgaagacgagcgttgcacttacaaattgaattcgggaggagggaacccatgaccgcgaataacaagcgcgatgactggtggaagcaagctgtcgtcttcaggtctatccgcgtagcttcaaagacgccaacggtgatggacttagcgacatcgcaggcgtcaccgagaaaatcccctatctcaagacgctcggcgtggacgccatctggctgagcccgttctacccctccgacctggcggacggcggctacgacgtcatcgactatcgcaatgtcgatccgcgtctgggaaccatggacgacttcgacgccatggttgcagccgcacacgaagctggcatcaaagtcatcgtcgatatcgtgccgaaccataccgccgataagcacgtcttcttccaggaggcgctggctgcaggacccggttcgcccgaacgcgaccgctacatcttccgagacggccgcggcgagcatggcgagctgccgccgaacgactggatttccctgttcggcggcccggcgtgggaacaggtgcccgacggtcagcggtacctgcatatcttcgccaagcagccgccggacgtcaattggaacaatccggacatccacgaagagttcaagaagaccctgcgcttctggtccgatcacggcaccgacggcttccgcatcgatgtggcgcatggcctggccaaggacctggaatccacgccgcttgatcagatggacccgctggccgtgcagcatggcctctgccacgacttcacgagcccgctctgggaccgccgcgaagtgcacgacatctaccgtgaatggcgcgaggtgttcaacgagtacaacccgccttgattcgccgtcggcgaggcatgggtcgtgccggagcgccagcatctgtatgcgagcaccgacgagctcggtcaggtgttcaacttcgagttcgccgaagcgaactgggatgtggacgcgatgcgtgcggcaatcttcgtcggtctgcgctccgccgagaaggcgcacgattcgacgacgacgtgggtgatgagcaaccatgacgtgccgcgtcacgtttcgcgttacggcctgccgcgagtgccggcctcgtcgcatcaccagctcgccaaggactggctgctgcgcgacggcaccagctacttcgaagatcgcgagctcggcaccaagcgtgcgcgcgcggcgattctgatggagctcagcctgcccggttcggtgtacatctaccaaggcgaggagctcggcttgcctggagtggcggacatcctgtgggatcgtctcgaggatccgacccccgttcttcacccgcgaacggttcatcgaaaagggtcgcgacggttgccgcgtgcctctgccgtgggtcgccgccgacgtgcctgcacccgctgaatggaacgcgggattcggcaccggagcatcgttcggattctccccggcgacgaaggccgacggctcggccagtgcggacccgcatctgccgcagccactgcggtacaaggattatgccgccgatgccgaggctgctgatgacgcgtctatgctgaacctgtatcggaccacgctggagctgcgcgctttgctactcaccgcaaccgccgatacctcggactgcgcggccatcgatgccggacacgacgtgatcgcgtactcccgccccggcacggacggacgccgtttcgccagctacaccaatttcggtgtggcggcggtgacgctgcctgccggtgaggtcgtgctcgcctccggcgatctgaccgctgacggcgctctgccgcaggacaccacggtgtggatcctgctcgactaattcttcctgctcctctttcccctccgcggcttcccgggtcttcccgggaagccgctttttgtatgccttgttggacgtgtggatgtacagagaggggtgtagccgcgttgtagaggactgcgcgcgggcgggcatacgcggtggtgacgtgggcgtgaggggttgtataagccccaaatcagcccctcgtaagcgagatatgtggctcgtcagtcgaattgcggtttggcatgattctgcatgcctagagatgctagtggtctgccttataaataactgaaggaccagcttcttctctccccccagtcagcttcgctgatagccccctcgtcagagggggcacataccgccgctgtctgcttcaaggcaacgtcccattagaagccgatgccggcttgcatggctccccttgtcagggggggcgtcccgcggaagcgggactgaggggtagtcatttaacgaacttccgacggaggacactagagagttagggtcgcgctccagtgcgcatacgaaggggggcttcccggaacaatccgggaagccccccttcggcttgtaatcgtcagcccttgacggcgccagccatcacacccttgatgatgtacttctggcacacgaggtagaagatgataatcgggatgatggccagcacgaggcagcccatcatggcacccatatccaccgagccataaccacccttgaggtactggatggcgattgacatggtcttgaaccggcgcatgtccaacgtcaggtacggcaggaggaaatcgttccagatccacatggcctgcaggatggcgaccgagatcacggacgggcgcatgatcggcagcgtgatttggaagaaaatgcgcggcacggaggcgccgtcgatcattgcagattcctcaagttcctgcgggatgcccttgatcacgcctgtgaatatgaacacggccagaccggcgccgaagcccagatacacgatccacaggccccacggagtgttcaggccgagcatatcggcgatcttggagagggtgaacatgaccatctggaacggcacgatcatgttgaacaggaacagcaggtacagggacttcgccgtgcggttgttcacacgcacgatccaccatgcgcacatggaagtgcacagcaggatgagcagcactgcgccgaccgtgaccacaacggtccagccgaaggactcgattagattggtgcgcttgatgccgcgtgtgtagttctgcaggccgacgaacgccttgccggtcgggatggagaacgcgttgcggctgatgtatgccttctgcttgaacgagttgatcaccacgaggacgatcggaaacacccaagccagcgagatgatggtgaacagcgtggcccacagtactggatgcttgactttctcgctcatgcggacacctccttgctagtggtgagacggttctggatgatggcgattagcgccacgatgatgaagaacacgacggccttcgcctggccgacgccctcgaagccggcgcggccgtagaacgtgcggtagatgttcagagccagcagctcggagctgttggacggggcgccgttggtaagggcgaggttctgatcgaacatcttgaagccaccggtgacggtcaggaacgagcacacggtgatggacggcatcatcaacggg

SEQ ID NO: 2438 - DNA, 2889 bp, Unknown
  R50_10m  MAG No. k141_13265
gccggagaggccaggcccagttcaaggagcggaaggcttgcgtcgctcctgcggaatcgacgagaaagtgttccagcctcctggtgaagagccacgagcaccctgcttggggacccgacatcatcgatgtacgacatacggcatctacgacttcgcccggttcgtgcagacgcttgaaagagcgagggtcatacaggcctcgtggaggcgcgcgtcttctcctttgtgggcgtttgggtttttctggtggtggtcttgatggactggcgtgtgcctctggaatgatgatatggaggtttcattatatcgtccgccgtctggctgggttgcattcgcgggggattggcgctattctgtaacagcgaaataagctggacttcgttcggttcgctgaggccattccgtggacgcggggtggcctcagtgctttcatcgctggattgggggaggtcggatccatgtcgttgcgcaagccctacaggagtgtgaacgaacagctgcgcattctgcgctcccgtggcatggccgtcgatgccggtgcgggtcatgtgctcaggcgcgagggctattatccgatcgtcaatggctataaggatttgttcctcgaccgaaaggcatgcctgaccgctggtgatgaccggtacggaacgggcgcgcgtttcgatgatctgtacgccctgttcctgttcgaccgtgagttgcgtgaactgttgttttcctccaccacacgggcggaggccgcgctcaaggcagtgtgcgcgcatgagttcaccgggctgcaccccgacgaggtcaacccgtatctcaatcccgactattatgattccaggtgccgtccgagcgccatggcattgatcgacaaggtcttcaagcggatacttgagttggacggcaacccgcgcaacaggggcgactatggcggcaaggcgtatatccgccattgcatggaagaccacaacggccaggtcccgttgtgggtgctggccaacgatctttccttcggccagacggtatggttcttccaagtccagtccccggccgtccgattggcggtcgccgaaagtttcaccggtttgtatgcggacacgcacgacaggccacggcgcatcaccatcaagcggctggacagcatcttcaacagactggtgttctaccgcaacctgtgcgcgcatgacgagcgctgctattgtgcccggtacgatgggcgcgctaacgagaacgtgtatcaggccatcggtgatcttggttatttgcttgacaaggacgattacttggaattgttcggtcgcttctccgcattggtcgcacgggtgacctccaccatgccatcgcggagccaagcgatcctgtctgccatgggtgtgcgcgaacgggaactggccgacagggcggaaatcatactgcgcagctgaccgttcctgctattgggacggtggcgtcgcaggcggctttggaccatgagccagctgatctgggctgtctgcaatgggcctgtgggattcgggatggatttggatgccattggcggctgggacggttgcacgggctgcgtatcgttctgtctattgtccgccatggagacatgctgccgggtgaatgcttctgggcaccacccatgcggaacatcatgaaaccacagggggtattgcgcttttccgtgccggtcggcgaagacgctgagcgccggcagggtggtggaacgttcccggattattcttgggtgcctgtaggtgcctcgtggaaaacgagcgtaaccggcaggtttcccaaaaattgaaaaccttggaacaaagccaaaaacgaccacatgcgattatcatcagaggtgcgcatgaggatggtagtcattgtcttaagtgtctcatgtgcttgagaccgggtggtgatgcctgagtgcaggaatgcgggttgtgattaggggcatggggtagccgaccaccaagattgagaccaatgcattgggtaacgatgcggcgagcggttccggcattctgccgttggaccgtgactgagatgccgtgttcttcgataatttgtgtcacgttggccctgtagatccagttctcgccacagtaagcgcccgatgtctatttagaggtgcaacacccctgttggtcctgcaattctagcagttcgtcggcgaatgcctcggcgggcgtccggtagtccagcacgcgcatgggacggttgtcggcctcgtcgacaatctcccgcagttccccggccatgtccatccggatctcgctgcgttcgggcagatgccggcggatcatgccgttcctgttctcgttgcttccccgccgccggctggagtacgggtcggcgaagcacgtgtccatgcccggctcgtcgcgcaggcgcgtgtggcgggcgaactcggtgccgttgtcgtgcgtgacgccgccgcgcgcgccggccggcagcggcgagaacatcgccagctgcgccccgacgctttccccggcggtcttgccgggcacgatcccggccatgaggaacctggtcttcctctcgacctcggtgtgcaggttgcatccggcgccgatcacgccgtcggcctcccaatggccgaaaccgctgcggtcgccggcctccggcggacgctcggagatgggaacccgtccgggaatcgggaaacgcgacgtcctcctgccgccacgcctgcgacgcctcctgtggccgcgtggaaggcagcgcgcccagcgttcacggcgatggcggtcggcgcagatccaacggtagacggtctccgggcacacgcgcatggcggagtcgtcggggaacaggacgcgcagcctgccgctgacgggcagcggcgaccagccgcgacccagccattcggccacccgcgcccacaggcgttcgcatgacaggcggtagcgcttgcgc

SEQ ID NO: 2439 - DNA, 16430 bp, Unknown
  R50_10m  MAG No. k141_13385
acagctcccttatcagagggagcttgcataagcagagagggctcgtatatcgagctacttttcgtgcttttcgtcgtagacttcgtcggtgggggtctcgtcgtacagctgcttgccttgcgcctccgccagtttcatctgctcgttgatccacgcggcttcagcaggattgatatccgcggaattcagcactttctgccacaccgggtagaacatgtgcatcgccggatacatggcggtgaacaacacctccggcttatgcgtgcgcgtatgttgcggatgcgcatcaaacgtattcttaaaacgtcgcatgtagttcaggaatgaactcagcgacgtgtccatccgtcgcgcgctcatcgcggcgatcatgcgcggcgagtacacggttttcagattcttgcccatcagatgcagggaaatatcgatatcctcgtgcatcacatcggccttatctcggcagacctcattcgcgatctgatgccaggccgaagcgcgcaaggccatattcgagccgaacagcagcggctggccgccatcggcacggtagattcgcttgcgtaaggaattgtcgcctttcaacccgaaatgacgtgagggcatgtcgtaatacatcaccggaccagtggcacccatcgcggccgggtcttcggtgaagatgccggagaccacctccacccagtcaggccggatcatacagtcggcgtcaaaacggcccagcacatcgccggtcgcggcgttcaggccaaagttgcgggtgggaatcagcccctgttcatcgttctggtgcaacagtttgaccggggcctcgggatgttcggcgatgaactgttcgacaatcgcgcaggtgttgtccgtagaacgattgtccaccaccagcacctcatgcggcatgatggtctggcgagtggcgttcagcagacagtcgcggatgcgttcggcttcgttccacgctgggatgatgatcgaaacgttgagcataacatcaacaatagaaaagcgggtgtacgccgccggcgtatccgagcttcaaacccctcgctacaatggggagccatgagcgaacgcgcgcgaaacataaacagcaccgacacgtcgagaagcggtgccgcagaagccggggcagacccggacgacgagaatcgtatcgactttggtactttgttccccgccaagggagattcccgcaggccaccggaatggttcggccgcgcgttgctgtatgtggccctcgccgtcatcgtattcatgttctgctggcgctcgtggggcgacatctcctatctggtgttcgacatcatcatctcgctgttcctggcgctggccgtcgaaccgctggtggtggcgctggtggctcatggctggaagcgtggcgtggcttccgccgtcagtctggtgggcgtggccgtggtcgtgggtgtgctgctcacgctgttcggcaatatgtttgtacagcagatgattgccatggtccgcggtttgccggcaatgtatgggcagattcgtgagttcgtggaccagcacgccacgttcaagatgccggaaatcagcaatcttggcatggaaatcttcaacaatatccagacctcgtgggtcaccgatttcgccggcaccgccatgagtacggtgggtggcctgttctccttcctgctgaacctcatgaccgtggtaatgaccacgtattacatctccgccgccggcccaaagctgcgccgctccttctgccagtggctggcccccaacacgcagcgtcgattcctgctggtgtggaccgtggcccaaggccagatttcgtccttcctgttctcccgttcgattctggcgctgatcaacgccacctgcaccgccatcttcttggagatcctgcatgtgccctactggctgccgttggccctgttctgcggcgtggtatcccagttcatccccacggtcggcacctatatcggcggtgcgctgccggtgctgttcgcttggggcaaccgcgggtggacgtacgccgtggcggtgctggtgttcatcatcgtctaccagcagatcgagaacctgattctctcgccgaggatttcgcagcgcacgatggatatcaacgcggccgtcgccttcctctcggtgctggcgttcggctcgctgttcggcgcattcggcgcgttcctggcgctgccggtcaccgcatcgctgcaggccatcttccgtgcgtacaccaagcgctatgagctgattgactcaccgctgatgaacgatccgactccggagaagaagtccaagatcgtcgaggcgtccgaggcgttcggcgagcacgtattgcagccaatcggcgagcacatgccgcgtgcggccaggggatccaccaaccgcgtgccgatgaatgaggaactgcgtttgctgcaggaacagatttatgcgattccgtcgcacgagacgaaagaatccgatttggacgattccgccaccgtggcgattccgaagaacgtgctatcctccagcgctcgcaagggattacgcggcactgagccggagtcggatgccgatgataccgataacgccgataatacagtcggtgcggatgcaagctttgatgagccggatacggcggcgattccgcagcgtggtgccgcggatacgcagcagtctgagcggcccgagcagcctgagcggtccgccgaacagcctgagcagcccgagcaacgcaagcaaaccaagcagtctgatcaatctgcctccagcaatcctagggcagggtggcgctgatgactctgctttccgtactcgatattcttctgatgatcgtcggcggtgccggcatgatatatcagggactgtgcatcgtgatgtccctgttcgccaagcccgtgcgcttccccgacgccccgatgaccaaccggtatgccgtgctgatctccgcacgcaacgaagaaaaagtgatcggcaaccttattgggtcgattcgcgatcagacctacccgtccaacctcatcgacatctggctggtggccgacaactgcaccgacaacaccgccgacgtggtgcggtctttgggctgccatgtggtggaacgccacaatcttgagctggttggcaagggatatgcgctgacgtatctgttggggcatatgctcgacatcggtgtggccgatgattatgaggcctacttcgtgttcgatgccgataacaagctggacaagcactacttcgaggaaatgaacaaggcgttctgctccggattcaagattctgaccagctaccgtaattcggtgaatctggcggataactgggtgtcttctggttctgcgctgtggttcatccgtgaatcgcgattcctgtctaactcgcgtatgattctcggttcctcttgccatgtgggcggtacgggattcatgttctcccgcgaggtgatgaagcggaacaagggatggaagttccatctgctcactgaagatcttgaattcactatggattcgattctgcatggcgaccgcatcggctattgcggtactgcgatcctctacgacgagcagccggttgccttctcgcaaagttggcgtcagcgtttgcgttggagcaagggattcctgcaggtattccgttattatggctcggcattgctgaaacgcgcggttcgcgaacgtgatttctcctgcatcgacttcacattgatgctgtgtccgtttaccgtgttgggcgcgattcgcgcggtaatgggcttgctgttcgccgcgtgtggcttcgtgagttggccgagccagctgcaatcgctggccagttggtccagcggcatcatcatatcggtgttgggcctgatggcattggctgcattgaccatcattgtcgagcgcgaccagatcggtgccacgaacaaggagctgctcgcctatgtgctcagcttcccgatttacattctcagctacgtgccgatctccttccaggccctcttctccaaagcccagtggaagcccatcgcgcataagggttgaccgagtccgctagtccggagccgctcagcggggcaatccaacagcaacccgggggtttgcttcgctgagggttggctggtggggtagagtggatgtatgagcttagacaatactcaaaggaatgtcggatttcagccgccgatgatgccagccgccgcccccgcgcctgcacagccgtcgcaaccgcagccacaagcatggccgccgaatccgaatgcggcggtgtccattcgtggcctgttcaagcacttcgaccggaagatcgccgtcaacggactcgcgctcgatattccggtcggctcgttctatggacttgtaggccccaacggtgccggcaaaaccaccacgctcaatatggtgaccggtctattggtaccggacgccggcaccgccatgattttgggccatgacgtgtggagcgacgtgaacacggccaagcgcatgatcggcgtcatgccccagcccgaccagatcttagaccgactgaccggtttgcaattgctcgtctactccggcatgctgcgcggcatgagccgcgatgagaccacgcgtcgcgcccaggacctgctcaatgctttcgacttggccggggccgccaacacgatggtcaccgattattcggccggcatgaccaagaagatctgcctggcctccgcgatgattcatagcccgcgcattctggtcctggacgagccgtttgaatccgtggacccggtgtccagcgccaacctcaaagacatcctcatcgaatacgcgaagaccggcggcacggtgattatctcttcgcacgtgatggcattggtcgaaaagatgtgcacgcatgtggccgtaatcaacaacggtctggtgtgcgcggccggcacggtggacgaggtcgccgccggcgaagaactcgaagaccgcttcctgcaactggtcggcggccgccacgaagccgcccatctcgcatggctcgacggcgggcaagcccaagcccaagcaccaacttcggtccagccggtccagcccattccgcttacaaccgccacgcccgccacacccaccgatgaggcccgccgatgatcagcagcgccatcaccctggtccgcctgcgctggacgctcacgctcgccaccctgcgaaaatcggcgtggcagaccgtcgcctatgtcttttccgccgtactcgcggccggcaccatcatcggcaccggcgtgctcgcatggttcatcggcatactgccgcccttcaccgtgaacgcggatggctttccgctgaacatccttggttccggaggcatcgtcaacatagtcgtcgtgctggtcggcgcgaccatgaccatcttcatcggcttcatccagctcatgatgcttggcgaaggctccaccatgaacccacgcaaattcgcgctctacggcatcgccgaccgcaacctgcaattcggcttgctgctttccggcctgtccggcatccccgcccttaccggcgtggcctcactgatgctctggacactggcctatcggcatatgggaccagccgtaatcatcagttccctcctcgccgcagtgctggccgtcatcaccatgatgagcatctccaaactgctcatcgccctatccaccacgctggtgaccagcaaacgcggcaaaggcgcgttctatatcttcatcgtgctgacgttcgttatcatctgtcagttgccgaacattctggtcaactccggcgtggccttcagcctcaacaccgaaacctggggcgcggcgaccaccatcgtcgcatggacgccgttcggcgcggccttccaactaccgttcgacgcgcttaccggagcctgggcggtgctgctcgcccgcatcgccatccttgccgtcacatggattgtctgcttcgccgtctgcacctggtgtctgagacatgaacggctcaccatcggcgcaaacagtccgtccgagaccgccaaaggcatcggcgcattcgcatggatgcccgattcggcatccggcgcggtttccgcacgcctgatcacctatctcaaacgagacccccgccaagccatgaccttcgccatgccggtcctgttcctgatcatcttcgccttccaggcacacggcatcagcgcggtcgtctggcagtcgctgatctggtgcggctggttcatgtccgtcgtggaaagcaacgggctcgcatatgacggccgcggcttcaccatggaagtcatcgccggcgtgcgtggccggaccgacagaatcggccgcgtacgcgtctacgtcggcatcatggtcgtctacatggtgctgctctatctcgccggcatcgtgctggtcggcgcactgaccggacgctgggcgcagcccgatgacctcgctaccggcctgatcttcctcgccacgggcatgggcatcgccttgagcggactgggcgtggccgaagtcacctcctgtgtactgatgtacccggtcgcctcaatggacaagccgttctccgcgcctcaaggccgcgccatggcccaaggcttcttcccgttcgtctacatgcttggcagcctgctgctcatgctgcccactggcatcgtggcgctggtcatgctgctgacaggagccgaaggcggcatgtggctggcgattattccggtcgcgctggccaatggcatcggcattctggcactcgggacatggctgggcggtaagctgatggatgcgcgaatgctctcgattgtggcaacactcgactcgttcgcctcattgcagaaatgattgccttggcataaggagcacgatggtatctacagcggtatcacgccgtcagcgacgtgaagcgcaacggcggacccaacgatcgcatcgccgaacactgaccgtcatcatttccgcactgaccaccatcgccctgttcgcggggtactgcgccgccgacatcaccgacgtggcccccggattgttgacgttaaaacctgtcaccgcacctgttttcgccaatccggccaccgccaaatcaggcggcaccatcgccggtgccctgaacgcgaacaaggccattgattccacggccgcttctgcactggtcaacgaattgctgtccgcgcaaggcgtgggaaacgatacgtcggtgatcattgaagacgcccaaggcaccgtcgctgccgaacatgagtcgaacactccacgcgagcctgcatccacactgaaaacgctgaccgcgctcgccgcctcatccaccctgaacatggcatccaccttggatacccaagtgttcctgacccaatccgatgacggcaccaatacgttgaccctcaaaggcaatggcgacatgctgctgtctgcaggcaattccgacgcaaaccataccaacggacgtgccggtctgaacaccttggccaaggccaccgtggccgcgctcgcccagcgaggcatcacttccgtcaatctcgagtacgacgacaccctattcggcgactcacgcattcccgcaggtctgtcggaaggcggcgcggtcttaagcgactacaccgtctacttcacgccggtctcatcaatggcgattgatggaggccgccaacacaccgccgatacgcctgcgccggccgaccccgatgattcggccggctacccggaactgtcccagcacaccgccagcgacgtggccacgaaattcgccgaactgctccaatcgaacggtgtggccgttaccggagacgtgacggcaaacaccgctccatccggcgaaacgcctttggcttcggtgagttcggcaacactgtccgaaatcatggcatacacgttgcgacattcggacaatacgctggccgaggagttcggcagactcaccgctttggcgaaatcagcgacaaacagtcctgacggcggcacggaggcggtcaaatccactctgaacgatctcggtctcgacacatccggtctgaccatggccgattgctccggcctgtctcccggctcccggctcaccgtacgcacgctggcggccgtccaacaacgtaatctgaccaccaagagcggcgcggccggcgcggaagggctatccatcgcgggattggtgggcacggcgcaggatcggtatacggatgatgccgtggctggtctgctgcgcgtcaaaaccggcagcctcggcacggttacgtcgatggccggcaatgtgtcccgtaccaatgggggagcgttgtcgtttgccgtggtggtcaacaatcctgaggattatgccgccgcgcgtagcgccatcgactcgttcatcaccaagctcgcggggctgtaaaagaggcatcaagggccatcaagggctacaaaggccgtaaacgtccataaacgcacgagtgcctataaccagaaaagggtggtgagtacatggcatattccgcacgattgcgcaaggccgtaggcgcggtccgaacaacgctgagcgccgtggaactatgcgatgtgcaggctcccgaattcgcgcagcatggggaccatgccgttgcctccgatgcaccactcgtgctcgtggcctgttcaggcgggcgcgattcgatggcgctggccgcggtaagccatatcgtatgcacgtccatgggcgtgcgttgcggtgtcgtgattgtggatcacggcttgcaggagggttccgaacaggtcgccggcgaggccgcggatcgttgccgtgcgttgggactgggcccggtcatcgtgcgcaacacaaccgtgcaggcacgcggtgagggcctcgaagcggccgcgcggcaggcccggtacaacgagctgtgcgccgcggcgcgtgaatcaggtgccattgccgtgctgttggcccacactatggacgatcaggcggaaaccgtattgatcggactgctgcgcagccgtggcgtggatgcgttggccggcatgccgcaggtcttcacacgcagtggcgtgacttttgcgcggccgctgcttacccttactcgagacgaaaccaccggcctctgtgaagacttgggtgtggaatattgggatgaccccaccaatggcgatgcggtagacggcgagttgccgaacgactatccgttgcgctcgcgggtgcgccacgacctgctgccggccatcgaacgattcgctggattcaatgtcacccgccatttcgccgaaagcgcacggttggccagaatggataaggagtatctggatcagcgatccgacgaggtgatgggggaggcggttacggcagttgaccggccggcatcgtcggcagcggtatcgaccgatacgccacgagcctgtgctgcagacgataccaacgattcgggccatggcatcggcctgatgatcggcgtcaaacgtattgcacgtgagccagaggcgattcggttgcgggtcatcgctcacgcgctgagccaggccggtgtgaacgccagtgccgcccagattgccgccatcgaccggctggtcgtcgattggcatggccaaggcggcgtctcacttcccagaggttattcagccaatcgcaagaaacacgtcattcgcgtgtgccaagatggagcgcatgcgaatcgctgacgttgaggaagatattgaccacgagctggtcagcaaagaacagatcgatgccaagatccacgagatggccactctcgcgagcgaggattaccgcgataagaatccgctgctcgtggcggtgctgaaaggggccgtgaatacgctggtcgcgttcacccaggccatgagcattcctgtacagatcgacttcatgagcctttcgagctatggctcgggcacagtgtcgagcggtgaggtcacagtcaggcaggatttgtccgccgatgttcgcggacggcacattttgattgtggaggatattgttgattcaggacgcacgctcgcgtggctggtcgcagaactgaaacgtcgtggtgccgcttccgtggaggtcttcgctttgctgagcaagccttcccgccgagaagtggacgttgatgtgaagtacgccggctatgagattccggacgagttcgtcgtcggcttcggcctcgactttgacgagcgctaccgcaacctcgattcgatcgcggtcctcaagccgtccgtctaccaaggagtgcaagcatgagcttcccgcaagggccgggtaacggcaataatccgaacccggacaacaaccgtaacaacggcaacccgttcaccaacccgttcaaccgtggcaataacgggaccaatggcaaaggcaacaacaacgagaaccggccgatatggcagtccccctggctgtggggtgccgtactcgtggtcatggtcgtgctgatgttccagatgttcgccggcggtggcacgaagaccattgacaccaaagatggtttcgcgctgatcaatcagggcaaggccacgtacgccgagatcacggacaacaagcaggtcgtccgccttaagctgaagaacgactacaccaagaagaacgccgacaccggcaaggtgaccaactacggcaagaacgtgcagttctactacaccttcgcgcagggcgcacaggtggccaaggccgtggagaacggtgatctcgaaaagggctggacctcgaatatcgagcagaccagcatgctgagctacctcgtcacctcgatcctgccgttcatcatcttcttcgccctgttctggttcctgatgagccgcatgggtggtgccggcggcatgctcggcatgggcggcaggaagaacagcggcaaactgctcgacgggcagacccccaccaccaagttcgccgatgtggccggcgaagacgaggccgtggccgaagtcgaggagatcaaggacttcctcaaggatccgtccaagtacaaggcgctgggcgctcgtattccgcgtggcgtgctgctgtacggtcctcccggcaccggtaagacgttgctggcccgagccatcgcaggcgaggccggcgtgccgttctactcgatggccggctccgacttcgtcgaaatgttcgtgggtctcggtgcctcccgtgtgcgtgacctgttcgatgaggccaagaagaacgcccccgccatcatcttcatcgatgaaatcgatgctgtgggccgcaagcgtggctccggcatgggcggtggccacgacgagcgcgagcagacgctgaaccagctgctcgtcgagatggatggtttcgacaacgacaccaacctcatcatcatcgccgccaccaaccgccctgacgtgcttgaccccgctctgctgcgtccgggtcgattcgaccgtcaggtgggcgtggccgcccctgatctggaaggccgtgaggcaattctgagggtgcatgccaagggcaagccgttcgtaccggacgtcgacctgcacatggtcgccgtgcgcacgccgggcttcaccggtgccgatctggccaacgtgctcaacgaagccgcgttgctgtgcgcccgtgccggtgcccagttgatcgacaaccgcgccatcgacgaggccatcgaccgcgttcaggccggaccgaagcgcaagtccaagggcatggctctggaagagctgcgcaacaccgcataccacgagggtggccatgcgctggtagccgccgccctgaacaacaccgacccggtgaccaaggtgacgattctgccgcgaggccgcgccctcggctacaccgccgtcatgccgacctccgaccgctactcgcagtcgcgcaaccagctgctcgaccagatggcctacgcgatgggcggtcgcaccgccgaggaaatcgtcttccacgacccgaccaccggtgcctcgaacgatatcgagaaggctacgaacatcgcccgtacgatggtgatcgaatacggcttctccgacaagctcggtgccatcaagtggggttccgacgatgaccagaccactgtgatggacggtctgcagccgcgcaagtactccgatcgcaccgccgaagtgattgatgacgaggtgctcaagctggtggagaccgcgcacaccgaggcgtggaccatcatcaacgacaaccgcgagatccttgacgagctggtccgccagctgttggtcaaggagaccctgaacgagaaggaacttgcggcgatcttcgcgccgatcaagaaggctccggttcgtccggtgtggttgtccaacgaccgccgccccgactcggacaagccgccggtggagattcccgaaagccttaagcgctcggtcggcatgaagccggaagagtagacacgatgacgattcggcccgacctgttcatgtggtttctcacgtacgcaggccgggccgacgtcgttgtggacaatgacaagggagagatgagatgaacgaatatatagagtcttgccatcgggagaaacacacatacgacgaggaaggcgtgcgcgaggccgtacgtctgttcctgaagtcgattggcgaggatcccgagcgcgaggggctggtggaaacacctgaccgtatcgcccgcgcgtgccgcgagctgttcgccggtctgcaggcttccccggccgatgtgctggagaagcacttcgacgtggataccgacgaactggtgctggtcaaggacatcgaactgtattcggtgtgcgagcatcacctgctgccgttccacggcgtggcccatgtgggctatattcccgccaaggacggggtgatggggctgagcaagctcgcccgactggtcgaggtgtatgctcgccggccgcaggtgcaggagcgtttgacccagcagatcgccgacgcgctggtcgagtatgcgggcgcacgtggtgtgattgtggtgaccgaatgcgagcacctgtgcatgtctatgcgcggcatcaagaagtcttccgcccgcacggtgacctctgcggtgcgcggcatgctgcgcaatccggccacccgagccgaagccatgagcctcattttggataaatagtgtctactaagctccctcatcatagggagctcacttgggacctacatagaaggggaaacataatgactgatttgcaggcgttgcatgacactacgcacaccatggtgatgggtgtgctcaacatcaccgaggattcgttctcggacggcggcctgtggctggacccggccaaggcggcacagcacgggcgcgacatgatggccgccggcgcggacatcatcgacatcggcgccgaatccacgcgccccggcgccaagcgcgtgtccgaggccgacgaattggtccgcatcaccggtgccgtcaagacattgattccggccggtgccatattgtccatcgacaccacgcgcgcatccgtggccgccgctgcgctgagcgagggcgcccagatcatcaacgacgtctccggtggcacgctggatgccgaactgccgcacgtggtcgccgaccacgactgcctgtacatcgtgcagcattggcgcggttggctcgccggctccaagggcgcgaaccccgatcaagacacctccgtctacgagcacggtgtattgaccgacgtacacgacgaactcatgcgccaagtcgacggtgtgctggccgccggcgtaaagcctgagcgcattatcatcgacccgggcctgggcttctccaagcccggcatcgagcacaacctgccgctgctgaccggactcgagaccttccgagccaccggatatccggtgctgatcggccagtcccgcaaacgcttcatttcggcgatgcttaccgaggcgggcgctgccggtgctgatgggccgatcatggcccagcgcgatgacgtgaccgcagccttgtccgccctgtccgccgaacatggcgcatgggccgtgcgcgtacacgacgtggccaaaagccgcgccgccgtcatcgccggcaacacctggcgcgaatacgcatgattcccctggctccctgttttggttgcttctaggccttggctcccctcggacgaggggagctggcgccgaaggcgactgaggggagcatttgagcagaaagccttaccaatggacaccatcacacttaccggcgtacatgccaacggcacccacggtgtgctcgcctttgaacacgaacggccacaaaccttcgtcgtggacgtcaccctgcaccttgatctggccgccgccggtcaatccgacgatctcaacgacaccatcgattacggccgtgtggccaaggatatcgcggctgtcatcgaaggccctcatgtggacctgatcgagcgtctggcccaacgtatcgcggataagatccttgccgatgcgccggccgtcgcctccatcgacgtcaccgtgcacaagcctcatgcgcccatcgtcgtggcttttgcagatgtatcggtctccatctcgcgcgtgcgtgccaccgataatggacgtactgctgaagagcatgccatccataacgcggtggtggccttgggcggcaatgtgggcgaggtggaatccaccttgcgagccgccgttcgggagattgacgcgttgcctggcacacaggtgaccggtatctcaccgctttaccgcacggccgcgtggggcatggccgacggtacgccggatttcctgaacgccgtggtggagcttgaaaccacaatgggcagccacgaattgcttgccgcgttgcaaaacatcgaagcgaaccatggacgaattcgtgagaatcattgggattccaggccgttggacttggacattatcgactttgatggcatcaccagcgcggatccggatctggcattgccccatccgcgtgcttggcagcgtgcgtttgtgctggctccttggttggcattgaatccgaacgccaaactcgccggagcccatgaggggcctgtagccgatttgctggccgccgcaccggaccgtaacgccgtgcagctcgagagcgaagactggatgctcggcgggcatgcagtcaagcaaaaatcagcgtcggagtcggcacccgtctcacgcaaggcgattatttcgctggattccacctcgcaggatgccgaacggctgttccgcgaaaccatcgtttccatcgacagtgttcctggcaatcaggtacagggcatctcgccgctctaccatgtcagccatttcgacggcccggacgcgatgagcgcggtcatccaaatcgaaaccaagttgccgcccgccgacctgattgccgtattgggcagcatcgaaagtgttcatgatctggcagtcgaccttgaccttgtcgacatggaaggcgtgacttccgacgagcccaactgcagcattccttggccgtcggcccgtaaccatgcgtcggtattggcaccttggctggatatggacccgaatgcttctctgggcggcgacccggtggccttccttttggccatggcaccggatgccggacaggtcggattgctatcggacaactggatactgtcgaacagttgagctgatggcagaaccagttacgaacggtaggctagaaaccagacggtgacggaccagtctccggcttcgaacagccgggcacggcagtgacgaaaaccaaatcaagatgaacagcccaagcgcgagggccgttcgcaaacagcaaacagcaacgcaacgataaggaggccggacatgaaaacacggcgaacaccatggtggcagtatgtgatcggtgccgtgctgggcctgttggcgggtatcggtctggcctcctacggcgaaagctcgggactgtcgctgattggtgcgccttggattgtgaccggattgctggccgtgctgggcgttatcgtgctgatcttggccctgcaagtgcataaatacgcgaataccgaccccaagaagcgtccgcatagcttcatcaatcccactatcgcggtgtatacgctggtgctgtctaaggcactgggattggcgggcgcaacgctcgccggctggtatggcggtcagattgtgatgagcctgagccatatcgaggcggatttctatgcacacgccgtcaccgagtgcgcaatcgtggccgtggtgtgcatcgccgacatgatcatcggcattatcggcgaatggttgtgccagctaccgccgaacgaaggccccgaaaacccgaaaatcaaggaagccaagcgccgtagcgacatagcccaggcctacaaaagataatccgtgataagccccctctgacgagggggccgtaggcgtagccgactgggggagagaagaagaaaaaaccacaccatcggccaagccgattcccgctattcctgcggcacgcgaaccatagcttcctgagcgatggccgccaccaagtcgccattctgcgcatacactttggcgatgccgagtccgcgcccgtgcgcggcgataggcgtatcctgcacatacaaatgccattcgttgatatcgatatcctgataccaccacatcgaatggtcgatggacgcataggaaatgcccggtgtggaaatcgacagtccggcgcggcgcagcaccggctccatcatcacctgatcgcagccgagtgccagcatcgcacgatgcatgacctgcggcacatcgacgtggccatcggccttcatccacaccatctgcttgccggaatcatgctcggcggaatccttgtctg

SEQ ID NO: 2440 - DNA, 10513 bp, Unknown
  R50_10m  MAG No. k141_13719
caacccccccccatcgacggcggcggccgtggcgaccggtacgatcatgccgacgaccagcgcgacagccgtcgccaaccgcgttaaacgtgtgaccataccagaactccgcacatactgacggttcatcgcttcgcgcgaaccatcgtgagatagtgaccgcaagggatgcgcttgtttgaatgcgtgccgaagcacacgtccctaaacgcgaaaacgtaaccctttattcaacaaatgttatcatttgtatcatatgtcggcatatctttgtgccgggatatggaaccggtatacggccgcgcctccggccgcgcgcgtatacgaatacttcgcgccgctttccgcctctatcaggaacagttacctgaataaaccggacagttggctccatagcgacggcttgcgcagcaaatcatcaccctcgccctcgccaggcgcggtttggttcaccgcataggtgtaggcgcgtttggaactgggcttgcccaccagttcgccaaactccagcaattgcgtacgcggctcgtaagggtgacggatatcaaattcgatcaatcgcgtggcacgtttggacggagccggtccgtacgtattgaatccgcaggttggcgtagcgataagcaacagaccctcatgttcgccgacgaaaccgttgcgatgatcatgaccagctacgacgccgaaatacccctcgcgcagcgcctcaaactcgtccgactcatccgggcaggaaatgccttcccccagatacccgccggcttgagtgcgatcctcgtccagcacataataggtatccgcatgcttgcggtagccctgcatggcgaaagccgcattggcggccaccggtttgagtacctggtaatactccggcagcggcatgtgctggaacaccattgatttggctccgatatgttcgggcaaagccttgaggaaggccaatgtctcgggcgaaggcgtgccgaaaccgcctccatgcgcatagtcaccggaattcaccagtaccagtcccagtacgttgcgcgtgcaatccacatccatcaccggcaatgcaaaagtgccgggaatggtggacgcggaaatcggcgcatcggtttcttcaccattggttgccgcaggcgagccgtccttatgacacatatatacggtctgcttggccagcgcatcgctcggcggattgatgcaaccgggaaactcgcggtagattccgtcgagttcggcattgctcaaaccgcactggaaatcgtggttgccgtaggtcaccgcccacggtatgccccgtgacgccaaaggagaggtaaattgaccgatggccttgcgcaccaattcacgcgtatggttcaacgcagattcaggaatcgcctcttcgcaccaacggcgtttgcggaagctcttggcaaaggccggatcgtagccggcgatctggttgccggagaaaatcaccagatcaggccgtgtggcatcaaggctggcctcaatcagggcgatggtgtctttggagactttcggcccatcctgaatgtcggcaatctgcagcacgcggaacttgccggaatagtggaattgcagtcgtccgagacgcgcagagatagagaccgggcggccgtcttcggcatcggccggcttgatacggggtttcgacgacatcccctctggcgtacgctgtgtttccgtcatgccctccactgtacacacaaacgaaaaggcccgccggagcgggccttttctacaagttcaactactggagcagaatctctgcacaacatcatcgtcgtaacggtaagtctttccaatgcccgtccaacgtaacagtcctcgtgaccatacactatttgtgggctctgctctgttcagttgttcttgtacctcataatctattcatcactcccgtttctcgcaacctgcagggagtcgttgtgcgttttttatcacaactgttcaatcgcactttctggctatcggaaaacgagctgaaccgttcacatcgaacccgtctgatgttcggtttcgttcgtttcaccgccgctcacggcgtgtcgcaagcacgctagcacactcagaaccaaccaacaccgaactaacatgaacacccgttgaattctggcgcgttcagccgttttccggccacgccagagcttacgatataaactatggcacagatatttgacgcaccctcgaaggcaattctgcgcagccaaatcgcagagcatattgccgaaaacgacaacaacgaccgccgcgtcgatcaggaaggcgaggcaccgctgcccaaggaccgtttcttcgaccgcgagctcagctggctcaagttcaaccagcgcgtgctcgaatgcgcggagaacgaagacatgcccctgctcgagcgcgccaacttcgccgcgatcttcgcctcgaaccttgacgagttcttcatggtccgcgtcgccggcctgaagcgtcgtatcgactcgggcatcgccgtgccgtctgccgccggcctgagcccgcgtcagcagctgcgcgcgatcagcgagaccgcacaccgtctgcaagacgagcacgcacattacgcgatcgacaccattctgccggaattggagaaggagcgcatcgtcctgctgacgtgggacaagctcacctcctccgagcaggagcgtctctcgcgctactaccgccagcaggtgttcccggtcctgacgccgctcgccgtggatccggcccacccgttcccctacatttccggcggttccatcaacctggccgtgattgtggagaacccggcctccggcaagtcgcacttcgcccgtgtcaagatcccgggcaacctgccgcgcctggtgccggtggacgacatgaccgatgaggagtccaaggacgagcgctacggcttcatcgccatggaaaagctcatcgccgcgcatctggaatccttgttcccgggcatgatcatcaaggaggcccgctccttccgcgtgactcgtaacgaggacatcgacgtggaagaggatgacgccgagaacctgctcaacgccatggagaaggagctgctgcgccgccgcttcggaccgccgatccgcctggagatcacggacaccacgagcccgttcctctcccagctgctcgccgaccagctcggcgtaagccaggacgaggtataccgtctgcccagcccactggacctgaccgtgctctttgagctcggcagcgtggaccgcccggacctgaagaaccgtccgttcgtgccgaccacgaaccgtcagatcgccgaggtcgagtcctcccgcgcacaggatattttcgccgccatccgcgagcgcgacatcctgctgcatcacccctatgactccttctccacttccgtgcaggccttccttgcgcaggccgccgcggacccgaaggtgctggccatcaagcagaccctgtaccgcaccagctccaactcgccgatcatcgacgccctgatcgacgccgctcatgccggcaagcaggtgctggctttggtggaaatcaaggctcgtttcgacgaggacgccaacatcgcgtgggcccgcaagctcgaacgcgccggcgtgcacgtggtgtacggcatcgtgggcttgaagacccactgcaagctcatcgaagtcgtgcgtcaggaagcggacggtctacgccgctactgccacgtaggcaccggtaactacaacccgaagaccgcgcgactgtacaccgatctgggtctgctgacctgcgacccggtggtcggccaggatctgactcgtctgttcaaccagctctccggttacgcgccaaagtccagcttccaccgtctgctggtggccccgcgcaccgtgcgcaccggtctaatccagcgcatccgccgcgaggaggacgccgcccgcgccggcaaggaggcctggatcaagatcaaggtcaactccatcgtggacgagaagaccatcgacgccctgtaccgtgcctctcaggccggcgtgaagatcgacatcgtggagcgcggcatctgcgctctgaagcccggcgttcccggtctgtccgagaacatccgcgtacgttcgattctcggccgcttcctggagcactcccgcatctacgccttctgcaatgcggacggcccgcagatcggcgagggtccggcttccggcccggaggtctacatcggttcggctgacctcatgcaccgtaaccttgaccgccgtgtggaggctctggtgcgtgtcaccgccccggagcagattgacgggctcatcaagtacgtggacctgcagatggccgactccaccatgagctggcacatgcagcccgacggcacgtatgtgctgcacaccaaggacgacgagggccgcccgctggtcgacagtcaggaatatctgattcgcaagcaccagcgccgccccaattcgcacaactgatttcactcgatgctccctgtcaacgcaagctgactgagggtggttacgatgcccggctcctctttcgagaggatgccgggcatcgttgttcagcgcgcaaaactacgtagcagcggtccaacgtgacctacaatacaagagatgggtacgaacagtatgagacgaatcgtggaagccgccggcggtattctgtaccggtggaaggatgatgccgagccgacgcaggcatcgtctccatcagcgaaatccaatattgccaccgatggcaccatcatcgcgaacaccacggattctgacggcaaggccacggcagcacacggcgcatcggacgcggctcccaccccggacccggcgcaggccgacagcccggccgcgacggacaacgtactcaaccgcatcgaactgtgcgtcgtgcatcgcccgaaatacgacgactggagctggccgaaaggcaaggtcgacccgaacgaatcgcaccggcatgccgccgtacgcgagatcggcgaggaatcgggcctgtccgtggaacttggcccctatctgggcgacatcgagtacccgctgtccgaagaaggcagcaaacagcgccataccaaggatcggtcggcggataccaagcatatccagttctggatggccacgccgatcagcgccatcgacaacctgcggcgtacccatgcgtttggcccggtgcatcgggcggacatcggcgaaatcgacgaagttttgtggctgacgccggccgaggcccgcaagaagctcagccattccaccgataaggacatcctcgcgctattcgttgatcgggtcgaagaaggtgcactggacgcggtgccggtgattatcgtgcgccacggcaaagcggaagcgcgcaagctgtggaaggggtcggacgcgaaccgtccgatcacgccgcgcggcgcggctgcggcatacgcgctgaaccgcgagctggcgtgtttcaatccgacccgactggccacgtcgccttgggtgcgctgccaggagacgttggagatgttcgcgtggcagaccggacgagacatggttcatctcgatccgctcaccgaagatgcatacgccgctgcgccggacaccgcatgggagtgtctactcagcgaaatcgagttcgcacttgagcgccgtcagcccatagcgatatgcatgcaccggccggtgattggtggtatgttcggacacctgcgcagcatgtgcgttgcgccgtctctgagcaaacgcctgatcgccaagacaccgttcatgccgaccggcacggcggtggcgctgttcgtcactccgacgcctcatggtcccaaaatcatcgatattcagaaggttcaaccgcttgtctactagacccgcatttcctgattcatccaactcctcggccgctgccgccgcggctcatgccgcgcacaatggtgccgccggcagtctgggcccgggcttcggctcgttgcgtgcggccggagcggcattcggacctgctcgcatgggttcttcacgcccctcgcgcccggctcagctcgacccggctgtggccgatggattggccggtggcatggacccgcaggcgttgagcgagatgagtcatctgtctgctgccgcattgctggatcgtgtgcgccatagcgaagacccggcggttgttgagcgggtgctcacgttggtggagacggtcggcgtggatgaaatcgccgaactatggagcgatgccgagccggattcgctgcctggtgtgctgtggcgactgtatatgttgcgtacgtggatgcgatcgaatcgcgactcgatcgcgcatctgtggcgcttgggtgagccggtggccactaccgcctccgccatcgccggcgtggatcaggctcccagtgaagatgacatcgtgcgattggccgattcgattctctccggtgcttttgtgggcgattttgccgtggcgcttgagcgtgcggcggcgtttaccgatgtggtggcgttgggcttgcgcgtggaggcgcggcgcatggtgacccgggccgaggccaacggcgccttctcctcggatgccgatgaaaaggcggtgcgcaccaaagccgcccgccttatgcacaccgccggcagcctcatggccaccgccaaggatttccagcacggtgccaacctctggcgtcgcggacggttggagtagccctgctccaggctccctctgatgagggagctgtcacgggcgatgcccgtgactgagggagagacccaccaaccgcaccccaacaatcagctaccagccaacaccacacctcccccggcgcggcgagccccatcgcaagctatactaagtatccgcgtcggaccgtgcttaagccccgggctccattttttgccgccgcgagcggcccttgcgccgacaggcgctttcgcggttcggcgcttcttttcttttacccgattcacgccccgaacgttgcgatgggcacgaccagtatgccgtcattgcggcgataggccttcccacctcggccggtaaggaacatcatgaactctggttcgcgaacttggaccatggggttgccacagattttgtcgcggaaggatttgagcttatccgcattgtcatcgttcaccttaaggtcactgagttttatttcgatagcaccccacctgccgtcagacaactcgataatgacatcaacttcaagccccttgtcatcgcggtagtaggcgatgcgattgttcgcgcccggcatggccgacagatatacattcaaatcacgaatgcacagcgtttcaaacagatcgccgagcgtctgtgtatcgcgcatcagagtattcggcgcggcacctaaaaccgcagcaggcaacgaaggatccacgaaatatcgcttgggcttggttcgcacacgactctttgcgcggagtggcggctcccaaccctccaaatccgtcagaaggtacaagtccttgagcattcccaaatagctctttactgtctgcgtatccggttcacggcgctcatcgccataggccatatccgcagccagcgtcgcatattttggtgcctgcgatacgttcacggcgagcgcacgcatgagtgcacgcgcggtttcagggttcttgttcatcttgggcacgctgatatcaagcacactcttgatatattcactcggaatttccagagcaaactcgtcatccaaatcaagatttgcgggccacccacctcgacagcaccatctggcaatatcttcaatgttggttgcacattcggcaggctcgaattgtccatcaaacaaaccagacaagctcactacaccggtagattgccctgactcgcacagactcataggccacatacgcaagcgagaaattcgacctgtgccactgtggtgaattgtttctcggtccttcggaatggccgagcccgtaagaatcagctgccccttgcgattcgcattgtcatccacatgacgacgagcggcatcccaaatttgcggcacatcttgccactcatccaccaaatgcggttcattacccatgagtaccaatgccggatcagtctgtgcggccgcaaaggtagcggcatcatccagacgatccatacttcgcgagcgggaaagcgccgtccatgtctttccacaccattttggcccgacgatttccaccgcgccgaatgctttaagtaacttacctaacctgccatcgaccacgcgagcacgataatcaggttgagtcaaggtatcactacgattgttcaaatcgttcattttccggcctttctcagctacccaatcgcctcaatatagattttacacctttctcattcccgattttacactatttccattcccggttttacaccattccgattcccggttttacaccgcaaggtgtctagtttcttcccatgacttaatccaccgagaatcaatccaacgaatcttcgcgcacgactgcgagcgctaggccaaacttgacccattccgatgagacatatttcacaataccgtagctttttcagctggtttccagaaaccgttgacttactgtccggttcggcctagatacgctctttttcgaatctcatgaaatcaacgtcaacaccttggggaaactctcatgaaggcaaccatcaccaaagcgactatcgcagttctcgccggactcgcgatcctcgccgatgcctttctgcttttttcgatgaagatatccaatagacgccacgtgaatgtcattgccatagtgacggatgcacgcgcacgatgcgagcgtcgagccgctccacgatgtcgtggtgatgcgtggagaacagtacagtcttgccggcatcagtgaaggcgcgcaatacctcaaccactacgtcagtattgcgctcgtccaagccgtcggtcggttcgtccagaacaagcaggtccggattcatcgacatgcagcaggcaatcgccacacgctttttttcaccgccagacagacggtatggcgcccgctcccgcatccgatccaagccgaacaacgtcaccatgtcatcgactctgcgctgtacttcggcatccggcaaccccatctgcaacggaccgaacgcaatctcctcttccaccgacgggcagaacagctgggtgtcggagctttggaacacgaatccgatgcgctgatgcagcgctttggcgaacaggctgttcttcgcctcgacttcctcgcgaaccaccggagtaccgccaaaccgatactcgcctgagtccggaaattccagcgcattgatgatgcgcatcagcgtggtcttgccgctgccgttcggcccgagcagcgccacgcgctcaccgcgttcgacggtcagcgaaaaatcacgtagcacggcgtgcgacgaggtttcatcgtcggcgtcgccgtaatctttataggaaaagccgatgtgattcagttcgaccagcgggtcgccgcggaaccatgagttatctggctgcatggctgcagtttgtttatgattacgctttaatccgaacattattgggctccattcattcgaaccaccctcatcccgaatacaccgccagcgcaatcattgcagcaatgcacacggcatacaccccgttgcgccacgtcagcagacgctcgtggtggatatgatacgtaccgtcaaacccccggcacaccatcgattcagccatttgccgcgcctgcgtattcgcacgcagaaacagcgcgcccatcaactggccggcggacgtcagcttggtccggtcgcggcccacgctgcgcaaccgcagcgcatccagcaactccaccatcgaacgaccgagaatatcgatgaactgaatcgtcacgtcgcagatataaatcaccgaatcagggtagccaactgcgcgcagtccggcaatcaggcgattccacggcaccgtacgcgccagtgcgatcaccagcgacaccgccacgaacgcacgcaccaccagccggaccggcgcactgtactgcccaatcagcaggctcggcaccgccacgaccaggctcaggatgcatacggccagcactgggccgagcaacgccctcatcaggcgcgccggccgggtcgccatcatcagcagcaccaccgccagcatgatgtacgagaacagcatgttgcatgtgatgttgacgcagacaatcgtggccagtatgcccagcagccgcacgcccggattgaccgagcccagcaccttgtcgaccgggctcgactcaatcggcaacgcatgaccaacctgctcgagtacgctgccgaaatgccccaggttgtgttcgatgaaggatgacttgtcagccggaggatcgtaatcctccgactcacgcatccatgcaggtatcgtcaacgcgcggatgtcttgccgttgccgctcaccgcgagcgccagcagacggaacacgatagtgagcacggcgatgccaatcactgcggagagaatgtagccggcgatgtccggcagaccctgcagcgagtagtcaggcaacagcgcatcccacgagaagccatgggcgatgtactgcggcacgtagttgagccccgtggcactcatgaagtcctcggcgccccactcgccccaggcgtcgccggtggcgagcaggccgatcggggaaagcaccgccaccacggccagcgcaatccacgcagacttgcgcagtccggcg

SEQ ID NO: 2441 - DNA, 2517 bp, Unknown
  R50_10m  MAG No. k141_13947
gtgccgatgccgcccagtccgatgatgcccatgcgacggccggcgagttgcagtccatcgccgccggcccacgcccagttgccggccttgacatccttatcgagttggccaacgcggcggatgagctcgaacagaagggcgaaggtgtgctcggccacggcgtgatcgccataatgttcggcgttgcagacgcggatcttcagctcgcgcgccttatcgagattgatgtagctggcgacgccggtaccgcagaacacgatgcacttgacgtgcccctgctcgctgatggtgcgcagcagatcatccgaaatgtggtagccgcccaccagcagggcgtcggcatccttcagacgctcggctatggtcgcctcgtcggacgtgaattcctcgaacatacgcacgcgggcaacgtcgtggagcgcggggaactgggccttgatgggctcgatcatcgcgtcgagcacggacggcatcacgacgaggggcagatcggtgcgttcgctttgggtttcgtaaatctcggtcatgggctccacattaggaggccgacgggaaaagcgtcaccttgcggcttcccctccttgagaccaagccgagcaactattgctttgccgcctgctcctgcgtgatgttccattccttgacgacgttctggtccgcgcccatcgaatagatgacatcccagatgcgttggcgtatctgagcgtcgtaggcttcgtcccaacatgtgcctatgggatggtcgctggatatcgggcaccattggtagttgccttgatgcacgttggcggtgggcacccagtcgatgcggttgacgcgccacgaccccttgacgcccttcttgccggcgaactggatgcgtgcggtcacaccctggttgttgaccaaggtttccggcgtgttcgccgactcggtgacggcgttgcccagaccgtagataatccacgtgccgttatagttctcgatgggctgcgcacaatggcagccggcaccgtagataacgtcgaaggcaccagtgtcggcaagctcatgggcttccgaaatctgccaggaatcggcgtaatcaaggtattcctgcaccgagtgcatggcgatggccaccacatcggcaccttgctcgcgggccttgttggccttgtctaccgcgcgctggatgtcgctgccgtgattcgggtcgccgtcttcgcgcagacgatccacctgccagtcctcgtcggcggtcatgccgttgagggagaccgtgccggtgaccagacccagcttgccgccgccggtcggggaatcgatgactaacggtttggtggagtcggcttcggttttgtacgagccggtctgggcgatgccatcggcctcaagcgtgtcccacagacgggcgatgccatccgccccctgatcccaggaatggttggtggcgtgtgtgcaggcgttgtatcccacgttgcgggcggcatccgccacttccggcggaatgttgaagatcgggtacgcggcatatgggccgccgcgctgggcgatcggggtttcgaattcgcacacggcgatgtccgaagcctgaatgtactgcttcatcggcgcgaacagcgggtcgaagttgaaggcggtgccatccgtggcgttggggttcgggccttggaaatggctccacaatccctcatggaacaacaaatcgccgttgaccagcatggcgatgcagtccgtatccgggcaatccggtgaattgccgtgatgttcggtcaccggtttgggcgtgttcttcgctttattcaacgcgacgtccgacactccggcgcgtgcggggccattgccgtccgtgcgatgggttgcgaaccatgcgccgatgcccagcgtaacggcgagcgcgatcacgaacacgataatcagcgccgcacggttggttcgtgtcgagttggagcgatgttgcccctgcccagcgatatggctcatctttgcccacccttcggaactcttcttctctctctaggataccgcccatctcagtcaaacactgcggggaggaaggcgatgggcaagcgattggacaagcggcataaaccggttaatcttcaatcaccattcacgaacaccacgcaaaagtctcacttagtggacattcttctttcgtttgttagcctttccccgaggtgccgcactcgttcacccgctaaaatggcggtttggaggcggacggacaatggcgtacctccgactccgcttaccacaagcggagaccgaccgtcctcggttatttcggttatttctagcgacacattcccaggaaagtttcgcaaaacagacccccaagcaacccactagaaacacattcccaggaatgcgtcgcaaaacagatatccggacaacccaccagaaccgtattcccggggttcgaatccctcggactccgagaagtgcgaccaggcccatcatcaggagtttccggaaaacaaaaaagttccgagctttcacccggaaccttaatcggcggagtcagagggattcgaaccctcgagccgtttacac

SEQ ID NO: 2442 - DNA, 4782 bp, Unknown
  R50_10m  MAG No. k141_14075
cgttgattgccgaatgagcaactgtgactgagtttaactgattttgctcatttgcgcaaatcgataattcaaaaatgcaagctaattacattgcagaaaggcaagaaccacgaaaactcatgcacgaatgagtgtttacggctatgacaggcgctgtattcacctatgggagccaagccttcagacctgtttccggtgcgagcgctagacttgggggcagtatcccgttatgccgcaaggagtgtatatgctgctgtccgatcgcgatattctcgccgcacagtccgcaggtcatatctcacttgatccgtggacccccgaaatggtgcagcccgcttccatcgacgtgcgattggatcggtacttccgtttgttcaataaccacgcctacacctatgtcgatccggcggaaaaccagggcgcgctcaccgaacagttcgaggtggatcccgacgaaccgtggattttgcaccccggcgagttcgcactgggttccacgtgggaatacgtcaagttggacccgtccattgccgcccgtctggaaggcaagagctcactgggtcgattgggtattctgacccattcgactgcgggcttcattgaccccggtttcgaggggcatattacgcttgagctgtctaatgtgtcgacgctgccggtcaaactatggcctggcatgaagatcggccagatgtgcttcttccagctgagctcgcccgctgagcacccttatggctccaagggcaccggctcgcattatcagggccagcggggtccgacgccgagccgttcctacgagaatttctaccgcgcgcacatcgacgactgagcgttgcgacgtaccattcggccggcggatgccggccatttgcttaatcccaaggagatgtcatgaccaacagcgatggtgggttccagttcgacttccagcagcacgaaaagccggtcaagccaacggttcctccgattcccgggcaagagacggcagcatatggcgcgcagccagcgacgcaagccacaccggctctgcagttcccgcaatctgtgcaggcagcacagccgacgcagtttgcacagcccacacagcccatcgatccggccatgacgcaaccgttctcgccgcaattcccggctgcggttgccgcacaagcaccacagccggcggcagccacgcagccagtagtatccgaaacaccaatcgccgctgcgcccggccagcagcaatacgtttgggatcagacgacgcaaagcttccgcccggtggaaccgacagcgccggtgacgccagccgcaccagcggcaccggcgacatcgcctgtttcggtagcttcaaacgccgcgacacaggcgttccaccccaatcaggccgagcagcctgcggtagatgccgaggcaacacaagcattccggcctaattcagctgcggccacacaggcatacggcgcatcatccaccgtatccggtgagaccgttgccatgccggcaacgcaagtagcgtctgccgatgatgctgcagccacacaggtgttccaaccggccgccctggctgcttcggcacaggctcagcctgctgtgatgcctccctccattccgttgaatcaggtctccgatgaggacgattccgatggcgccgagcctcgtcacggcggtagcggcaaaaagaacacccgcaaaatcgtcggcattgccgtagcagtagtcgccgtgatagcgctggttgtcgccggcctgctctggtggcattccaacagcagcaaggcgagccaagccgtggcactggccgagtgcaaggtagcggccaagcagtacacgaatgcgcagaagaagctcaccaccgccatatccaatggccaaaccagcgcgcaaacatccaccagcgatgtggccgatgccaatacgctcaccacgctgaatcaggcgttgcaagacgccgacaatccgaccgacaccgccaagtgcgattccagcctcaacgccactgagctgaagtctcacactaaagagctgcagaatgatgccagcgacatggctgacaagacggatgccatcaacaatgcgatcaaggccgttaatacttcaaaggcgacggccgataccgacacactgaaatcgaacctgagctcggctatttcgcaggcgcagggcacactggatagttccgcgggcagtgtggccgatgagaacacccgcaccgcgctgcaaaacgccatcaccgaggccaatacggtgatgaacgggaccagtccgtccgaatccgacgtcaacaatgcgatttctagactgcagaaggccgagtccgacgtcaccgcctcgatacaggccaagcagcaggcagatgccgccaagcaagctcaggaagaggctcggcagaaggccgaccaagaggcacagcagaaggccaagcagcaggcacagcagaagtctcaagacgggtccacctctactgacggccccgacggcagcaacaactgaggtctgcagcgttctcccgtttcccatggggcggtaacttccccatggggcggttagcgcattttcctttttcgcggaataacgccgttttcagcgaccgccccatgggatagttaccgccccatgaggagccgtttggatatagcagtgggccgggcccagaacaccagagcccggcccacagcaatattcccacaaacagggctattgcgatggcttaacgcttggctatcgcgcgtagcacaatcttgcgtagctcggaggcaatcagcacgattgcggccaggcagatgcattccacccaagccatcgggctcaatgccacggtgccgaacggaccgttaaggaacggcacgtaaatcaccacgagctgcagcgccacggacaaaccaatcgcaccccatagccacttgttggagaacagacccacgaatgcggactgcagatgcgaacgggaggccagcgcgttgaacagctgggcaaacaccagaatcgtgaagcccatcgtacgggcctcggtcatctgcgcttcatggccgatggcatccaccgagcggtcggtgaacaagccgccggataggtgcatgtccataccaatcagcgtgacgatggccataatgacgccgacgaagatgatgtcgccccacatggaggcgtcaatcacgcggtccgtcaccttacgcggtttacgacccatcacatcgtcggtctgcgggtccacgcccatagccaacgccggcgcggcatcggtcagcaggttgatccacagcaactgtgtggcgagcagcggcacggtgacgcccacggtttccggctggcggatgccgaggaagccagcaaacaccacaccgaggaacacggtgaacacctcacccacattggaactcagcaggtagcgcaggaacttgcggatgttgtcgaagatcacgcgaccctcgcgtacggcggccacaatggtggagaagttgtcgtccgccagaatcatcttggcgctctgcttggtcacttcggtgccggtgatgcccatggccacgccgatgtccgcggacttgactgccggggcgtcgttcacaccgtcgccggtcatggccacgatgttgccttgacgctgcaaggattcgacgatcttgagcttgtgctcgggggccacgcgcgcgtacacggacacttcggacgtggccttgtcgagtgcggcctcatcgggcagctggtcgagctggtcgccggtcagggccttgccgtccttggcgatgatgccaaggtcggaggcgatgcgggcggcggtcagcgggtggtcgccggtgatcatcaccgtgcggataccggcacgatgggcctcggtcacggagtcgcgcacctcagtacgcggcggatcgataatgccgaccatgccattccagatgagatcggtttcgatggcttcggcctgatcggcgatgtcggacacctggcctgcggcgttgacgcttacaccgggcacatcagccaaagaactggtttccagcggacggcaggcctcgccaagcgtacggtaggcctcggaggagagacgttcgacggtggcgagaatcgactggcgatcgccttcggtgagcttacggacctgaccacccacgcggatgcgcgtgcagtagctcaacagcacgtcgggcgcgcccttggcgaacacggtgagcttgtctgaatcggtgctgtccttggcgatgatggacatgcgcttgcgttcggaggtgaacggaatctcgccaacgcgcgtgtatcgcgtgatcttgcgatcggccttgaccttgcgtgcggccacgatcagcgagacttcggtggggtcgcccacgatctcccagcggccgttctcctcgcgtagttcgccgtcgttcgcgagcgtgccggccacaagcgtggcgacgacttcatcggccacaatctgggcctgctcggattcaggactgacgccaccggtcataaccatgcggccttccggcgcgtaaccggtgccggtgatctgcactgcgccggacggggtgaccacgcgctccacggtcatctcgttgcgggtcagcgtaccggtcttatccgagcagatcacggaagcggagcccaaggtctccaccgaatgcagtttcttgacgatggcgttgtgcgcggccatacgctgcacaccaagcgccagcaccacggtcaggatggcggccaagccttccggcacggcggccacagccagcgagacggccaacagcaaggaatcaatcacgtcatggacgtcgtcgaagccttccagcacggcgagcgccaccagcaccacgacagcgatga

SEQ ID NO: 2443 - DNA, 4107 bp, Unknown
  R50_10m  MAG No. k141_14162
gaagagctgaattatgacaccaattactgagtcccaatatcaaattgataccaaagatactcgagatttgctcaatcgggaagcgcaagaattagtggatttcggcaagcgcttcgcgtggccgggcggtggtgcctcatatctcgatgatgaaggcaatccggttccgtcggaaggcctatatgcatatgagtcgggacgatatgctcatgcctacacgcttgggcttctagccggatatgtgcctgaagatgaggctttgccgttaattaagcaggcgttggacggattcactactgggctgttacttgaccgcgaacacgggggctggtatacccgcgttggaaaagaaggaaccccggatcccaataaaggatgttatgcccatgcctttgtgattttgggtgcggcttcagcaagtcttgtgcatattccggaatccagagcattgctagataaggcgttgaaagtatatgatcgctatttctgggatgaacagtatggcatgccgagagatacttgggatacctcttttactcattgcgagcagtatcgtggcattaattcctccatgcactcggtggaggctttcctcgcagcaagcgatgctttggaagagcctaaatataggttgcgtgctggccgaatgattcagcgaacagtcggttttgcatcagactgtaactggcacatccccgaacactttactgaagagtggaaacctgtatacgaatacaatgctgagaaaaaagatgatcaatttaagccatatgggaccactccaggtcatagcttggaatggggaagactgattacacaatgggccgtaagctcctatgatcatggggaaatcgacgagtcgactcgtgatcgatatattgaggcggcggaaaatctgtttgccgtagcggtcgaaaccgggtggaacgtagatggtcaaattggcttagtgtacaccgttgactgggagggccgaccggtagtgcatgatcgtatgcactggactctggctgaaggcattgataccgcttcggtgctgtaccggattaccgggaaatcgatatatgccgagtggtatgcgcgtttttggcaatacgttgatgaatatatgattgaccatcaacgtggcagttggttccatcagcttgatgccaacaatcaagtgattggcacagtatggccggggaagcctgatatttaccatgcgcttcaagctacgctcattccgtgcgtggcaaaagatcgaattggtctgtctattgcgaaggcgctaacagactaattatacaagggggcgccgcgctgcgtggttgcggtacggtgccttcatcatgcacaggggcattactatcggaggaggtaactgtggctacgaacggtgacgtgattttggagatgcgtcatatcgtgaagcgtttcggcccggtcaccgcgttgaacgatgtgaatatcatggtcaagaggggccagatgttctcgatctgcggtgagaatggtgcgggcaagtcgactttgatgaacgtgttgtcgggtgtgtacccgtatggcacgtacgagggcgacatcgtgtacaacggcgagacgtgcaagttcaggacgattcgcgattccgaggagaagggcatcgtgatcatccaccaggagcttgcgctggtgccgtacatgtcgatccaggagaacatcttcctgggcaatcagaagaggaagggcatcgcgatcgatgccgacgagcagcgccgcgtcgcgtacgacgtgatgaggaaggtcggtctggacgagaacccggacaccctgatctcgaacatcggtgtcggcaagcagcagctggtcgagatcgcgaaggctttgaccaagaacgtgaagctgctgatcctggacgagccgaccgccgcgttgaacgacgaggattcgaggaacctgctcgacctgatcgacgggcttcgccgcgagcagggcatcaccgcgatcatcatttcgcacaagctcaacgagatcgcctactcggcggacgcggtgcaggtcatccgcgatggccgcaccatcagccatatcgacatcgacgcggcccacccgctggaccaggatgtgctgatccgcgacatggtgggccgtccgttgaccaaccgctacccggtgcacacctccaggatcggcaaggagatgttccgcatcgaggactggaggatgcgccacccgctcgacgaggcgcgtctggtctccaaggacgtgagcatcaacgtgcgtgccggcgagatcgtcggtctggccggccttatcggcgcgggccgcaccgagaccgcgatgagcgtgttcggccgccagtacggcaccaacgcgtccggcaggatcttcgtggaaggcaaggaagtcaagttcccgaccgtgcgttccgccatcgaccacggcgtggcctacgcgaccgaggaccgcaaggtgtacggcctgaacctcatgaagacgattcgcgagaacacgtccctggccagtctgaaggaactgtcgaacaggctgggcgtggtggacgagacccgtgagaagcggacggccgagaagtaccgcaaggagttccgcaccaaggcgccgaccatcgagatgcctgccggcaacctgtcgggcggcaaccagcagaaggtcgtgctggccaagtggatggccaccgacccgaaggtcctgatcctggacgagccgacccgaggcatcgacgtgggcgcgaagtacgacatctacgagatcatcgaccaattggccgactcgggttccgcggtggtcgtgatcagctccgaactgcccgagctgctgggcatctgcgaccgcatctacacgatgagcaacggcgtgatcaccggcaacttcgacgccaggaagaccagccaggaggagctcatgcgctgcatgacctccgccgtcccgctgcccaaggagcgggccttcgcctgacccgttcgttgaagaacgttagtttttgaaaggatagtttccgaaatgtctaccgcaaccgtaacccccgcagccaagaagggcggggacgaacagagcctgaaggccctgctgttgggcaacatgcgttcctacggcatctacctggccctcgtgctggtgatcgtcgtcttccagatcctgacgggcgggcgcctgctgaacccgaacaacgtggtcgccctgttccagcagaacgcgtacgtgctcgtggccgccatcggcatgctgatgatcatcatcgccacgcacatcgatctgtccgtgggctccgtggtcgcgttcatcggcggcgtgggcgccctggccatgaagcacggggtcccgtggtgggccgcgatcctcctgatgatcgcgatcggcctggccatcggcgcgtggcacggcttctgggtcgcctacgtcggcgtgcccggcttcgtgaccaccctgggtggcatgctcatcttccgaggcctggcgaccgtggtcgccggcgagtccatcccggtgtccaacgcctcgttccgcgccatctccaaggactacatccccaccatcttcgtcgggccgttcgccctgaccgccctgatcgtcggtctggccgccatcgcgctcgtggtctggagccaattgtccaagcgcgccagggccgtcaggaacggcctgcccgcccagcccatgagcttcgtcgtcctcaagtgcgtggtcgccgcgctggccattggctacgtgacctacctgctggccatgtccggcaacgccacccagggcggcatcccgatcgtgctcgtcatcatcggcgtgctcgtgtgcgtctactacttcgtcctcaaccgcatggtcttcggccgcaacgtgtacgccgtgggcggcaaccgcaaggccgccatcctctcgggcatcgacaccaggaaggtcgacttcgagatcttcctgaacatgggcttcctggtctccatcgcctcgatcatcaccctgtcccgcctggcctccgcctccgcgcagaccggcatggagttcgagatggacgccatcgcggcctgcttcatcggcggcacggccgtcaccggcggcatcggcaccatccccggcgccatggtcggcgccctgatcatgggcgtgctcaaccagggcctgtccatcatgggc

SEQ ID NO: 2444 - DNA, 2615 bp, Unknown
  R50_10m  MAG No. k141_14191
accccggccttcttcgccacatcgcgcatgccgaccatgatcgcaccttccccgtcatcactgttctatcgccgtattctcacgtgcttaccgctaatattacattcatttacatgctctcgaacctgttcgacagtccggtgtgtatatcgcttgacggggacacccctaactttatttccatcatgtgattttcatgatgcccccttgaaatcacattcatggatcacttttgcactgcagtcgataccgcatcgatggaagatacatcatgcacaacatcttgcaaaacatcacaattacgtacaacgaaagaaacggcgcaaagcttgcgatatccacgctcactttgcgccgtcttcttgtattgatgatggcctacattgcgatcattgcgatcagtcggtcggaacgtcaccagactgcgtgtggtcaaagaccggcttgttgtctttgtcaaaggtgtagacgccgatattcgcagaactcggatcattgttcttgttgaacggcccgataccggtctggccctgatactggatatccttgccatccttcagcagggcgaggcaggccttgtaggaatcgcacttctcgccgccgtcagcaccggagacggccgccatgttggcttgaatggtcttgccgtcagcgctgccgcccttctgcgcggcgagggctgcgaggatgatgccgtcgtatgcttcagcgccataggtggtggtgtttttcagatccacaccggtggattcaagacgcttgacgaagtcgtcggacgggttgacgccaggaatggtgcctttcgagccttccagcaggcctgcgtcgagttcgctcgaatagtcggaggtgttgccatccacgaagtacagtttcttggtgtcaaccccggcggaagcgagcgctttgagcaacggcttggtctggtcgaaggcgatgacgagcgtcgcgtcggggttggacgccttgatggcggtggcgattgaggagaagttcgtctcggtcggatcgaaggtgtccttttcgccgtagacgatgtcgacgcccgccgcggaagcggttttgacgactgtgtcgcgcagaccggtgccgtattcgtcgttgaagaccgcgatggcgagcttctgcacgccgtcctgggcgatcagattgcccatgaccgcaccctgcacagtatcaggagcgaccgtgcggaagaagtagtcggacagaccggagaagccggccgaagtggcacccatcgacagcatcggaatgttctgcgaagtaatggacttgtatgtgttcttcaccacggagctggaagcggggccaataatgaacgacggattcttgctcaacaccgactgggcagccgacgtgttctggtcggcatgatccgcatcagacgtatcggcatcaacagtggtgaccttgctgccaagtacgccaccggcgtcattgatgtctttgactgccagcttttcggcggccagttcaggcggtgccagataggccagggatcctgtttccggccacagaccgccaagcacgaacttggtggttttggcaccggaatcggatgcgtcggagctggagcttccggaaccggagccagagccacagccggcgagcgccatgaccgcggcggccactactgcggtgacggtgatggacagctttttcatgcccttcatgtttgtcttcttcatatgaatcaccatttcctctcttggctccgctgattgccgaacccttggtgacgattgccgagataggttgctcgaacatcttgaggtgcactataggctgtgaggaaaccgaacgtgtatgcgtgaagttaaccggagatgaagtatgaaaactgttggaaacacaaggatttgtgtcatttttcaggcatggcggaaccgccggcgggggtattccgccccaccggcggaaacttgattcagagccagaaattccggctcgtagggggtcgcgtaacgtgtacggagaccgacatccgagttctaaggcactctaaagcacacgaaggcgcttcgagcggagaggatgacgggccttatacgctccgctctgcgatttaccggggctacctgccctcttcctggacctcctcttccagattgcccaggtacaaggagacaaccttcggatcgttcatcaaatcacggcccttgccggagtaggcgttgcgaccttggtcgagcacatagccacggtcgcagatctgcaggcaacggcgggcgttctgctcgacaatgaccacggagacgccggccttgttgacctggcgcacgcggatgaaggtttcgtcctgaagcattggcgacaggcccgcggaaggctcgtccagcaggaggactgacggcttcatcatcagggcccgggccatggccaccatctggcgctcgcctccggaaagctggccggcaagctggttcttgcgctgaccgagcttggggaagatggagcatacgtagtcgaaccgctcctcgaacagcttcggcgcctggaaagcgcccatatgcatgttttccgcgatggtcaggctggggaagacgttttcagtctgcggcacgaagccaacgcctcgggacacgagcttgtcggcacgcagattggtgatg

SEQ ID NO: 2445 - DNA, 6578 bp, Unknown
  R50_10m  MAG No. k141_14418
cgatgctcaacatgatcggaggcggtggcgccggttcgatagccactggcatgctgtcgcaggggccagagacgtggaatccggcgctttaccagttggccgtgaacgtgcatgacgtggcggtcaagccgttgacctcggtggttctggcggtggtgttcaccttggagttggcgcgtaattccacgcgcatcgagtccgaccgcgagttgggcgtgaagatcgtggcgggcacgttgttcaaggtcgcgctggtgttcctggcggttcagaacgcgggattgttcctgcgtgcgttcgattcggccacccagttcctcatgcagggcgcttcctcgcaactgtcgttcgatgcgtccggcgagggcggacagttgggagacctgatgcgggaacaggtcgaggatgccggcatgatggggcaggcggccctgttcttcctgctggcgattccgtggctggtctcgcagctcgcggcggtggtgttcaccgtggtgctatacatcaggttcatcgaattgtatgccctgaccgcgttccagtcgttgccgttcgccttgctggtgcatgaggacaccaagccggtgggcgtgggctatttcaaggcctatgcgcgcacgtcgctcaacgcggtgtgcgtgttcgtgtgcctggtgttctatcagcgcatcgtgatcgacgcggtgcgtctgcccgagggcgatgggtcggggatggtgtcgtgggtgacgggcaatttcggcaatctgctgatggcgggcattctgttgtttttcgtgatcgcggtctcccaacgtgtcagccggacgatcgcgggcggcgagtgagcatgacggggattcaaggaggagcttgatggcgttgcagatgcgcgtgtatgcggagatcgccagcgtggaggcgaaggtcatggggggcatgggatggcggcaggtggtcgcctcggcgcgcaggcgtgttcggggaggcggcgaggtcgccgtgttctgcctgctgctggagcagcccgatctgggctcgtacttgttgttcgtggtgtgtctgccgccggcgttgtggggctggtggcgtcccaagggcctgaagccggaacgctatctgggttacatgatccgccagcgcttcggcaggaacatccacacactggagaatctggagccggccaggtggccggcgaaaccgtcgttgagggaacgcgccctccgcaggggcgcgggaaggagcgggcgtggccgttgagagcaaggaacgcgagtatggcaggcgtatgaaaaggaaaggcggcgggtccgccaaggtcgcgcggtcgagcagggagttggtcgcctatgattcgatgctgcccggtggcgtcgcctatctggggcaggaccgttggagcgtgacgctgcgcatcagcgacatcagttatcagatcgcctcgcaggacgtgcagatggatgtggtggagcgttggggacggttcctcaactcggtgggcgagggcatgggcatccaggtcacggtgatgacccggacattggacccggaatcggcaggccaagggctggcgatgggcgtcaagggcgatggcctggatgcgttgcgagaggatttcgaccgtcatgtgcgccgcaagctgtcgggccagtcgagcggcaccgtgtgcgacaagtacctgacgctgacccttgcggagcaggacggccagcgggccgtggccacgctcaaccgagcggccttgcgggccatcgcgcaattgcgttccgtgggcggctgccgaggctccaaactcaaccgcgcggaacggctcaaggtgctgcaccgggtgctgcgccccggcgtgcgtttcacattcgacgaggatgcgttctcccggtcgcgcggcctgtgcacgaaggactgcgtggctccgtatgccatcgacacgggcgaccggcgtcgggtcaagctgtgctcgggcacgcgcgaggtgtggcatcaatgcctgatggtgcgcgatttccccgagtggctttccgaccagctggtcgcctccctgacggacatcaaggcagacatcatcgtgagcgtgcatctgcggccccatgcgaaggccgaggggttgcggctggtgaaccgcaagatcgcggagatggacatgcaggccatcgacgagagacgcaggaaccgccgccagcatctgcccgagaacctactgccgcacgatctggaggaaagcatggggcaggccagcgaattgcgccgtgacctggagcataacggcgaccggctcatggacacgctcatggtcatcgacgtagccgccgacactcccgagcggctggcgcaggtcgtgcgcgaggtggaggccacggtggacggccagtcatgcgtggccgaatccctgacctacatgcaggtcgagggattgaacgcggcgctgcccctgggcaatcccttgccgccgatgagacggaccctgaccacgtccagcgcctcgatactcgttcctttcaccagccaggagctgtgccagccgggtggtgtgttccacggcgtcaacgccaggagcggcaacccgctggtcatcgaccgcaccctgggcatgaacggtaacgggttcatcctgggcaccacgggaagcggcaagagccaggccgccaagaacgagatcacgcagacgttcctgctgcgcgagcaggacgatctgatcgtcatcgaccccgagcatgagttcacgcccctgtgcgacaggctcggcggccagcgcatcgagatcggcgaacgctcctccaatcacatcaacgcgctcgacatcgagtactcggacgattccgagggcgttcccattcggggcaaaagcgcgagcgtgctgaacatggtcgaggcgctgatcggcggcgctgacggcatcgacaaggcccagcgcagcctgatcgaccgcgcggtcacgcaactctaccgcgagcaccatgagaagcccgacaggcccgcgccgaccctggtcgatctgacggaacgcttggacgggctgggagagccggaggccgtggatgcggcacgcacgttggagatctatgccaccggcagtctggatgccttcgcgcatcccacgaacgtggacacctcgaaccggctgctggtctacgatgtgtcgggtctgggcgcggaattgaagaccttcggtctgatggtcgtgctcgatcaggtgtggaaccgcgtcgtgcgcaaccgcgccttggggcggcgcacgtggctgtgggtcgatgagttccacctgctgttctccaacccatatgcggccgagacgttcctgcgcatctacaagcgggcgcgcaaatggggcctgtcacccaccggcatcacccagaacatcgaggaactgttgaccaatccggccgcccggctcatgctcgccaacagcgacttcctgctgttgatgaaccagaatcccaccgatgccgacgccctgtgcgatctgctgaaactctcggacgagcagcgtggcttcttcaccggtgtccagcccggacagggcatggccaagtccggcaccgcgttcatccccttcgacggacgactcgacaccggcagcctgctctaccagctgtacaccaccaaattcgaggaccagcatccatgaacaagccccagcccatcggacgggcaagccaaaccgcgcagccctccggcccagcgccccgaaagctgcgggccggccgacccatcgggcttaagggcgaggacgtcccgccgttctccggcaatgccgctcctgccccgaagatcgagggtcagccgtccaagccggcgttggccagaccaagccggtccgatgggccaagccggatagcgctgcgccatctggcgagagcaacggaggagacctccgctttgctgcaagcgcaaatctcaagcgacgacaccgataaggctgatggcgaagccctcggccattctcccgcttccgttgcctcccgagtcatatcgccgcgaggcaagagccggcggcccggcaaagtccgcgtagctcgtcgtggcaacatgcgtggaggccgttccatcctgactcaaagcgcactccggaaacgcacgggccctgttctagccagagacggccgagcacggcgaacagtccgttccggcgccggttcctcgatgcgagcgacgcaatgggtcgttcggactatggcccgttccatgatggcggccaaggcggcggtcatggccacggtgtcggcggccgccggtctgccgttgctggtcgtcggcgcgatcgtcatgctcatgatcagtctgttgatgtggcttatcccgaccgtggccgtgggcggacaatccacctgccaggccagcgtcgtcgaggtgcccgaacaggccaagccctgggtcgaacgggccgcccagtccagtggattgggcgctgatttcatcgccgctctcatgcgccgcgagtccgggttcgaccccgaggcgtatgccgacgacagcaacggaggcacctggggcctgttgcagctcaaccgcagcgtgtggcgtggcgtgcatcccgaaggcgcggaccagaccccgccccaaggcatcaccgatccaaacgtccacgcccaatacggcggcatatatctcaagaaccggctcgaaggcgtcagacagctcaaagccagccatcccgacgcgcaattcgcccggctatccgacctggaggccttggtcatcgcgcacaacgcgggcgaaggcaacctaatgaaatatcccgacatcccgaacgtcaccaaggaatatctggacgaagtgcggcccgccatcaacgccggcggctcatgctcgaccacggccggagccaccatcggcaacctcagcccgcccctggtcgccgatggcaccagcatcgacatcgacgccagcggcgtgcccgtggcctcgatcaactcgtacagcgtgggccaatgcacctggtgggccgccgcccgacggcaacagatcggcaaaccggtggacccctacatgggccacggctacatgtgggcggccagcgccgagcaacacggataccccaccggcggcaccatccaactgggcgacgtgatgagcttcgagcgaggagtgctgggcgccagcggcgaatacgggcacgtcgccatcgtcgaggaaatccacgaggacggctccatcctcatcagcgaatccggcggcggccaacgccgcgcctgggcacgcctgctgacacgcgagcaagccgagaaccctggcatcacctacatccactgacccacagccctcaccgagaaaggagcggaaagcatgccacgcatcaacccacggctcgatccccacgagctcgcagacctcatggccgcccccgagcactgggacttactcgaccaagttccccggcatccggccgcatggccggatctcgccacatgggccaaactcgcgctcaacgacccctcgacagccggagcaccacccgagccaccgacaggcacaccccgcaaacgaagactccgcgccatccagccgatcctatgggaggaaaagaagcccgaagcggacgaatcggataaatcgggcaattccaccgcctctgattcctcgacaatcgcggaatccgagacccctgaccagaacgcggcatcctcttctgcctccaacatgtcggaggcagaagaaatattcaccggcgattcgacggcggacgaaaccgaggagccacccatcagggtgcgtcggcgcgtcccgtgggcacgcatcctggccctgaccgccttcaccatcctgactggcgtcctggcatcggtgaccatcatcgcagggcaacgccatgcccatgcgcaggccctcgcatcatgcaatcaagcaatccaacaagcaaacaagctatacgaccaatggaacgcagccctggacgacgccaagccactgctggcattgggcgacaccgacgcgaccgataccgaggcactggtctccctacgcaacgtggtagaacatcacgcgacgaacgaaattcctcactgctcaacggatctttccacggcgcatctcgaagagaacgcccacactgcggacgagcgcaacaagcaaacgaagacagccctcgacgaactctcgaaggcggccaccgccgtcgaacaatcgcaacaggaacgtagactcaccgatgccgagacgaagctctccgacgccatcacccaagccgaagacctctaccagcacaccgaagccaacaccgacactaacgttagcgagacacgcgtatcgctcggcgcccaactcgacaccgcccgcaacaccctgcacaccaccaccgacatcactaccctgaacaaagcagcaggcgacctcaatgccctcacccagcggctctccgacgccatcaaacaagcagaagaaacgccatccgcgccagccgagccttccgggacatccaaatcacagtccgcgcccatccagcggcagccatcaaccaacaccactcactcggcgccagcatctcccgtcatccctcagcccacacctcaaccgtctccctcagccccatcgtgggatgtgcccggtgtcgatgcgtcctcatcttttcctgacactttatgagggaagatgacgttgatgtc

SEQ ID NO: 2446 - DNA, 11141 bp, Unknown
  R50_10m  MAG No. k141_14592
atacttgtcttcgatggcatagtcatgccgggccttcttgttctggacgatgagtttctcaccagtctccttgggcatgtctcctcctttcgtgggcaacaactcgtgggtagcagtagcaacgcaacatccgacgatatcacggaccggcatcgaatacgaaacagggttcctcttcaagaggaacccttcaaccgtatatatcggccgaaccaaccggtcagtggacgaaccagtactgacccaaattggtcaaggtgcggtcgtgcatgttccacggaccaccccagttcatttcggagatctggaatgtgccgtcgccatacacggcttcgactacggcaacatggccataggtaccgtcggcaccatcctgaccaggcaggaaggagagcgccgcaccgacctgagggttgtggtccacgcgcaagccgtacgagggggcgttgcgccaccagtcgccgccattgccgagataggacggcgtgccaatgcccatctgcctacggcgttcatacgcccagtacgtgcactggccggcggcataggcgttgccgtaatcaccgttcgacgtgccttggccgccgctgctactgccgccaccgccgggaaccgtcggagtggggggcggcgtcggtgtgggagcgggagtaggagtcaccggagtagacggcgtaccgccctggttaccggtatccacccggttggcggcgtcctgctgttccttctggtactgacgattgtaggaatcgacctgggaagcgatcagtacggtctgggccgcctgcttggcggattgggaatccagactgtcgatcatggaagacagttcgtcacgccttgtttcgccctcctggcgtagcttgtccaaagcgtcacgttcgctttgcgcggtttcggcggcggtctgtgcggaagcggccttctcatcggactgggtcttgagcacagcgatctgcttttcgatggccgccagacgttcgccacggttcttcgacgtgctcagtgaggtcgcggcggaggaagccgcattcgcctcgttgcgggacaacgcgtcccgggactgcatggagttgacgaagtcctgtgtgctggtggcacccgtcaccacgctcatcacgtcggaagcattcgagccgtgcatctcgtcacgggccagctgggccacggcggcgtgcgcgtcatcgtagtccttgccggtctgcttgatccgctcctcgagcgtctccttgtctttctgcgcggcggaaagacgtttggatgcggcgtcggcctcgtcctgagcggtggcggcatcctcgttggcctgcgtgaccttggcctgcgcggcgacaatcttgttgttggtcagatcgtccagctcaagtaccttattcgccaggtcctggctggcaccggccagctgctgcttgagttcggcctcgcgctgtaccgacgcggcgtgctggttctgcgcattgatcaggtcggaataggtgtctgcctgggcaggctgtgccgagctgaacgccagacctcccacacaggctgcggcggccaccagtgccgccagtgcgggcttgatcacacgtacgttcgtcatatgtgaatagtcctttcgctcacttaagccaataccataacatgcgaacctgagaggcttgcacacgatgtcatcacatttctcgcgggtaagccggtcgcgttacgccctcaaataacgccgcaacgagatggttgaagcgatgatggacagcagtatcgcgcccacaaccaggaacggcgatatcaccagtaccgtgagctgattcacataaggaatccaggtaacggatttcgccagccagccggtgacgaacacgttgacgatagccgaaagcatcaggcacgagagcaccgagccgatcagcgaggcgatggtgccctccagaatgaacggcagacgaatcgtccagttcgaggcacccacgtacctcatgatttcggtttcggttcgtctggatgcggcggacatacgaatggtggttccggtcagcaggatggcgaccaccaccatcacgccggcgagcacagccgtaaccgccgtggctcggttgagcacggcgaacaccgggtcgaagatctggcgctggtcggtgacgtcctccacgccctccttgccggagagcacttcggagaccacctgatatttggtggggtccttgagcttgagccagagggagtcctgcatatcgtccgcggtcagcgtacggccttggaattcaccgttcgggtactgcttggtgaaggtgttgtcgtagaaatcctgcttgctgacatagtcgatgttggagaccacgtcgttgagttcatcgcgaatggttttctgcagtgccgtgatctcattggctgagggcgatttgccggaagcacagttcgcggactggctggtgccgtcgggacatagccacaccacgacctcgaccttgtcgtaccagtcgcccttggctttggtgatctgcgcctgagtaagcaccgaagcgccgatgaacaggaatgagatgaaggtgaccagcgtcagcgacagcagcatcgacaggttacgggtgaggttggcccacgtttcggacagaatgaatcgtgctcgcatgatgatcccccttactccttcgcgccctcagcgggttgatcgtcggatgtttggtctgcggcggactgctcgtcggcggactgctcgtcagcaggctgctcggcggcggactgctcgttggccggcggtgcgggcggttccggcggtgcgggcggctccggcggggccggcggctcggcggcggatgacacggacgtatcggcaaccgcggcggtcgcggcggactcgtccttgaacgggtcgaacgcctgggtgctttccagggcggcggcctgctcatccaacggaatgcccttgccccaggtcagcgtgtcttccagcggcgcaaacgtctcgccatagcggccggtgcggccggaatgcacggaattggccaaacgggcgatgccttcagacggctcgtcactgccctcgatggccttggtcgccgccgccagcacatgatgggcggtgtcggacttggcttcgacttcggcatccgggaagaacagggcggaatcgtaggagccatgagcctcgtcacgcacgatcttgccgttgtgcagttcgaccacgcgcttgcgcatcgagttgacgatctcttcgttatgcgtggccatgacgatggtggtgccggtgcggttgatggcgtccagcacttccatgatgcccagcgaagtggtcgggtcgaggttgccggtgggctcgtcggccagcagaatctgcgggtgattcacgtaggcgcgggcgatggccacacgctgctgctcgccaccggagagctcatgcggatagttcttttccttgccggtgagtcccacggtattcagcaccttgggcaccaacgatttgatggtggaccgccgcgtgccgatcacctcaagggcgaacgccacgttctcccatacggttttgttattgagcagcttgtaatcctggaacacgaagcccagcgaacggcggtactgcggcacttgacggttggtgatgcgccgcagatcgttgccggccacgcgaatctcgccgctggtggcctcctcctcgcgcaacagcaggctcaagagcgtggtcttgccggagccggacgcacccacaaggaacacgaaatcaccgcgttcgatatcgaggttgatgtcgtcaagcgccggtcgggtgcctttgggatagatcttggacacattgtccagtgagatcagtgccataatgctgtttactcctcggtttcggcggcgcggcgctgttcatggcgccagcggatgccggcctcgatgaacgcgttgatgtcgccgtcgaacacggcctgagtctggctggtttcgtagccggtgcgcaggtccttgaccatctggtaggggtgcagcacgtaggagcgcatctgatcgccccagctggccttgatgtcgccggcgagctccttcttcttcttggcctcctcctcgtggcgcagcacgagcagtcgggactggagcacggccatggcggaggcacggttctgaatctgcgaacgctcatcctgcatggtcaccacgatgccggtgggaaggtgggtgatgcgcacggccgagtacgtggtgttcacgccctggccgccggggccggaggaacagtaggtgtccacgcggatgtccgtatccggaatgtcgatatggtcggtggcctcgaccagcggcaccacttccacggcggcgaagctggtctggcggcggccctggttgtcgaacggggagatacgtaccagacggtgggtgccgccctccacggacagacggccgtaagcgtagggggcgtccacctggaaggtggcggacttgatgccggcctcttcggcgtaggaggtgtccatgaccttggccttgaagccgttacgctcgcagtagcgcaggtacatgcgcaacagcatctgcgcgaagtcggccgcgtcgacgccgccggcaccggagcggatggtcaccacggcggaacgttcgtcgtattcgccatcgagcagggtctgaatctccatctggtcgagatccttctgaatctcgccgatttcgctttgcgcctcgtccagagagtcctggtcgccctcctcgtggccgagttcaacgagcgtttccacatcgtcgatgcgctgggaggcggagttcagacgcttcagctgcgattccgcggcggacagccggctggtgatcttctgggcgttttccggatcatcccacaggcccggggccgcggcctgcgtttcgagatccttgatatcggccttgagccggtcgacgtccagcgccttggcgatggattcgtatttggcgcgggcttcgccgatcgcctgggtaaagtcaaattctgccatcgtggtttaccttactgttgattctttgagattctttgggaagtcacgtccttgttgacagccttcgcacattcctctggcgttggcgggcattgccgcgccacacacgcatccgcctgcaatccatgctgccagaaggttccgggcctgccttgccgatagccggccgggcgacctcacaaatccctcgcatcagacgtgttcaactgcgggcacgaatatgcgaaggcaacgtcaaagccccgcgtaaatcgccgggatgatcagggagccgagcatggccacagctatgacgacacacaccacacgcacgatggtgcggcggcggttctcacgctgctgtcggccgtcctgatagttactcacgagaccaatagtgtactcaccgcttacgaccgcaggacttgccgccgacgccagccctgccggcgggcccccacggccctttcctttgcgctttcagcgccgccagatggtgtttcatggccaccagcatgatgtgcgaatcctcaaggcccaagtggcgttcgttgtgggcggaatcaagcgcgccctgacgtttggcgtaggcgtcgagcgtgttgtctccgtaaggatgctcgttggtgggtaccgcgccggggtcccactgccggctcatcggcagggtatcgatgatggtgatgcgcccggcacggtagctttccgcgtatccggcgacgttcagcatgaaccagctatgttcgaaggtggcgttatgcgccacgtacggctgctgggtaagccgcgcgagcaggccggcctgggcttggggccattcgtcgaagagtcggtacccggcctcgctgctgcggccgcgtacatcgatgccggtgagtttggcgatgagggcgttgccgagcgccgcgttttccggcggcacgccaaaagcgagacgggactggccgtaggcgtcgccggcggcgtaatagccctgctcataggcgtatgtctcaggttcgccggccgggcgcggactggccatgttcatgaactcgaagccgacgtcgatgatgtagtcacgcgccggatcgatgccggtggtttcgatgtcgatgcccatcaccgcgtccacgtcgcggccgggcagataggcgtcgcgccagtcgggcttgggatggtggccggtagcgttgccagacgaggcggcaccacccggcgaagtcgcgccggagagattggcgcgggccatcgccgcatcgcccgcacgcttctggaagcgctgggccttacgtcgttcggcgcgtgcgtcaagaatcgccgccgtacggtcttggatatcgtccaaggcgactgttgtggggaacttgacatcgctgttttcggcagcagtgtttccggcagatgcgtcaccggtttcaccgctcagattcagcatgccttggtcatcgttcgatgggcggctgccggagtacggcctgagcacggcaacggtggtcctcccccgccgttcgcgactgaccacccataggtgttgctgttcgcccagatgcaacagcgtgttgatgttgtcgttgagccgacgattggcgtaggcgagcgcgcgaggcagacgataggagccgatgaatcgatcgtaatcggtcatgaatgtgctgttgcattgggcgatgattgattccagatgctcgcgtgtggcgtaatcgaccttcaatgcgtcgtggatagcttgtggcgtcagtcccggttggtccaacccgagctgaggctgtgctgcggtttcgccatattgctcaccatctgcagcaagcgccagcaatacgctgatgccatgcatcaggtccagcgaacgcacccagtcccagtcaatggtggtgccgtcggcgtctttgggcatggacgccgcccattggggaatgtctcccttggcggcgtccagccatgtgcggtcgatcatagtgcgaagccgagttcttcggcggcctcggtgggtaccgggtcgtcgcaccaataatcctcgaggttttcggtggtggtcagcgaacggatttcggcgcgatcgatatacagttcgccgctcaaatgatcggtctcgtgctggaagatgcgtgcgggccagccgtgcaacggctcgctgtggtgcttgccgtcttcatcatcccattcggcggtgatgtcgagccaacgcttgcgcacggcctggtatccgtcgaagctcaggcagccttcgtagaacgaggcggttttgtcgctggtgggtttgtagctcggattgatgatcacgtggaaggggaattccgcgatttcgcgcggatcatcctcgtcgtcgcgcacgtggtcttcgaccacggcgagcgcgagccccaagccgatctgggtggcggcgagccccacgccgggcgcctccagcatggtggtgtgcatcgtatcgatgagtttggcgagcgtacgcttggaaagctggccatggtaggccaccgtccgttggcgcaacaccggttcgccggcctgcacgatgggcaggagcttctccttgccgccggttttgataagttgttcgacatcacggttgagttcgaggtcgactttggcgttctttccaaacattgcttttccttagggaagggtgctacagcgcgagttcttcggcgacgatcttggcgaggcgggtgcagacttcgtcggcgtaggcctgggtggcggcttcggccatcacgcgtacgagcggttcggtgccggaggggcgcagcaacacacggccggtgtctcccagcagttcctcctcgcgggccacggcatcctggatgcgcttgttggtggcggcggctttcttgtccacgttcggcacgttgatgagggtctgcggcagctgcgggaagtcggcggcgagctccttcaggctcttgccggacttgacgacctcgttgcacagggtcagtgcggtcagggtgccgtcgccggtggtggcgaattcgcggttgatcacgtggccggactgctcgccgccaagcgagtaatcgcccttgagcatttcctcaagcacgtaacgatcgcccacggcggtttccacggtcttgatgcccatgtctttcagggcgagcttcagaccgaggttgctcatcacggtgaccacgagggtgtcgtggttgagcttgccttcgcgctgcttggcacgggccagaatgcccatgatctggtcgccgttgatcatgttgccgtcttcgtccacggcgaggcaacggtcggcgtcgccgtcgaaggccacgcccatcacggcatcggtggccttgaccatggcctgcagctgctcggggtgggtggaaccggcgttcttgttgatgttgtagccgtccggcgaggcgttgatcacgattacatccgcaccggcacggcgcagggcttcgggagccaccacggaagtggcgccgttggcgcagtcggccacgatcttcaggcccttgagcggcttgggctgggttttgtcatcgttcagcggagcgatggtggccaccagatgatcgatgtacaggttggtggcggtggtctggtcgtggctcacgcggcccacgccggcaccggtcgggcggtcccagtcctggccgagcacggcctcgatgtcgtcttccttctggtcgggcagcttgaagccgccgcgtgcgaagaacttgatgccgttgtcgggcatcgggttgtgggaggcggagatcacggcacccatttcgacgttgagcacggaggtcaggtaggccacgccaggagtggggatgatgccggcatcgatcacgtcgaagccgccggcggccatgcccgcggacagggcggaagccagaaaatcaccggacacacgggtgtcacggcccacgagcgcgcggcggcgtccctcaggctgatcgtcttgggtgccggcgtcgccgagcacacgcacggcggcatcgcccaaatccaacgccagacgtgcggtcaaatccctattggccagtcctcgaacaccatcggttccaaacatcttcggcatatgaagttccactccttgtatcgcgttacccgcaccatcgtagtcgttgtgctccaccctaggacccgactcggcaaaaaacgccacggaatctgctctaggaccagacaatggcattcccgatacccgcaatgtgtgagagaatacaagaatacagtagacctttgggagtttattgagaagaggaagcaccctatggcatcgtcgcatcgccacacgcccgccggaccgtccatgatgccggcaccgccgcgcatagcaccacacgttccggcgccaacgcccgtaccttcgattgcgatgggagtgccagccaatcagccctcgccttccgcatcatccccgcgcgtggccatcactgtggtgtatggcaaacgctccgcgaaactcaatgttccgtcgacacttccggtagctgaactgctgcctgatatcgccaagaaactaggtgtgttcgatccgactctggtgtatgccggctaccgactgacccgtgacgacgaaaccgccatcaataatcccgcttcgctggccgatcaggccatccgagacggtgaacgtctcaaactcgaggtcaacgccttgggcgatcaggatatcgtctacgacgatgtggttgaggcggtggccgattcggtggagcgttctcatcgaccgtggaccagtgccaataccacagtgaccacaatggtggtcagttgtgtgctactgggtgtcggagcgatttgtctggcattggccccactatccatcatcaatgctggcgtagcgggcattaccgcagccgctttactggcgattgccacggtactggcttcgcgccatatgcatcggcaggcactggcactgtcgctagtcgcctcgcttttggccggcgtgaccggatatcatctcatgggttcactgttcaatccctcgttctacgggttcccggccgttggtatcggtgctggtttactgctggccggcggcatttcatgtttgctgcttacagtgaacagactgtacgcgttgattcctgtcattatcggcgcagtactggtgattctcggcattgtgtgtgtaacgatgccgcactggtccactcgcgtatggatcgtggcagtggctctgctcggtctggctgccaatgcgctgccgtggctcagcctgtcttccgcacgattgtctgtggacagccccaccagcgaatcggagattttcgcgctgcccaagaacatcgatatcagcgaagtgcgtaataagtaccgtatcggctccacgctgctgttcgacctgcgcgctgccaccagcgcactgatcgtgttcggcacgcctctggctgtttccagtgcaagcccagcaggcgtggcacttaccttggttctgttcgcagccatgctgcttgattccaggcgcatctatgcacaatcggaaatgctgatcaccgttatcaccgcaggtgccggcatctgcctgtcttgtgccgcatgcacggtgtttcaccccacgtgggcttcggtggtggtgggcttgttctcactgggagcgttgctgtgcgtcatcggcacacagctgtccaagcacgattccatcgccatgacccgtctggctgacgcctcgaacgtaatctgtgtggtggccaccctgccgctcgcctacgtggcattgggattgtgaggaggggccatggcgaataagaaggacctgcaggacgcacaaaactattcgcgggccaggctcattactgccttcacttccggtatgccggatggcaaggagctgactcctaagaaaggcctgacgccggtgatggtcagtatcggcctgaccgccatcatggttctgatcagtgtgttctatggcatcatcagccctggcctgccttcagactggagcaataacaaactcattgtgggcaaagacaccgcatctcgattcatcagcgtcaacggtgtgctgcatccggtaatcaacaccaccagcgcacgtctgctcatcccctcagacgaataccgagttatcaccgtagacgacaacgaacttgaaggtattcccatcggctccagcgtaggcattgtgggcgcaccggatattctgcccaaccggtcgaggctcgtatcgaaattcctggtgagttgtcttgacaccgagcgcgcctcaaccaacaatctcatcaccaatgatgccgtgaccaccccggccaggggccatgtaccgcgaatcattgtcgcacacattgatcggcgtccacaggcatgaggctg

SEQ ID NO: 2447 - DNA, 4718 bp, Unknown
  R50_10m  MAG No. k141_14661
gcgatccataatcgtggagatgatgctcgcgtaagtggacgggcgaccgatttccttggcctccagcgtcttgaccagcgtggcctcggtataacgggccggcggctgggtttcatggccgtccggttcgatgtcgcttgcctcgacctgctggccgacgctcatcggcggcagggaggtgttggattcggaggcgtcacccctgacggccttgacgtccgtcttgccggcggcagcagcctggtccgagccagccccagcgccgggagcggcggctttgggcttgcgcccctcccccgtggccttcataaagccggggaattcgatgacagtgccggacgcttggaacacggcctcgccctcggtggggccggccggcgcagacaggcgcacggtggcggtggagccggtggcgtcagccatctggcaggcgagcgtgcgctgccagatcagcgtgtataggcgcagctggtcgccgggaagtttggaagccagctcatccgggtcgtggaagcgcgagcccgccgggcgaatacactcgtgggcttcctgcgcgccagcggttttggtggcgtactgcttgggctcggcggagaggaacttgtcgccgaaatggtaggagacggcgttgcgggcggcggtgatggcctcctgcgacagcgtcaccgaatcggttcgcatataggtgatgtagccgttctcgtacaggctttgggccgcgcgcatcacgacgcgagcacccatgccgaggcgattgccggcggtctgctgcaaggtcgaggtggtgaacggcggctgcgggcggcggcggtacggcttggtttccatcgacatcacagtgaaatcggcggtcctcagcgcttcagccacggcagtggcaccagcctcatcaagctggcgaacgttcgccgcgaacccgtccggggtcagctggccgtcggcaccgaaatccttggagccggcgagtcgcttgccgccgagcgcgatcatgcgggcggagaattcggcacgctcccccagcgcgtcaggcgcggacagcgtggcgacgatatcccagtacggcgcgcgcctgaacgccatacgttcgcgttcgcgttccacgatcaggcgggtggccacggactgcacgcggccggcggacaggcccgggcccaccttgcgccacagcaccggcgacagctcatagccgtacagacggtcgaggatgcggcgggtctcctgtgcgtcgaccatattgccgtccacgtcgcgcgtgttgttcagggaggcgttgatggcgttcttggtgatctcgtggaacaccatgcgcttgaccggcaccttgggtttcaaggtctgcaccaagtgccacgcgatggcctcaccctcgcgatcctcatcagtcgccagatagagttcgtcggcgttcttcagggccgatttgagttcgctgaccgtacgcttcttgtcgccgtcgacgatgtaatacggcttgaacccgtcgttgacgtccacgccgaacttgccgaacttggccttgtctgccgcgggcacctggctgggctgcgcgaggtcgcggatatgaccgaccgacgccatgacggtgtaccccttgcccaggtagtcaccgatcttgtgggccttggtcggagactccacaatcaccagtttggtagccatacccactccttatgtattgcgcgaaacacacgacgtttctggcgtcataatactcatgaatcatatccaactgccaaattccgccgttgtgccgggcaaattcggccgttcgcacctcatgttttaccgtttgggcggtgccggcggagcgccgatcaggcccagcctgcttaagggcgctgcagtgatctgacgtagggccagcaacagtccgaatgcgagcatggccacacccgtaatgcccacaacagcgctgacattcgccccctgaaccgcccaactggcgctgacattgagtcccggcaccacctgccagatcacataaccgctgtaggcgagcaacagcaggcccccggtaatcaacacgctgccgacgatctgcacactcactgaggagacgcggtggcccggctcgtccatgccggacttgcgtgtaaccgccagagcgagcagggccaatcccgccaccagcaggatggacatcgccacatccgaagggcgatgccattgcccgtatatcacagagacaccgacggtcgccgcccaaaccacgccgatgacgcccgccaaagctcgaaccgcacgaggcacggtaagcagcagaatcaccgcacaggctgcggccagcatcgtgtgtccggaaggcgcggaattagcggcaggcgattcagtgttgatgatgaacggacgcggcaacagacccttgatacgggtgacggccaagcagaccacggcgaacacggcgatttgcccggccaaccaccagcggcgtcgaatcagcgccgtaataatgccgattgcggcaattgtgcagctgacagcgataaccagccaggattgtgcgacggcgttcatcatgccggtggtccaggacggtacatcgttgtgcaggattttccagaccagttcgtcgtacgattgtccgttttcggtaaacacgcacccccaccacacgccgaagccaatagcgatcaggagcagaccgaataccacgcacagtacgcggctggagattcgcgggcgcacggtaagcgggtcaagccgggccaagccacggtcgatatcagatgccccatccgcatcgtccatgcccagcggcctgaaatcccctaaggagcctgatgtggatgccgatgcatctgaaccggagaccgggccgagcgcagccaatgggtcaacaacgttcgacgacgagtcaggctgcgctgcgcctgagccgaccagattgaccgccgcatgcgggtcgcgaattctaggggtctgtgcgtcattcatacgttcgactgtacggccgcgccccggacagggagccgtgctcgtgccagctcacggccaaatccgcacaaatggaaaacctccacgcacccgtcagaggccacttacccttgctgcattcctgccctgggggagttgggtgacatagcgccgcgtggaggctggggataagtctatggagacgtatggaccagcgcagcgacacgaaacgtgcgcgccgggtcgcacggcaggccaaccagcgcattcaggcaatattcatgcagcatcaaggaacgtgcccaattgtaagaattccggaaaaataccggcataaatgcgtgtggttacgctcacgtcaaacgattgttcaaggccaacagttacggtggacaccatggcttcttatactcgtcgtgcacattcgggaggcaatggccccgctctgaggcaaccgcgcaccgcgcaaagcagagccgaccactccgcacaggagggcccctatacgccccaggagagccgttcccgccacgcaagccacaaggcttccaatagccatcgagccccgaacaggaagaaaaagaacacaggaaaaggcaagcaccgtgtactgaaatgggtgctgggcatcttcttctccctgattggactgggcgtgctggccggtatcgcagtattcgcatatctgtacaccaccactgaggtcccgcaacccgaaaagttcgcgttggccgagaaaaccaccgtgtattacgcggacggcaccaccgcgatcggctcctacgcggagcagaatcgttcaatcatttcttgcgaggggctgccggactacatcggcaacgcgattgtggcgtccgaaaaccgtacgttctacacggataaaggtcttgatctgaggggcatcgcccgcgcattcattaataatgtgaccaagggcacgcgccaaggtggttccaccatcacccagcagtatgccgagcggtattacatgggcgaaaccacatcctatgcgggcaaggcgcgcgaggccatcgtggccatcaaaatcgcgcaaaccgagtccaaggacgaggtgctgtgcaattacatgaacaccatctatctgggccgcaactcctacggcatccaggcagcggccaaggcatacttcaataaggacgccaaggatctgacgctgtctgaagcggcgatgatcgccggcattattccgtcaccgtccacgtgggatccggccgataacgccgatatggccaaatcgcgcttcaagcgtgtgctgaacatcatgcaggaggatggttacatcactgccaagcagcacactgatgccaagttcccgcagactgccgcggtggcgcagcaaaacgaatacgcggggccgaacggttatctgctggatatggtgcgccgtgagctggtgcagtccaaggcctttaccaaagaggatttggataccggcggatacaagatcatcaccaccatcgacaagagcaagcaggaccttatgcagtccatcggcgacacccgtctggacgacatgcctgaatccctgcaaatcggcggcatagcgctggacccgaagaccggtgaagtattgtccgtatacgccggttcagattatctgtccaagcagctcaacaatgccgatcaggccgtattcgaaccgggttcgactatgaagccgttcgctttgctgggggccgcgcaatccggcgtcagcttcgatacgttgttcaacggcaattcccaccagcacttcaccggcttggatcaagaggtgaataacgctctggagaacaactggggca

SEQ ID NO: 2448 - DNA, 2518 bp, Unknown
  R50_10m  MAG No. k141_14724
ccgatattgatgatcagtatgcggacaaggatgtggattctgctgctgacgccgacgccgccaaggtctcgcccgccgcgcaggaggacgacctcgacgagtacgccaagtgggcagccgaagccgccgcaaaggcgaccagcggcgagttcccggcctccgcgccggccgcgcccaagccgaagccggccccgcgcaagccgattccgatgcccatgccctcagcgctgaagccgaagaagagctgagcgcacgtaggcatatgtcggatatcagcgggcgggatggatcgaagcccaccatgctcatcatggacaacgaccgcatggccttgatggcattgcagtcgattctggcgaaggccctgccagacttcgaattgttgccgccggtgagcgaaggcagcaaagccattcagctgtgcacggccaccaaacgcccgcctgctgtgctattggccgatatcgcgatgaacgacatcaacggcccggatgtggtgcgtgcaatccgcagggaaaacgcgaccacggcgatactggccattaccgcctcgattgtgggccgacatgccaaagagatggcccgggccggcgcgcaaggcatcatgagcaagaacgatgatgtgcggttgcaggccgtggcgattcgtcaggtacaggccggcaaaacatggggcgatggtggcgacgtgcggttcgagaccgcggccgttgcgtccgcgcgcatcaaggccgagaaggacaaccggctgagcgcgcgtgagatggaggttgcggaactgtggtcccgcggccggaccatgccgcagatcgccgccgaactgtccatcaccgaaaccaccgtgcgcacgcatttgatgcgtgcggccgacaagctcggcgccggcaatctcaaggaacttatcggcgcatggattcgcatgaacctgcactgatgaaggcgccaatgggtgtgtggggatacggtagaagaagcgcaaggcgcataaggggagcggcccggtgaaacgtccgattatcatttcgcggcattcgtcgtatacgtacagtcatgccgacggcaagcaacaccatcaggtcgagattgatatagaactcaagcatccgctggcgatgttcggcccgatcggtgtgcttgcggtggtggccatcgtctatgcggtgaccgggtcgtggctggtcacggcgtcggtggcgctaatagccagtctgctgttggtgttgctcggggtcgcgttgcactggcgcaagcgcatggtggctcaggagagtgaaaatgagcagatggggtcggtattggccgacttgcgccagagcaaccagctggcgattgaattacacgatacgctatccaacgatctgacgtatatctcgaccattgcacggaacaatttggccgcgccagccggcatcgatggtggcgactggcagcgcgtgctggatcgcagccaacgtgcctttgcggaagtgcatggcatcatcgattttttgaccgagcagagcggaatggacgccggcttccgggacgagtccttgccggtcggtggcaccgggacatctgaggtggcgactgcagaatcagggcaggctgattcgccgacgaaagaattcgccctggctcgtgacccggtaggcgccgggagctgtccagcgattgcgaatgaggtggttgacaatgccgtgcccgagaacgccggtggcgatgaccgtacgcaatccacagcgggcatgccgcaatccttcgtcacgcgtgtgaaggcgcagatcaccgataccgaggagtttctggaggcgcagggctatcgggggacggccgcggtcaacggcatcgccatggtcgtggaccccgaggcggcggccgaggcgctgtcgctgatgacggagatcggcacgaatatccgccgccatgcaccggcgggagatgattcctacctgctgttcgtcaccctgtctcccgaatggattgagattcgcgagaccaacgatatccgtgacgatgccgacgcgcagaatggcctgtccgcgcaggagcgctcggggcgagggctggccatacatcgcacccatgtgcaggagttgggcggtgaattgaccacccgttcggatgatggcacgtggatgatctatgtgcgtatcccgtgcgtgcggggctgatggggcagaagctgcgatgtccggcgtccggcgctgattgtgccctgtcctcacaaatgaggacgacgaccgcagccatgtccccataaccgaggattgcgggtgttcggctcggcggcggctccctatggtggcgtccataaggaccaatcccagggagggcaacgatggcaagtgatacggaattatggcggggacctgattacggatggtggctggctgcggacacgtccggtgcggtcggtgccagcctgatcgcgttcgcggtgccgctgatgatgctcgccacgacaggatcctctgccgccgccaccacgacggaaagcatctgcgtggtggtgcagacggtgctgggccttgccggc

SEQ ID NO: 2449 - DNA, 8787 bp, Unknown
  R50_10m  MAG No. k141_15115
acatcgaggacgccatctccgagaagattctgatgggcgatctcgaagacggtcagcgcgtgattgtggatgcggaaggcgagggtatcctcggcgaattcaccttcaagggggagaagttcgaggagccggccgccgccgataagcccgccgaagacggtgccgccaccgatgccgaaacttcgtccgaagccggtgcctccactgatggcgagactccagccgacgccactccggccactgaaccagccgaatccgctcccgccgattccggtgacgctccgcagaagtagtccgtttcgatagcgtagctagcgcataccagcaaagctccccttgacaggggagctgtcagcgaagctgactgaggggtagacctacgcacacataatgtgcacgtttttggtctacccctcagttgcctctggcgatagctcccctgtcaaggggaactactgtttgttgtcgggttattgcagcagggcgagtccggtgtcgatggtctcctcgcgggtaaacagcgtgcggccggcgcgcaccgaacgcaataccgagcagcgctcatacacggcgttgaacacactatcggcgtccagcacaatgaagtttgctggcttgcccgtttccaagccgtacatatcgcgcaggcccaacgtagtggcaccgttgacggtcaggaacttcaacgcatcgtcgatttcttcaaagctcatcatctgtgccaaatgcagcacataatcaagaatgagcatcatattgccattgcccagcgggtaccacgggtcctgcattgaatcctggcccaatgacacattgacacccgcctcagtgagctccttgactcgcgtgatgccacggcgcttggggaaggtatcctgacggccctgcaaatacaggttctcggtgggggcgcaggcgaagttgatatgcgccgccttaagcagcttggtcaggtggaagaagtaggcgttgtccgccgatcccagcgaacaggtgtggctggcggtgaccttcgggccaatgccagccttatatgccaacgccgaaagcagctccacgtaacgggaattcggatcatccgtctcatcgcaatgcacgtcgatgagcttgtcgtatttcgaagccaactcaactaccgtgtgcatggaatgctcgccaaactcacggcactgttcgaaatgggggatgccgcccacgcagtcggcacccatcttgagtccttcctccaccagctcggcccccgattcgccatgcgggccctcgtaggagtacatgccctcctgcgggaagctgacgatctggagagtgaccgtatccttcaattcctccttaagctccagcagcgcctttaatgaggtcaggttcgggtcggtcacatcggcatgggagcgaatgagctgcacgccatgcagcatttctttcttaatgccgattttcgcgcgctgcttgatctcgtcgaccgtcaagtcggacttggtctcactccatcgctggatgccctcaaacaaggttccgctttcattcaccgcaccgggcttgcgggccgtgaatacgtaatcaaggtgcagatgcgtatcgcagaacggtgggcagacaagtttgccgcccagatcgaccacctcaatggccgccagatcaccaccctgagcctcatattgttgcgcgagtccggggccgaatgcggtgaacacgccatccgtgacgagaatgtcctgcaatggcagggtgcttgcagccgtgctgccgggttctccggtggcgatatgtgcgttggtgaacagtgtggtagtcatcgtcgctccttcaactggtgtgttgccgaacggttacgtgaaccgactgcccgcgtaaccaactgaggttattgtcaacagcacgctttgcggtgaggttaaccggaacgaccggtgttccgcgggggaatggacagattgtatgactgtatcgattcgcagtgcgcttcataacacgcagttcaaacgagccgatcctgtggtggaggtcgaaggcaaagacctcgatacgccagtgcgatgggtgtttaccaacgagcgagaggatgtctccagtttcctttcgggcggtgagatgctgattatcgagggtaacgctctgctcgccgccgattggcacggcacgttaggacaatatgtagcaagcctggcacaggctggtgtcgccgctctggtggtcgaactggtggagggtgtggtgcggatgccggacgaactggtgtctgcggccaggctgcatgggttgacgttgattggtctgaaatctcgcgtaccttttgtcgacatctgtcagagtgtcaataccgctatcgtgcacgaacagatgcacttgcaattggaggtggacacaatgtccacttcattacgtgagggattgtcccgtaccggcaatatcgaggctgtggccgaaaccattgcgtcgctgttcggcgaaagcgtcgccattttcgatggtgacggtctgttggccgctcgagcgggtcgtgcgttcgatgccggcaacgaatcgagcgccgtcatcgcccttgaaagtcgctcccggccggtgggagcattggagatcacgcaacgcaccatgactttcgacgccacgatgcgtcgggccatcgccaccatcgtgtctccggtggccgccctctatattgacggcggcgcgcgcatgggcatgatgcatcatctgagtatgggcccggccgacggcgtgcacgtcaatacatttgaggcgcaggaagcgcatgcgatgctcgacgcgctgggttttgccggatcatgcatctatatgccattcgcttttcggttcagatcggtggtggaaggcatcaaccatgtatcgatgatggtcgaacggttcgaagaacggtcgggatgcgccgtctcctgcatgctggaaggtgacttgatggtcggatggtgctccaccaccgattcctcagacggtgcggccgcattcggacgccattgcatggatgcgcttgccgtactggaaggcgacggtgtgtacgtggtgcatggccgagtggcattggacacggtgacgctggtcgacgggttcgcggtattgcgtgacatcgccaatcaggaaccggcatacgggcgaatcgtaagtaccatgtccgcactcgtcgaccgtttcgtcgcatcctctgatatggacaaggcgatgcgcatgctcgtggtgcagaccatcggattcgaggtcgccgcctctccgttgttgctggacacactgtgcgtctgcttcgacaacctcgatagcaaaaccggcgcgtgcgagcaattgggtatcagacggcaaaccctgtacaaccgactggacaaagtgacacaaatggtcggcgtcgactataacgacaaaccgaactggtcgatgctgctattcgccgccaaactcacgaaatcatggcaagaacagcatggtgaataatgcgccagcaccactgggcaacctgtccacttctacgccgaacgggttaatcgacgattcacgtttcagcaaatactcaagggcatagtcgaggctatcgcggcgctggtcgacctgctgcgaaacgaattcccacttgaatcccattcagtcacacgaacagcacatccttgaaaggacggtgacatcatgagttccgcaacgattactacatctgcacgactgatgaatttcacccctcaaactgaagaacaggccatggtcaggaaagtcgcggtatcttccttccttggcaacttcatcgagtggttcgactacgcctcctattcgtacttcgccaccaccatcgccctggtgttcttcccaaccgacaatcacaccgtcgccatgctgcagaccttcggcgtgttcgcgctatccttcatcctgcgtccaatcggcgcactgttctggggtagctacggagataagaaaggccgtaaagccgcattggcccactcgattatgttcatgtccggtgcgagcttcctgattggctgcctgccgtcttactcggtgatcggcgttggcgcgccgattctgcttctgctgctgcgcatggtgcaaggcttctccgcttccggtgaatatgccggtgcggccacattcctcggcgaatatgcacccacctcaaagcgtggcatctactgctcgctgattccggcgtccaccgccatcggtctgctcgctggctccacgctggccacgctgatgaccgccaacatgaactccagcgcgatggtcggttggggatggcgtgtgccgttcctgctggccggcccgctcggcctgattgtgctgtacatccgtaccaagctctccgattcccccgtgtaccagtcaatgaacgatgctcttgagtccaagagcgccgcctccgctgacggccaagtcgtttccaagagcggcatgttcgccccgctcgccgaactcttccacaaccatctcaaggccctgatcatcagcttcggagcctgcgtgctgaatgcggtcggcttctacaccgtgctcacctacctgccgacctatctgtctgacaccgtcggcatggacgccacccagtccggcaccatcaccaccatctgcttggtcgcctacgtgttcatggtgttcggcatgggccacatctccgacaaattcggccgcaagaaggtgctcatcggtgcttgcgtggcgttcatcgtcctcaccgttcctgccttcctcatcctcaacacctcccagttctggcccgtgctgctggttgagctggcaatgtgcgccaccctgaccgccaacgacggtaccctgtccagctacctgaccgagacgttccccacctccgtgcgcttcaccggattcgcgttcagcttcaatctggccaatgccatcttcggtggtacggcctcgttcatcgccactggcctgattgccctaaccggttcatccatcgccccggcctggtacatggtgggtgttgcggccatcgccttggtcgcgatgattctttcccatgaaaacaccgacaaggatctgaatcacatctgatctcctcagctccggctcctttcccgagggagccgggcgcattcattgaccatccaatccaccaccaacccaaaggagtactgcaatgggtagcaaccgccgtatggaccacatgacctggccggaattcaaggaggtgaagactcatcccgtcatcgtgccgatcggttcgaccgaacagcacggccagcatctgcccatcggtaccgacgcggtactcgccacgcgggtcgccgaagatctggcggaacgcatcgacggcaccgtgctgcccaccctgagctacggatacaagtccaagccgctctccggtggcgggccgctgttcccgggtactatcgacatgaacggcgtgacagtgatcacccaaatgcacgacgtgctgagcgaactcatcgccgatggcttcaccaagatcgtcgtcatgaacgcgcattttgaaaacgaggcgttcatcgtcgaggccatcgacctggtcacccgcgaaaccgggggagtggccaccatcgtggaaaccaattggtgggacccggttccgcagtcggttatcgacaaggtgttcgatggattggtgttccccggctgggcattggagcatgcggccgtcaccgaaacttcgttgatgctccactacgcgccggaactggtgcacatggaccgtatggtcgaggaagccggtgccacggcgaaatcctatgtacgctacccggtgcgccaaggtgacgttcccgctcacggcggactcgccaatccggccggctcaagcgccgaacgcggccgcctgattgccgaggcgtgcgtggatgcggtagctgagatctgcgtcgaggaatttgccgagtaatctccccttgccgacgcattcgtagtgacacgggttgcaaaggcctgaccctgatagtatggggtcaggcctttcccatcccaagacgccgctaagaattcacctgagagtcgccttcctaggcatggccgttcaatcgacgatcctagcgtgactggtgtgagcaggaatatgaagaaccggcggtgggccggcaagcgatcggggatcgcttttggtgcagtagcgcttatccttacggctctggtggttccttatgcttgtgcgggaaccacgggagccgttcctttttccggcgataatccatcttccggcacccgtacggtgaccatcgccgacatcactgattttcacgggcatatcgaacgtggtgcggacaacgccaccgccttcaccgtggccgacagccataatcccggcaatatgatcccggtatcgaccggcgatttggtgggaggttccccgtatgagtcggcggtggagaaggaccaacccacgctggacatggccaaagcgtggggattgacgatttcggcggtaggcaaccatgagttcgaccgcggtgtcgccgatttcaacaatcgcatcgctgatcccagcaatggcatcgactggctgtgcgccaacacgtctgccgccagtaagtcgcctgacggactgctgagccatgtacgtgactctacgattcgaacggtgaacggcaagcggatcggtttcgtgggcgcccttactgatgcgctcggctcggtagccactccgcagattacgcgtgatgccgatcttgacgaacgggcggtggacgcgatcaatcgcgtggcccgtgaactcaaacgctccggaaaggtggatgcggtggtggccttgctgcacgccgatgcctcagccgccgccgatattgggcgagatgttgatgtggtatacaccggccacaatcacgcgatcaagcgtggtacgaccgctggtggcgcgcctatttacgaggcgggcagcttcgggcggaatatggccgtgcaggatttgatcatcaccggtgccgggcgtcgcgccacggtgcgagtggccgatgtggacctcggcaatggcaccagccatacggcggttgacggcgtgctgggcgtggaagggcttaatgcgcatccggcgcaagccgcttggatgtctgccggtgctgaggcgaacgatgaggtatcgcgcgctcagcatatttaccaggcggcggcaacatattcgaatcatgccggcaacgcggtgattggcaccttggcctccggcgtgaatttcgacaaacaaggttcggataagcacgggaatacggtcggtgtgctggtggcggacgcgaaccgcgagtcaatcatgaagcatgtgtatgccggaaatcgtttgccggtaatcggattttcgaataatggcagtctgcggactccacggcttgatatgaatggcgatggcaaagtcaccgtgcgcgaggtggatagtctcatggccttgcagttcaaggccgcgcatgagacgctcaccgggcgcgatgtgaagagagtgctcgccgagcaattccaccgtgacgatgggcgactggagcggcgctggctcggcatctcctcgaacgtgacgtatcggtatgccgaatgcggtacgaccggtgggagcggcaatgccgatgccgccgctgataccaacgctgacgctgacgagtgtgctgccgacgaacatgcggcggttcgtatcgtgaacctcgccgttgacggtcgaccgattgcggacgatgacctggtgattatcgcatccaattcatatctgcttcagggcggcgacagttaccccgccttccgtgccggaaccaattacggcgagctgaatatgccatacagccagccgttgcatgaatatctggccgcacatcaagggctcacggcaattgttgcagcaccggtagggactcaggcgtaagacaccaattgctgggtgactgaggaactatggggtggagttatgagtatagggcagaagaaaacggcataaatatgacgaagctcccctcgctgaggggagctgtcgccgtaggcgactgaggggagcttgcggtataaccgtaaactcccctcagtcagccttgctgccggcttcccgcagaggggaacctggcacgagacccgtacttgatggcgttcagccactgctccttggtggccttctcggcttcgagcttggccttcttcttcgggtcggactcggccgcgatcttggcgtcgagctcggcgagctgggcgttgagctgctcctcgaagctggacttgcgggcgtcggcctccgggtcggtctgcttccaagcggcatcctcgatggccttgatctgcttgtcaacggcgtcgagacggttctcgatgcggcgcatatcgtcacgcggcacgtaaccgatctgatcccactcttcctgaatcttggccagctcctggcgggccttcttggcctcggcgtcggtcttcaccggcaccagagcctcggccttgaccagcagagcctccttggcagccagattctccttctcggaggagttgatctgatcgcgatcagcctgacgagcgttgaagaaggtgtcggcggcttcgcggaacttggcccacagctcgtcgtcctcgttacggccagcgcggccggccttcttccaacggtccatcagatcgttgaacttgcgggaagtctcaccccaagcggtggaatccttgagctcattggcctcggcgataatcgcttccttggcttccttggcggctgtacgctcgttgtcgcgagcctgagcccacttgcggcgagcctggttgaaggtggtgcgggcggcggagaagcgcttccacagcgcctcggcctccggcttgtcgatgcgcacggtggtgcgctggtggttctgccactcgtcgaacaggttacggaacttgtcggcg

SEQ ID NO: 2450 - DNA, 12282 bp, Unknown
  R50_10m  MAG No. k141_15166
gagccgcatcattgaaaaacccctgtgattcggcaatacgaatcacagggggctctatggtctgaacatcagatttcgaagagtgtatcggctgcttcggcgatctcgcgcgacgcagtgagcacgataacgcagagcttctggtcaccggtgtgcgccagcttggccagcgcggcgaacacggtcacctcgtcatccgcgttcagccctcgtgtcggctcgtcgaggatcagcacttcggcctcggtgctgattgcacgggcgatggccaccaaacgctgctgcaccaaaggcaacgtgccgacggccacgccgctggtggcctcggagaagccgaccttggccagcagttcgcgggtgatcaccggcttgggcttcaggaagttgcggttggacgcatccatggcgtacagcacgttttgttcggcgtcgagattcggctgcacggcgtgcagctgcggtacgatgcccagacggtggccgcgtagttccacgggctcgagctcaacaatgttggcgctcttgttcatcaccgtgccagacgccggcgtggtcaaaccgctcatcacgcccatcagcgcgcgacgtttggcgtcggcggtgatgcccgaatcggggtcgtcgctgatcagcagcgcgtatgcgtgtccggagtagcagaagaaattcgcgccatcgaggatgttgaccttgcccttgggtccggcgaccgtcaccttgttcagggcaaaggtcgggtaggtcttgagcagaatgtcgtcggaaccgccgcccaccaacacgcgatcgatacgcgaggccagcgtcatggtgggttcggccgctttgccctgaggctccgcatgctcggccaatgcgtctttgtgatcggttttggccagtcggagtgtttcgttgacgcgggcggcattgcgctcggtcacttcggcggatgcgttggccgaagcgatggcgtctgcttcggcctcgctggtctcgtcggttgctccggtttcggcagatgccagtgcgctgtaaataccatcgtcaacagtgccttcgtcatcaacgtcatcgaaggtcacgctgaactgcacggagtcagctggaacggattcgatggcgtcgttcgtctcagtctcagaagtcacttcgtcagccgttgcgtcagtggtcttctcgagttcctgatcgttgttcttgtcgctcatgcctgtgcctccgcatcgtcggttgtggtggtcgtcttattggcctcgccggcatcatgagcggtggcctcagcagcttcatcggtctcagcagcgccagtggtttcggccgtttcaatcgcctcagtctcgctcacggtgccccagtcgccatcggcggcgaacagcttgttcgcgctgaagaacgcaaggcgcagggcggcaagaatcgccaggatcaggattgaacccaggccataccagaccatggtccaaatcaggtccgatgtcaccgggatggtatggccggatgccagagcaggtccgatcggcttggcggcgaacgcgcctccgaccagaccaatcacgtagaagggcagggtgacgatgaacacttccagcatgaattgccatcccaaacgcccgcgagtgacgccggacaccagtgccatgccgatctcgtcgtcacgcttgggcgcccacacgcctgacagcacgaggatgagcaacagcacgccgcccacggcaaccaacgcaatggtgccggtcttcgcgcgcgaggatagcgtatccagcggctccagagaagcgttgtaggattccagcgaaggggaagacacctcgtatcccttggcgggcagcttggacttcttgagggtggataccaaggacttgtatgtagcgggatcaccggtgtcgaacaccacgtccagatccggcaccgcccagccggaggcggtcttgtcgttggactgtgggtcgagtccggccttggcgaaggtctgatagttggtgaagatcgcgttctcgcggttgcgggcggccgtcaccggattggcgacggcggattcggatgtgtacttgtagatgccgcgcaccttgagctcggccgtggtctgggcgtccgaggcggccgccaccttgagcgtatcgcccaccttcaggttgttggcggaggcaaacgcttcagagaccagtgcgccggtggtgttcgggttggaggacttgttgtcgtagctcaggtccttgccgtccacgatttcgaaggtaccgaggtcgctggccttggcggcatcctcggtccagaaggctcgccaaatgagctggccgccggtctcatcatcggaggtcgagcccagcgatccgccgtccagggccttcaaatcaccgctcacgcgggccggcacggtttcggtaaccgtaaagttcaacgagttggtggccgactggacgagcgtggcgtattcggtatatgaggtccacgtcatgtaatgcttggtggaagccgagtccgtagcggagaccttcttccacgtagccgcagtcgggcgaatggccaacgtggccttctgctgatcgtatgcggtggtgtgtgcgttggtatcttcttgaatgatggccagtccggcgactgtgccgaaggtgaccgccaaggtgatgaacgcggtcagggccgtacgtcctttagaacgtgtcagggcccgccaggcgttgctgaggacgaacatgtaattacctctcccgttctcctaagccgaacagatcaatacggctttaactattgttgcgtttagtgaccgttttcttgcgcaatactgttatacccctcaatgaagtctgagaacattctgacagcgatgtggtggtcatgaggggatttgcacccggtatgggataaaccctcggtctatttcggtggcatcggtacactggcatgagatatgcgtggcgtcacgtgtgctccggcatgtctgcgattccggattcgcccggagtccggcatccggaagcgtggccttgcgccgttggataagagtatgagctgagcagattttcgggtaggataagtatgcgattcacttcagggcattcgagccataaggctgtggggcgtaggagaagccgccatgccggtaacgggaaatccaatcgctccgcatctacgaatagcgctgcaaatcagcagacgggtcccgtaaacctgaagactccccagcacgtgggtggcgacggccgttcgctgatcagccgtacaccgatatgggtgcgagtggtggttgtactgctgctgacgttgctggccagcgtcacctgtgtgggcacgctctacgcggcatccgtctcgagaatggccacggatgcgcagcgtgtgctgacatccgccgaaagtctggccaattcggcacttggctgcggcagcgataagagtctgtcggacatctcccaagagttggtcaatgccaccaatgatctcaacgaggagctgaacggcccgcagtgggacttcttccgcgaccattcgcgatttggcagcgacatcaccgctgcccgcgaaatgctggcttccgtggatacgctggtcaacggtccgttcactgatctgctgaacctgtccaaacgattgcagggcttctccctgaagaatggctcggtggacgtcagcgccctgatggatatgccggatatcgtcaagcaggcgcataaggatatctcgcagcagctcaccaagctcaacaaggtgccgactccgagcgtcgccaaggtggccaccgtgctcgaatccgaaaaggctgcgctcaagaccgtggattcgatgctcagcgaatacgatggcctcattaacttgctaccgcaactgcttggcgaggacggcaagcgcacgtatctggtgatggtgcagaacccggccgagctgcgttcggcgggcggcatggtgggcaccatcgccgcaatcacggcagataagggcacgattaccatcggtgatttcgccaccacttctggttgggacattcctgagaagccaatggatgctacggtgctgaaggagcgccaggtatttggcgacacttttgaccagtacccggccaccacgaccatcgaccccgaattccagcgtgtggcacagatgaacaaatacatgtggctgtatcagaaaggcaacgaagacgagaacgtagcgggtgtattgtcattcgatcccgtattcctccaggcattgctgggagccacaggcaaggtcaagctttcggacggccgagtgctggatggcaccaccacggtgccgttcttcgcttcagacctgtacacggattacccggacttcgagcagcagaacaacttcgtttccgaagcggctcaagcaattatgaaccatgtgcttggcaacgcgaatgcttccaccgcatccccgctgttgaaggcaatcagagataccagcgctagcggtcatttcaagctatggatggctgatccggatgagcaggaggcgctgattgccaccggacttatcgacgataaggccagtggcgagttgtctgctgacagtcaggtacctgaaaccggcatctatctttcggagctgcagcaaggcaagcaggattggtatctgaagacctccaccacggtcacaaaaacctgcggcgacgcctcggccagccagaatgccctgtattctggcgtgctggataagcgcatcacgacagccgtgcgtaacacgcagctgggtcagtttacggaagatcagctcggtgacgaatacacggtcaccttcaccatgaagaacacgctgactaaggctaaggccgaatcgttgcctgatttcgttaatggcggctcggagaatccagtgctcggtggcatgctgtaccgcgtggtgcttaccgccccgtacggtggcgaaatcaccgctgtgcaggctgatatagattcatggggtaccaacaccgcgagcctgtatgaccgtcagtacattatgttcaaccagcagtggatcgagcccggaaaagaattgacgattgcctataccgttcgggtcagcagcgatgccacacatccactgaacgtggtaaccacgccggtggtgaatgcggatggcgtcgagacgggctccaacggtaaggtgacggatgagtgcccggccgatacgaacggcgccgatggtgcgaacggcgccgatggtgcgaacggcggcaagaacgacgcgcataagggcgcgtcctccgatccctcggccggcctggacaccttggacaagctgaagagccagatcagctgcccggtcgatctgaagtccctgacgggatccatgtgatgaccatgcccgattccgtttccggcgtcgccgtttccgacgccaccgtttccggcgtcgccggcaggccgcgcgacgtgaactacgatctgctgcgcgtggtggcgatgtgcctggtcatcggcgtccacgtgatcaacaactacatgcccgtcaagatgaccctcgccggcagcgcggaaacggtgcgatccgtgctgttcgcgttgttcatggtctgcaatccgctgttcattatggtgtcgggccggttcaacctgacattcgatgccgaccggccggtgagcacccactcagcgggccgtctgccgggctctggctctgatgcccgggcagtcggcggtgccggccaagccgatcccagcagcctcgcgccgtacgtgcgctactactacaaacgttttatctcgctgattgtgccgtatctgctgtacgcgggcggcatgggattcgtcgcctacctggtgatcgatcatcgttcggttggcggcgctgtgtctggaacgttgttcgatctgttttccgggtatgacgattccgtctattggttcgtgttcatgctcgctggtttcgtgctggcgacgccgtttctggccgcgatgatgcgcgcgataggccggtcgggtgcctggctgctgatcggtctggccgccgccgtggccgccgccgagcagatctgcaatcttgccggatacccgttgacgttcctgcagtcgttcccctggcggggactgctggtctactatctgttgggattcgtgttggaatactatccgccgtccacgcgggcgcggcgcggcttgtatgcgttggcgccgttcgccctgacctggaccgttgccacgccatatctgttcgccggccagcagatgcaggtcggccgcacggtcacggttgcgttcgcgatggtggtggccgcggtgttcctgttcttccggtacgacgtgcatccggcgtcggcgcggctgcgcagggcgatcacctggctggcggggtactcctacacgatctatctggtgcattcgccgctgtccaaggtgctgatcggcccgcggattcccgcgcccacggacggatggtcgtacgcgggcatcagcgtgctgatgttcgcagccacgttgctcgcggcgttggcgttcgcggtggtcgccgacaccgtggtactcaagcccgtgcagcgtctgctgcgcaacgttggcctgccacggaaaggccgcctgtagtagcaggctcgcttcactgcccctgcgcgcggtagcgggcctcggtggcttccttggccggcacccaccagtcgcggtgttccgcataccagtcgatgacgttacgcaatccgctggcgaagtcggtgtgcatcggcgaccagcccagttcggcgcgcagtttggatgcgtcgatcgcgtaccgtctgtcgtgcccgggcctgtcgtgcacgttctcgccggtgctgatgtggtggaagcgcacgtcgtgtttccgggcggcctccagcagccgcatcgtgccttccacattcgtgcggatgaacggttccggattggcgatggaattatcgttgtgcgattccgcggcgaagtggacgatggcgtcgtgaccgggcacgatacgctccaacagcgcgacgtcgcagatgtccccgacgacaagatcgacctgcgacggcggcaggccggcgatgttctccggattgccggcgtacgtcagcttgtcgagcacggtgatgtgcacgtgcggatggctccgcgccacgtatcgcacgaagttcgcgccaatgaagccgcatccgccggtcaccagaatattacgcggctcgaatacgccgccgcacgccatgctgttcaccattccagcataccgtcgcatgccaacggctggggcgcaagagcccggatgcggacgccatcttgcgccatgcgagcttttcgtgcctcttctgtccttggaagctgacgtgttttgattttcatgaatgacgcgataattacgttttcgggatgctccttagccgtattcgctcgtcgttctgcaagacccatcaagaaatgtgcattggttaccggttcgcccatacaggatgaacgtcggcatgtgcgatttggaagatgctagctacgttgattcgttgcagtgacctgcgtctacaatatcttaggattgcgtaaggaaaggctgacattatgaagattgcggttgcagggactggctacgttggattgtctgtcgctttgctgctcgctcagcacaatgaagttcatgcactcgacatcattcccgagaaagtcgagcagttaaacaatgggaaaagtcctattgtcgattctgcaattactgatttcttggaaagaagcactcttggcgaaagaatacttgactttcatgccacgctagatccgcaggaggcatatagagatgctgatttcgcggtgatcgccacgccgacaaactatgacgaaaagaaaaattacttcgatacgtccagtgtcgaagcggcgattacatcggtcagacgatatgcgccgaatgcttggattgtcatcaaatccaccataccggttggatatacgcaacagttacgtaagaaccttcaggatgatcgtattctcttttcccccgaatttttacgtgaaggacacgcgttgtacgacaatctgcatccaagccgcatcgtcgtcggcgccccgcagaatgatactgattctgtcgaagcggcacgtcgattcgcgtccctgctcgttgaaggcgctgatcccgctgagacgtctcgcgttaatcatgatggcagcaccggaattcccacattggtggtgggcgtcaccgaggctgaggccatcaaactatttgccaacacatatctagcgttacgtgtggcgtatttcaatgaactggatacttatgcggaaagccgtggactcaacacgcgtgcaatcatcgatggtgtttgcctcgatccccgcatcggtgacggctataataaccccagcttcggctatggtggatattgcctaccgaaggataccaaacagctgttagccaattacagtcaggttccgcagaacctcatcgaggccatcgtggacgcaaatcgtacccgcaaggaattcgtagcctctgaggtgatggaacttgtcaggaatgttcagaaccctatcatcggtatctaccgattgaccatgaagtccgattccgataatttccgtcagtccgccatccaagacgttatgaagcagttcaaagcgaacggcatccctgtactcatctacgagcccacattgcgcgaatccaatttccatggcagtgaggttacccatgatctcgctgatttcaagacccgctcgtctgccatcgtagccaaccgttggaatgacgatttgctggacgtgagcgacaaggtctacacccgcgatctgtttcgcagggactaattcttccctgtgaaaccatggtcggttgttgacgaggacacgaagcccccgtcaacaaccggtgacttgtctgcctgtctcaccgtttgccctgcgccttgcgcgctatcactttcagcagttctcgttgtttggagccgaccggagctagcacgtccacatacttgcgcatagggctgtcttcggcaattgcgcgttcgtggtgttctggtggggcggggcgttccacgccgctcattgtggcaaccatttgtgccgcgaatggcgtttcacacgcatagctccagtacagcggtgcgaaatcgcaccatggattttcccatggtttatcaaagcccgcgtagtgcacaatttttggtgtattacgtgattgcatatacgccttgtacatggaggcaggtgcgaaatcgaacactccagcaatgcggcctgcacaattgtgcatcacgttccacgaataatccaaatatgtgacaagaccttcacactctacgttaagaatgtcttgatcattgtatatgtatcccggtctggaagcgatttctaaccattcgtgcactgtgtgaatcttgcgcatgcggtcgagattcattaccaatacaccggcttggaagtagccatatgcgtcacgcatgtgcaactgcttatgaacgtattcagcacgctcaccgttcttcatgttgagatttccaataaaatcaatatctggtactgcagcgatagcgttgcttccgagttcggtatcgaatagttcggtgatatcgccattgaccaccaggtcacaatccagatacagcagcttcgagtagaatggcaacgcttcttgaatgatgaaacgataatatgtttcaatgctgatgtgcgcattgctggtagtgagattgaatccggcgagatagcggttcacgtcgaagaaacgaatcagggcattcgagaaccttgcaaagaactgccgcatgtagcgcttgttctcgtcggtgatgtttcgttctagtacgatcacgtcatacatacgattcgtggaagcgttcttcagcattgaatagatggtggtggtgagcatcgggacgtaattgttgtccgcggcgaacaccaccggcaccacacgtccacgctcctgccctaccggttccagtatcgcgttcggctctggatgcagaaaatgcacgcattgcagtcgtttgattttccagtctgcgccggtgcgctgcttgtgtgcgataaagatgttcaaaagccgttcggagagatggccgacggtgcgcgtggtctgcatgtccatcttgctgaagtcggtggtcattgcgaattcgtcaagcaatgggaatagccactcgttgtattcgaagaagatttctttcctcatgatgaacatattgcagaatgctgcggtgcggccgttgagtacggcatcggcatccatcttgtaatcgggatgccgctcgcacagaatgtcgtacatatggcgtaagtcattcagccgcagatgttcgtcggcgtcccaatgctgtttaaggtttgaaaatccgccgatacgacgaacatcgttcaaaggcgtggtgatgatgtcccatccgtccactgcatgtgcaatcgccttgtcattgatgccatattcggcaatcgtgcgactatcaatatatgagtcaatgatttcgccgtaatcgttttccttatgtggggtatccgtgaaatcgaaatacctacgatagtggcagaaaccgtaataatcggcatcttcgttcttccaagcccagtattgcgcggtcagctcgcaatatcgtgggttttcggcagagatgttttcgccttcatcgtcatgcaaggtgttcgggaaacgggtcgtggcgtgagcggcgcctacctgcaccgggagaatgctctcccctttggggaacgtggcccgcttatgcgccgacacgaaaaccttgatgttcggatgatgctgttccgctgtgagaaccatgtgagatattccgccttactaagacaaacgtcctttcctcactagaatatatgagagtactgtcgaaggagagcgcaccaaccgcattgccacatgattttgcgtccaaacgcttcgcactagtaggatggaatgtttgtgaaagatttttttgagagcctcaagaagaggtaccactacgcgatggtggtgttcaaggaactggtgaagaccgatttccagctgcgctaccaaggttcgttcctaggtatggtatggtccgtattgaagccgttgatgctgttcgcggtgatgtatgtggtgttcgtgaaattcctgaagttctccgacggcaccccgaccttcccgatttcgctgctgtgcggcacctgtttgtggagcttcttctccgagtccaccagcatgggtatgcaatccatcgtgggacgcggtgatttgctacgcaaagtgcatttcccaaattacatcatcgtggcctccaccacgatgggttccatgatttcattaggtattaacttatgcgtggtgattttgttcggtttcttcgcccatgcacactacacttggcgcgtgctgctcgtgccgttcagcataatccagttgtactgtctagggctgggcgtggcattgctgctcgcctcgctgtttgtgtacttccgtgatgtggcacatatttgggaggtagtgctgcaagccatgttctatgccacacctatcatctatccgatttcgatggtggctaacaacccagatttctcttgggcggctaaattgcttatgctgaatccttccactcaggtaatcatggatattcgccataacctgctttccccagaatatgtgccgaccgcgtggagcatggtcgataacaaactgctatgcctgctgccgtacgtgctgtccgcgttcattctatggctgggcattcatgtattccgtaaatacagctccaagttcgcggaggtgctctgatcatggctgaaattgcattgactgaaaagacacaggaagaagccaaggacgagcgcccggtggtgctcaaggtcgaccatgtagccaagatgttccgtctgcccaccgagcaggcgaccggcctgaagatggcgttcttaaactggacgaaaggcatcaaaggctacaccaagcagcatgtgctccgtgacatcaatttcgaagtacgccaaggcgattttttcggtattgttggccgtaacggttccggcaagtccacattactgaaaatcatctcccagatctataccccggagcaaggctcggtcaccgtcaaaggcaaactggtgccattcatcgaacttggcgttggcttcaacccggaactgaccggccgtgagaatgtgtacttgaacggcgctctgcttggattcactcgtacgcagattgacgcgatgtacgatgacatcgtggagttcgctgagcttgaggacttcatggaccagaagctcaagaactattcctccggtatgcaggttcgtcttgctttctccgtagccatcaaggcccagggagacattctggtgctcgatgaggtgcttgccgtcggagacgaggcgttccagcgtaaatgcgacaatttcttcgcggaaatcaagaaagatccgaccaagaccgtca

SEQ ID NO: 2451 - DNA, 8734 bp, Unknown
  R50_10m  MAG No. k141_15475
cgttctcccatgagcgccacctccccgccaaaccggtatgacaacacccattttcccgcggtactgacgggcacgcccagccggcgggcgagagaacgactcccagccccgccccggatcaggtcggcgacgacccgcatgaaaccgtcatcgtaatgacgcctgcgatccctacacatgagaaaccgcacctccgatcatcgaatctgaatcacttcagtccaacaatcggggtgcggttcactgacgggtctctttcataagtgcagggcttcatgattggttcgcaccatggtttgcgaatcactcgcatatcacggtgcatggcattcgcatattattcacgcaaaccatcaatggcgctttggaaatcctccagacctgcaaagttctggtacacactcgcgaatcgaaggtacgccaccacatccaagtcacgcaacggtttcaggatggctttgcccacttcatctgaggtgacttcggcaagacctcgggagcgaagatcctcttcgactttctgtcccagcagcttcagatcctcttctctgaccggccgcccctggcaggctttacgtacgccggaaatcactttgtctctgctgaatggctccacgccacccgaacgtttagtgaccagcagcatactggtttccaccgtggtaaaacgcttgttgcatttcgggcatacgcgacgccgacggatggaatgaccgtcatcgctaatgcgcgtatcaataactttggtgtcggggttctggcaaaaagggcaatgcatgctctccagaataacgtgtacgggcggaaaaaccatgccgctcgggtttcatttactcaaccggaacaataatgcgctgcccggcctgcaatgttccggactcgagattgttcagcgtaatcagctcatccactgtttccgatacatcatggccagcaggtgtaatagccgaagcatatgaccagagcgtatcccccggccgcacgatatagctggtcacctgcgtggcacccgtatctgattgggcccgctgagcggtaagcgcgccgaaaccacaccaggccagcgccaaggcgatcatcactgcgataatccgcccacgcacattccggcgggacgttccagcatgctgcatagctacacgtgcgctacgggcaggggccatcaccattgaaccagtcatcacgaccacctctctcgaacagatgttctatcgaacagctgttcttataatggcacaaatgttcgacacggtcaagtcgaaactcgaacagatgtttgatttcacacgaacaacacgttatgctggtgacataacgaaaggagccctgacgtgagcaccattcccctctcccccaagcagaagctggacgagtccaccctgaccgaccgccagcgcaaagtgttggacgccattcgcacgcatatcgacgaacaaggctttgctccctctttccgggagatcggaaatgccgccgggctcaaaagtccgtcttcggtcaagcatcagctacaagttttggaagacaagggcttcattcgcatgaacgcgaacaagggtcgcgccatcgaggtgatggcaggatccgccccgaatgccgaaaagccatcacaagccagcgaagaggcaaccagcgccagcaatgtggcggagatataccgattccccgccgaagccattgccgaatcacatgacgtaccgctcgttggccgtattgccgccggcgtgccgattaccgccgaacagcatgtggacgacgtcatgcgtctgcctgaacggctgaccggctccggcaccctgttcatgctggaagtccacggtgattccatggtggatgccgctatctgcgatggcgactatgtggtggtgcgcgaacagaattccgccgtcaacggagatatcgtcgccgctctgttggatgacgaggccacggtgaagaccttccgcaaggaaaacggccatgtctggctgatgccgcacaaccccgcatactcgcccatcgacggcacacatgccacgattatgggcaaggtggtcaccgtactgcgcaaattatagcctgttcgccaccagctgatcagcgtgcgctgaatcgcgctggtcgtgctatagtcgcacactgcttacgaagccccggcctcgcgccggggtttcgtcgtattcagaccatatcgcaaatggtattgagaagcggtttcaactcgatagagcgaaggagtacatatggcccatacccatacacccgcaccatccacatccgtaaaccctgccgcgcaccagcgcaggctgattgccacgttgaccgtcactggttcggtcttcctcatcgaagtggtgtcggccatcttaaccggctcactggccctgctggtggatgccggtcatatgctcaccgacatgtccgtgctggtggcatccacaatcaccgccatactgatgcgccgcaagcccaacaacactcgtacttggggctgggccaggcttgaggtgctcaccgctgccgcgggcgccgtagtattgcttatcgtcggcatctatgcgttggtagaggccggcatgcgtctgttcggcggctccaaagcggaaatcgacgatatcggcttgctgctgttcgtaggcattctgggtcttgtcgcaaatatcatctcgatcttcatccttgcctcgcagcgcgaagacaacatgaacatgaaggccgcgttcctcgaggtaatgaacgacgcacttggctcggtgtctgtggtggcctctgccctggtaatgatctccaccggatggaatggcttcgacgccgtggccggtgccgtcatcgcactgatgatgattccgcgcgccatcaagctgctgcacaacgcggtcaaggtgctgctggaggaaacaccggatggtcttgatctcgataaggtacgcgagcatctggaagacgtgccgcatgtgcttgccgtgcatgacctccatgccagcacggtgtccaccgacatgccgattcttatggcccacgtggtagtcgacaaagacctcaccatggaagatgccgccacaatcctcacccaactgcaggattgcctgcgcgagcacttcccggtctcggtcccccacaccaccttccagcttgagcccgagggctatagctccccctcctccaacgaattccacgaataaaaaatgctccctctggaagcattcagcagggtataaaaaatcgctgtacgtgtgcgatttttcgtgccgcacaaggtgaaggcctacaaaggtagttcgaaccttgtgcggtgtgaaaggcgctccgtacagcgattttttatcagaagccgaactgggcggcggtttccttcagcgtctcggcggagcgcttcagagcggcgagctccttgtcggagaccggggtgttgatggtgttgttgacgccctgacggttgaggagggtcggcacggacatgcagatgtcggagatgccgtggaagtccttgagcatggagctcacgggcaggatgcggttggtgtcgtgcaggacggcttcgatgatgtcgacgccggacatgccgatggcgtagttggtggcacccttaccgttgatgatcttgtaagcggcgttcttgacttcctggtggatctcctcgcgcttggcggcgtcgagcggatcgtggccgggcagcggggtccagtcgcacatggggacaccaccgatggtggcggactcccacagcgggacttcggagtcgccgtgctcgccggcgatgtaggcgtgcacgttcttgacgttgacgccggtctgctgggcaatcaggaagcgcagacgagcggagtccaggttggtgccggaaccgaagacctggttctcgggcagaccggtgagcttctgagccacgtgggtagcgatgtcgaccgggttggtgatgagcatgtagatggcgttcggagccaccttgaccaagttcggcatgatggccttgaggatgttgacggtagcgccaacgagctcaagacgagactgacccggcttctgacgcggaccagcggtgatgacgaccatgtcggcgtcgcggcagatctcaggatcgtcggaaccgtcgatggacacggtcgggtagaagctggagccgtgctgcatgtcgagcacttcggcttccacgcgctccttggcgatgtcttcaagcacgatctcgcgagcgacgccacgctgggcagcggcgaaggcgagggtggagccaacggcaccggcaccaataacagcaagcttcgtgggcttaacggtagtttccgccatgatggatgaacctctcttcaaaggcggtctgctgatgaatggcaggccttgtaactaacggttttcactctataaacccgctaagacgttttgctaccagcacaccaccctgtctgataacggtatggtaatgtttccaacggttgttagcgctcacaaacaaactgtgatgtttatcacgttagtcaatggactgttcgaccacctgagcggcaagatgggcgtcaacgtccgcttcaagctgtatgccatcatcgcggtactccaccttgtccaccttgccgtattcgcgtacacgagagatcagggagccagcggtatacggcagcagagcgttgacatgcacatgcgggaccggcagcagactttcgaccgcggtacgcagctcgtccaatccctcaccggtataggcggagacgatgaacgcatccggctgcagtgcggcgagtcgttcacgtgtcgcctcgtccgcctgatcggccttgttgaatacgagaatacgcggaatcgaggccgtgccttcgatgtccgccaacacgtcattgaccgcgtcgacctgagagaacgggtcagggtgggagccatcgaccacgtgcaggatcacgtcggcctcggccacctcttccagggtggatttgaacgcctcgatcagctgggtgggcaggcggcgcacgaagccgaccgtgtccacgtaggcgtaagcgcgtccgtcgcgggttttggcgcggcgcacggccgtgtccaatgtggcgaacagcgcgttttccaccagttcggccgaaccggtcagacggttggtcaacgaggatttgccggcgttcgtgtagccgaccacggccactgtgggcaggccgaagcgacggcgtgaaccgcgcttgacctcacgtgccggagccatctcacgaatctgacggcgcagtctggcgatacgcgtgcgaattacacgacggtccatttcgattttggtctcgcccgggcctcgcgatccgatgcccgcatccgcgcctgccgcgcgaccgccggcctgacgggacagcgaaccaccccaaccacgcagtcggggcagcatgtattcgagctgcgccaactccacctgcgccttaccttcacgcgaggtggcgtgctgggcgaagatgtccagaatcaccgcggtgcgatccaccaccttgactttggctgcgtcctccaatgcacggcgctgtgacggcggcaggtcgtcgtccacgataatcgtatcggcttcctcacgcgccacgatgtcggcaatctccttggctttgccggaaccaacgtacgtggctgcatccggcttggagcgatgctgcagcaaaccatcgcataccaccgcaccggcggtttcggcgagcgccgccaactccctcaacgattcctcggccttggcttgcgtggtgacggcggacgaccagacgccgacgagcaccacacgttccagacgcaccttgcggtattcgacttcggtgacgtcctgcagctcgccgagaccggcgacatgcttgagctcgttgcgggcctcgcgctcctcccattcctggttggcgtcctcatgccagccggtcgcgcgctggctgtcgtcgagcagcacttcggactgcccggccagcacaccttcaggggtaacgtcgttgttgccgcggtcgatgtcggtgtactgggtgttgtcggtcaagtgcgcctcgtttggttggaatggttcacgattcttctatggtcctttattatcatcacatgaggtgacatgctggcatagatcggcacgtaccggcataggccggctgatacaggcggcatacgagagcggcgaatcccgcagaaatggagcgaccatggcagaacagtatttctctgcggaacccgcgtcgaaggatgtgcgccgcacattgaacgtaacgttgcgcggccatgaggcgaccgctcaggtgtcgaacggcgtgttctccggctcgcgcgtggacctcggtacgtcggtattgctgaagcatgcgcccgagccgccgcttaccggcgatttcctggatttgggctgcggctggggccctatcgccctgacattggcgtttgagtcgcccgaagcgaacgtgtgggcggtggatgtcaacgagcgcgcgctggacctgacccatgccaacgcacaggcgaacggccgcacgaacattcatgcggctcaggtggacgagtccagcactcccctgcccgccgagaaccagccggcgttctgcgagacggtgccgggcgacctcacgtttgatgcgatttggtcgaatccaccgatccgtgtcggcaaggaagcgctgcatacattgcttatggcttggctgccgaagctcaaggtgggcggcgccgcctatctcgtagtgcagaagaatctcggctccgattcgctgatcccctggctggacgatgcgctcggcgaggggttcactgcgagcaaatacgcgagctccaagggcttccgtatcattgaagtccgtcatgaaatatgagtatcctgcagaacttcccgtatctgccgcgcgtgatgagatagccagcgcggtcaaacgttcccaagtcgttattgtgtccggccagaccggttcgggcaaaaccacacagctgccgaagatcctgcttgagcttggccgtggcacgcacggcaagcagatcgtgcacacccagcctcgccgtatcgccgcgcgcacggtggccgaacgtatcgcctcggagatgggcgtgaagctcggtgacgaggtcggctatcaggtgcgtttcaccgacgaaagctcgcccagcacgcgattgagagtcgtgaccgacggtattctgctcgcccagatccagcgcgatccgaaactcacccaatacgatacgatcatcatcgacgaggcgcatgagcgcagtcttaacatcgactttctgctcggctatctgacggcactgctgcctcagcgccgcgatctgaagctcatcatcacctccgcgaccatcgattcggtcaagttccaggagcatttcgagcacgccttgcatgagaaggtgccggtaatcgaggtttccggccgcaccttccccgtgcaggtggtctacgagccgcttggcaccgcgcccgcgttgatgcgcgaagtgccgggattcgcggtgggcgcccgccccggcgacgccgattacgacgagctggccagcgccatcgcggaatccgattccgaccggccccgcggccggtccggtgcctcctatgccgatgacggcatcaccgatatgcccacggccgtggctcgagcctgcgccgaactggtgatccactcctcccatgagcgcggtccccgcgatattctggtcttcgcttccggcgagcgcgacatccacgagttcgaggccgcactgcggcatcattacggtccgcgcgccgacgacatgcgccgaccggacgccatcgagatcatgccgctgttcgcgcgattgtccgccgccgaccagcacaaggtgttcgaatcgcatttgcatcagcgcatcgtcatcgccaccaatgtggctgagacctcgctgaccgtgcccggtatccgctacgtggtggaccccggttccgcccgtatctcccggtattcgaagaccgcaaaggtccagcgtctgccgatcgagccgatcagccaggccagtgccgaccagaggtccggccgatgcggccgcgtggccgacggcatcgcgatccgcctgtattcgcgtgaggattacgagacccgaccgcgcttcaccgagccggaaatcctgcgtacctcgctgggtgccgtggtgcttcacatgctgtcggtgggcgtggcccgcacggccgaggacgtcacgaacttcgggttcatcgatccgccggatatgaaggccgtgtcggacggtttcaatgagctcaccgagctcaaggccatcggccgaaagcgcggcgaggtgacgctcacccataccggccgtcagctggcgcgcatccccatcgacgtgcgtctgggacgtatggttatcgaggccgcgaaaaccggttcgccgaatcttctggcccaggtgctcgtggtcgtggcgttcctgagcttgcaggacccacgtgaacgcccggacgacaagcgtgaggatgccgaccgtatccacaaccgatatgcggatgagacttccgatttcctgacggccctgaacatctgggatcgcgtgttccaagcggacggcgacccgagcaacaacgcgctgcgccgtatctgcaaaaccgagtatctcagctggctgaggatacgccagtggaaagatctcgtctcccagctacgccagatgtgcaaggagctgaagttcaaggtcggcgacccgttgcccgcctcccgcccaggcttggagattcgccagctgccgttgaatcagcaggccgcgcattcgctgtgctgctcgtgggatgcggatggcatccacaagtcgatgctcgccggattgctgtcgatga

SEQ ID NO: 2452 - DNA, 8647 bp, Unknown
  R50_10m  MAG No. k141_15492
gagaacgggtcaggcaagaccacgctcgtcaagctcatcgccggcatcctcgacgccccggacggcaccgtgaccctgccctcgggcgcggacggcgggaacggtcgtaccttggggtcgtgggccgaacggttgggcgcgtcgagcatggtgttccaggatttcacgcacatcgaggtgaccgtgcgcgagttcatcgatcccgctctgcggcaatcggacgatgagttatgtgacgggttgcgtcgcgcccgcgcgctcgacatcgtggatgggcttcccggcggcttggatacgcagctcggtcaggagtggggcggcgttggcctgtccggcgggcaatggcagcggcttgcgctggcccgcacgttcctgtccggcaagccgttgtggatactcgacgagccgaccgccgcggtcgacgccaccgccgaggccgcaatctaccatgatctgatcgccaaccgtccggcgggcaccactgtgatcgtcatcagccaccggccccgcgtgctaaccggcatggaccggattatcgtcctcgaccacggccacgtcaatgaaaccggcacctaccgtcaactggtcgaccgcaacggcaccttcgcccggctcgcacacgacagcctcgaatgagctcgatggcatatccggttgattgttaaaaactcagtggccggccgacagattcgtccgacgaggctcgcgcgagtgatcataacgcgggtcgcgtcggatatgcgggagatggcacgccttatatcaaaagcgatgattttcaaataaggacacggccccatcagccggtcgcgggtactacagtgaaccacaacgttcctcccccgatggtttggggaaacacagaaagaggttggtcgtcggcctgatcatcattgcgattcgcaccggcttcttccgcaagaagctgggtgccagcgagaaccttcaggagtatttcgcctgaatcgggcttgtcgtccatccgcattccgcctcagctactcatatcgataacttactaacaatccattcattgtcttcttaccagtaaaggaaatcgccatgtccaacttcattcccaacaccgtttccgcagaacgcaagcccgtggacatcgtcaccggcacctatgtggactatgccggcgtgacccgtgccaaatccgttcccgcccgcaggcgtgaagccttcgaacgcaacggattgggcgccgccctggtctgggtggtgttcggcgcggacaactcgttcgccgaaaacgagaaattcaacgtgtccggcgatctgcgcctgcaccttgacacttccgcttctgcattgcgtgccatacgagcgtgaagcggcgtttctctgctcggtgcatgccaacgtatacatggatgtcagccttgccaatacgcatatgggagcgcaggtgagggaagtgctgcgcaatgttctggcgtggtgcgcatttgacaagttgctctatgcgtcggacggcatcggcatcagtgaattgcattatctggccgcggtgctgttccgcaggtatattgcgcgaatcgccatcgactgggtatcggatggcgcatggaacgcgaatcaggcgaaacgggttatcgacgccatcgcgcatgccaacgcggaacggctatacggtttggcgtgaacgggtacttcgccggtgccgtcacttcccgaggaacgccgggatggcttcagccgccgcatagcccttgcgatacatcatttccaggccctcgaagttcttcttcagggtgttgagaccatacaggtcttcgggtgcgaggatcagcactttgccttccgcctcgtaatgcttggcgagttcgagttcgtcgttgtaggtcttgtagcgcatacgcagcttctcggccgcggcggggtgggagcgttcgaggatgcgggccggagccagatccttctgctgcttgcgcacttcgtcacgcaagcgggacagaatcagaatcacgcgatcatagccgtcatccagcgccttctgtaccgggatcggatcggcgatgccgccatcgaaatacggcacgccatccaccacatacggctcgcaggccaccggcacggcggacgaagccttgatgatgtcgaaatcatcgaagcggacgcgtgacttgtcgaaatacttggtcgagccgtcttcggcattgcaggccaccacggtgaatccggtcggattggcctcgaacgccgcgaaatccaccggattctcaccatcgtgattgctcagcgtgccatagatatagtcgagattggcgaagttgcggttcttgaaatagctttccgcgctcgcatactccttgcggaaggcgtatttggtgtagaaggtgtggttgcgtccatgttggcgggcgatgaacgaggtcatattggccgccccggcggacacgccatagcacatgtccacgtcgatgccgtcctccagcatgcggtccataacgccgcagccgaaaatcgcgcggaacccgccgccgacatcaatcattgccgtcttcagtgccatatcagcctcctattcatcatcatgcatccgatcacgcattcagcaggtcgcgtgaaagccgtgtaacacgttcggacagatcggaattggcgagttccacgccgccggtcgcgtcttcgggtgccagtttgcccagggactccaacaccacgcccaggtggcgtacggttccttcgttgccgtcgatgacagcagcccgttcgggcagcagctcgcggaagtagtcgcggtaaaacacgaaatgcgtgcagcccagcaccaccgagtcgatgtgctccatgtcgtactggtcgaagtagccgtgcagcgtgcgcatcaccaggtcatggtcgccgagccgcccggattccacaatctccaccaagtcggggcaaggctccttgaaaatcgtgttgttggaatcgaatcgatccatcagcttggcgaacttccgctcacgcaaagtcaggggagtggccgccacaatcaccctctggggaatatgatgcgggtcggaaggcacgtcaccacggtcgcacgccactttcagggccggctccatgccgatgatcggaatatcgtagtgttcgcgcaaatcgttcaccgcggcggaagtggcggtgttgcatgcgatgaccacggccttgacgccttgacgcacgaaccgttcgacaatatcgaaactcagggccctcacctgctcaggcgtcttgacgccgtacggggcgttggccgaatcgccaaaatacagcacacgctcggccggcatatccttggcgatttggcgagccacggaaataccgccaagacccgaatcgaatacgccgattggagccgaagagctcatgcctgaatcctccctatagccatgcctgcaaccgtatgttgccgcgaccgatcacaaagccgattgttttgcggtgttgtttcgctccctagagtactctgaaagccatgagtcttccgcaacgagtaaccaagacacacgcaaccggcaatgatttcgtggtgtacctcgacaagtccggcaaattcgagcccaccgccgatgaggtccgattcctgtgcgaccgtcacttcggcattggcggtgacggcctgattcgcctgacacggcctgatttcgtgtctgatttaagcgatgatcagctttcggacgtactggccgggggcgcgaaatggttcatggactatcgtaacgcggatggatcgttggcggagatgtgcggcaacggtacgcgcgccatcaccttgttcgctcagcgcgagggcgtggccgactccaccgagccgttccgcctcggcacccgtgccggcgtcaagattctgacgccacgcggcaatatgaggccgtacggagccaacgtgttccaggtcgaaatgggggagtggaagatcggcgaaaccgacgcctacgaggtcaccatccccggcgctgagggctcggcgcgcggcacgttcgtggatatgggcaacccgcacgtggtcgcggtgatcgaggatgccttcgcgtccctgccggtggtcgaggcgctggatctggtcatcaagcccgtggtgagcccgaccatcgaatccgaccagaatgtggaattcgtgcgggtcgacgacatcgatcagaacaccggcgtgggtgaagccacgatgcgcgtcaacgaacgtggctgcggcgaaaccctgtcctgtggcaccggcctgtgcgccacaggcgttgtgctgcgggccaagaccggcatcagccactgggacatcaccgtacgtggcggtaccctgcgcgtggacgtcaccgacagcgacgtgaaactgaccggagcagccacgctggtcgccgatatcgatttgttgtaaaggaatcaggcagcgaacagggacgcgccttcggtgacgatgatgagtaccacgatcgccacgatccacagtatgtcgaccatgaggtcgatgttgaggcggtaatacttattgagtccggccggcaccgccgcgacatcggcctcgctgtcgccatcatcagccgccacagccttacgtgacggcaatccctgcactgccacggtcgcatggctcaacgccatgaactggatggtggtggagaacatcagggtcaggcaccacgggcacagcgcgtgaatcacgaacagcgactgtgtgctcagccagtacgagtaggccaaagcggccagtccgcccagccacgtgcaggtcgcgaaccaacgcggcaccttcacacgcgccaaaccgatcaccgcgatggtaatgaacaccgattcggcggcgatgccgaagaacgcgttcggatagctcagcccgccgaacttcacgatttccgcctgccaggactgggccaccgccgaacaggacaccaccgagttcagatcgcagccgagcgcggactccggatgcctagccaactgcaaagtctcggcggacagaatgagcgaggcccccaatgccactgccgaggcgatcagcatgatgagatatgtccaagtggcactgtggcgccatccaatcaacggtcgcgcctccgccaagccaagcggcgtggtgttcgtggtgctggatgatgtgtcggttgcggtgttacgagtcatcatgcccctttcgatagcgctgcgctccagattagcctctgcggttgtcagctgagtgccggatgtctggtcttggccgttggcagaaggtgacgacctgtctgcgccttgcgtgggaatgctgagatgaggttacgatggaaggtatgactggatatgtgatgcctttggagccgcccgccgtcgggtgggacatccattgccataccgtcttctcggatggcacggaaacgccggccacattggccgaacaatccaaggcattgggattcaagggcgtggccatttccgatcatgacaccaccgccggctggccggaggccgaagccgcatcccatagggtcggtttgccgttgctccgcggcaccgaaatcaccgccacggatgagaacgtctccgtacacatgctcggctaccagtatgatcccacgaatcagcacatcacggacttgttcgccgatactcgagccgcacggttgcaacgcacgcagcgcatggtcgaattgttgtctcgtgattatccgattacctggcaatccgtgctcgcccaagtcaaggagggtgacaaaaccaccattgggcggcctcacatcgctgatgctttggtgagtgccggcgtatatcggactcgttcggaagcgtttgcgaatgcggtcagcgcctcatccaaatactatattcccacgccctcgccgacctctcatgaagtggtggccgccgtcaaaggggcaggcggtgtgattctgatcgcccatgccggtgatgtgagccgtaaccgcagactgctgtccgatgaccagatcgaagcgttgatcagcgagggattggacgggctggaggtatggcaccgaggcaattcaccggagcaacgagaacggctgctcaccatctgccgccggcaccagctactggtcaccggcggatctgactggcatggcaaaggcaaaccgaacaaactgggggagaacctcaccgacgaggccactgtcgaagagatcgttcatcgcggcgtgctcccgttatatcggtgattcgcggcaatacaaagcggccttgagatgatgcccaaggccgcttatgcgcgattcacggtcacagcgtgccgaacccgacggcgtgcttggtttcggagccgatgatcgcgtaaccgagtgccttggcgggcacgatgatgcgacggcccttgtcatcggtcatatcgatcgtcgcgttgtcggccacggcctgcgcgatggcctggctcacattatcggctgattcgtcggtgctgaagttcaccggtcgtgccacgttctgaatgcccagttcgatatccatataaggctccttgttctgccgtctttgtgacgaacatcatggtaagtggccgtcaccggccgaggttctgtactctattgtgccgcgtgtctgcgtcgtcatgtgcggtgttacgcgctcggcgtggcgcggaacaccgcacacgacattatttggatgatgtggatgattcggccagcggattgccctcgctgtcatacccgtccaacccggcacgggcatcgcgcagagcgcgttcttcccgctccaacagcggaatcaccgtggtttgggcactcgaggctccgtgctgaacgaaactatccggagtatcgtcattcaccgcatcgtcggtcggggcggcggattgagatgcaggggaagcgtcggttgacgtcgtgccgctatgcccgttcatactgaggagctccttcagcgtgatcgtcaccgaagaatgggaagcgccatgtgagggctgcggtttggtcgatcccgtaccggttgcggtgccggagacactcgcttgcgggtgattggcggtccggtcagcatcgggttcgacttccggggtaagatccacgtcgccagcggccacgatgtcagcggaaccggtgcgatctggatcgggcgtgtcgtccgagacctcggccgccgcggtaccggtttcggactgctgcggttgtgcgggtacctgcgtggcgggtgcctgatgacggtcgtcctgcaacaatgtgccgacggtgattgtggagggggaaccgggctccgtcgacgcggcggcggccgcccctgcggctggggccggtgccggagtgtgcttgatcacgcccaactggtgtgcgagtcgttcgacctgtgccttgaactgcatgatgcgattgttgtccgcacggttcaacgcctgaatgaattcgcccacctgttccatctgcaaccacaggttggccctgagcatgatgagatcgtcaagtcgagagcccatcatgcggccgtatgcggaaagcacggcgttgcgatgggattcgtcgagcttgccgaaaatccaggcaaggtctcgtgccggatcgttgacctgcatatcctgccagttggtcaccgtggtgatggtggaaccggagaacaggaagtcgccgtcggagaatccgccgtgaaccgtgcaggtggagaacgaccacaatccctcggtgtccatgatgcgcgcccagctgtcggtgatttcttggggaacatggccggcggagcgtaagcggcgaatccaggcggtcagctgcgaacgaatctgaccggtggtgactaccggatatttggcattggccagaaaagtcgaaggcagacgatgaatggctccgatggaggtgccgacggccgcgcagtcatccaatgtcaacaggtcgagaggccgcgcctgaccatcacggtggacggcgatcatcacggtcgtctcgcctgtgggaccgggcttgcgcggggtcagcggtgtggactccgcctgggcctgctgccccacggcctgtgcggtggccgtctggccgggttgggaaacgtctcccgggacgaatgcgaccacacggtccatatcgaagccgaggccaccaagctcgcgcgcggctgccagtgtctgcgccgctttcacacggcggatcagacgtgtacgcccttccttgctgtcagtggcgtatacgtcgtacaacttgcccgaggcatcttggatcacggtctgatcgatgcctttggcctcgtcggttgcgctggcctgcacgttctcgcgtacaccggccacccccagattcggcaggacggctgaggcgagtgccgccaacatataatcgctacgtttcatcacccttccacactaatacatccgtggcgattcgcaccccagaatgacacgcaaaacgcatgattctggcgatgttttgtcgtgagcccgattcagccataggcgtgagtcgtgccgtgagcgcgaatcgtgccacaatggacgcatggaacaggtgcaggggattcttgaggggctcgatgagcggcagcgtaccgccgcgactacgttgcaagggccggtgcgcattatcgccggcgcaggtgccggtaaaacccgcacggtcacacggcggatcgcctatgcctgcgccaccggggcatggaagccggagcgggtgcttgcggccgcgccgaaccgtgaggattacctgaaactggtttccgcccgcgaatccggcccgcgcgttacccgaaccgcgtatgagagcgatatggaaga

SEQ ID NO: 2453 - DNA, 17518 bp, Unknown
  R50_10m  MAG No. k141_15597
acttccataatgttcctttgctgaagtgggatgattcgcttgattcgggcgaacgataacgatggttactggcgattagtggttggcggtgcatcggcatccgtggttgcgacgtcggtttcgacatcgtcatcggtgtcgtcctcggatccctcggcatctgcggtgtcggtatcggtaccgtcaggcgtatccgcggcgtcatcgttctccgcatcctccttgctgggttgacgccaccacaatatcaatgcgttggcggcgcagtagacggcggcaatgccgatgcataccaaaaagatgatgtttgaggtgctgatcatcgtgccatcggccattgcttctttggcggattgccatatccaaatcacgcatgcgacggcggtcagggcgtacagcatcatacgggagcggtcgttcatagaagaatctccagacttgttcaaacgacttgattatagccgtatttgtggattgcgtgggaaacgaaaaatgccgccatgtgtgcttcagcgaggagcgcggtataacagcggctcttcgcgatgcttgccatggcggcattcatcaggaatcgttattcagttgttatctcatggattgtgctggcagcgtatcagccgcgcgccttggcgtatgcctcgtacacggcttcggtgggctcgccggtctccacgccctcgatggtgagttgccaggtcagcggttcggcctcgccggacagcacccaggcggcctgacgggcggcgccgatggccacatattcgtcggtggccggacgggtcacgtccatgccgaggattgagggggccagcgtgcggatggccacggacttcgcgccgccaccaatgagcaggatgcggttgatctcggcgcccagcgagcgaatcagctcgaggcagtcgcgctgggaacacagcaggccttcgacgaacgcacgagccagattctccttggtggtgttgtgcagggtcaggccagtcagcgaggcggtggcgtccggacggttcggcgtacgctcgccgtcgaagtacggcaccagggtgatgccgccggcacccggctcggccttaaaggccagttcggccagctcgtcgtagtccacgccaagggcggcgcgaccggcgtccagaatgcgcgaaccgttgatggtgcaggcaagcggcagataatgaccggtgcagtcggcaaagccagaaatcgctccggtcaggtcgtacaccgggttttcagcgatggccgcggccacgccggaggttccgagcgatacggacacatcgcccacggccatgccgaggcccagcgaggccatggcattgtctccgccgccggggccgatgatgcagccgccttcaacgtccttgccggcaatggcggggtcggccttgacggcggctgcctcacgcgggcccagcacggtgggcagcacaatggcgtcggcgtgggccttggcggcttcctcgccctcggcgggggtcagcaccatggcgatgagatcgcggcggtactcgtcatgcgcggcatcgtagtaaatggtgccggaagcgtcggaacggtcggtgaacagggcttcgagatgagcgtcctcgccctcggccaccgggccatagccggcgatacgccagctcagccaatcgtgcggcagacagacggcggcaatcttcttggcgttctcaggctcgttctcggccacccacgccaccttggtcagcgtgtaggaagcgacgggggaggatccgacggccttgacccagcgctgcttgccgcgggcggtcacgtcgtccggttcgtcgccctcggccggagttgcaccgagcttgtcgatcagggcggcggcctgcggggcggaactggtgtcattccagagcatcgcatcgcgaatcacgttgccctgcttgtcgagaatgaccatgccatgctgctggccgccaaccgcgagggccgcgacatcgtcaagcccgccggcctgctcggcggccttggtgaaggcctcccaccagaattccgggttgaccgaggtgccatccgggtgcttggcctgcccgaaccgaacctgttcgccggtggcggcgtccgtaatgcggacctttgttgattgagttgacgtatctacgccggcaaccagtactctcgtcatgcattcctcctcgatgagggtcgcgcttgcaagtctcggcgcgccacaaccaataagttagacgattaaactatactgtattgcagtgtatgattgcaaacggaaacacgcgagggtgcgtatctggttcaatcgtttgacgcacaatatcattgtgcgatagacggatgtgagcgcctgtgcggcgttcgagactaggggtgcaaggaggtaggagcctatggcaagtctacgcaggatcaatcaggaggatctgcgcaaccataatttgtcggtggttctcgacactttgttgcgcgcggagaaacccatgagcagggccgacttggccaaggaaacgggcctgaccaaggccacgctttcgctgttggcctcgatgctgatcgatagtggcgtggtgcaggaaggcgagccggtcgtctccaccacatatgggcggcccagcacgccgctggagattcatggcgggtccatcgccggcatcggcctgcagatcaacaccgatggctacggttgcctggcactcgatctgaacggcgacactctcggtcaggagtgggtgagtgaggatatgaccggcactgacccgtacgagatcttcgccaagctcgatgcgatgaccttcccgttggaaagccgactcaaacgacgtggctgcaaagtggtgggagccgggcttgcgctgccgggcatcgtcaccgacgacatgtggctgttggtggcccgcaatctgggttgggaaaacgtcaacctcacccggttcaacgtggtacgccggctggatgtggtggccggtaacgaagcgaagatggccgccatcgctcagattccggggtatgccaccgaacgtgcgtccttcctgaatgtggtggatcgcacggattcctttatttacctgtctaccgatatcggcatcggcggcgcggtggtgcgtgacggcgaagtggtgatgggctcgcacggattcgccggcgagatcggccatctgtccgtggcgatggatgggccgttgtgcagctgcgggcgccacgggtgccttgaggcgtttgcgggccgtcgcgccttggtcgaggctgccggcattgccgaggatggggatgccaccagcagcgaggccatcgatacattcctccagcgttggcgtgcgggggatccagacgtggccaaagtggtcgatcaggccgctgatgcgctggtttccgccatcgcttccgccgtgaatctggtggatgtcgatacggtgctgttgggcggactgtggacgcacttcggcgacgagctggccaccgtgcttgaaggccggctgcgttcggaaattctgggatacccgaatgtgaagatccgcgtgttcgtgccgccggtggcgctgcatccctcgctatatggcgcggccgaaatgggcttgcgacggttcatcgagaacccgttggggtacatgggggagaagtagcgccgggagatgccgcttgttgtgctggcgggtgcatggcatgggtgcatggcgcgtgtgccggcgttgatgggttcatgctacactttgcaagttggctgttttacgcagcgaacgtggggccgtagctcagtcggttagagcatgcgactcataatcgcccggtccagggttcaagcccctgcggccccactcttttgcgtcgcctcctgcggcggcacagcgcgtcttcacgtccagataggcgcgtacaatcccttaggttccggttcacgtcctgccataggggcatgacgacccgggtcccccgaatccataggagacgtaaaatgcagcagggtatccatcctgattaccaccccgttgaggtgacgtgctcgtgcggcaacaccttcgtgacccgcaccgctggcaaggaagatcacatgttcgttgacgtgtgctctcagtgccacccgttctacaccggcaagcagaagattcttgacaccggtggccgcgttgctcgcttcgagaagcgctacggcaagaagagcaagtagcatacttcacgccagtccgattcgattcggcatgctccggcatacccgatcgaggactggcgtttttgtattctttgacatttttttgacctgcacaaccgaatagacaccaccgtacgaaagaaagcgtgttatggcagacgaacagttcccggcggcggcaaccgcgcttgaggagtaccagtccatcgaagaacagatggcgagccccgaagtcgtgtccaacccggacaagctgcgcaagctgggccgtcgtcacgccgaactgggtgccatcgtgggcgcctacaaaacctggttgcaggtgaaggacgatctggcagccgctcaggagatggccggcgaggacgccgacttcgccgaggaagccaagcgtcttgaagccgaactgcccgacgccgaggagaagttgcgtaccgcgctgatcccgcgtgacccggatgatgcacgcgacaccatcatggaaatcaaggctggcaccggcggcgaagaagccgcactgttcgccggcgacctgctgcgcatgtacacccgttacgccgagaagcgtggctggagcgtgaacgtacagtccgagaacaccaccgagctcggcggcgtcaaggacgtacagattgccatccgcgccaagggcacgcccgctcccgaagacggcgtgtgggcttcgatgaagtacgagggcggcgtacaccgtgtgcagcgcatccccgtcaccgaatcgcagggccgtatccagacttccgccgccggcgtcatcgtgttccccgaggccgacgaggatgacgacgagatcgagatcgatccgaaagacctgaaaatcgacatcttcatgagctccggccccggcggccagtccgtgaacaccacgtattccgccgtgcgcatgacccacctgcccaccggcatcacagtgaacatgcaggatgagaagtcgcagatccagaaccgcgccgccgcgctgcgtgtgctgaagtctcgcctgctggccatgaaacatgagcaagaggccgccgaagccgccgacatgcgtcactcgcaggtgcgttcgcttgaccgctccgaacgtattcgcacgtacaacttcccggaaaaccgtatcgtcgatcatcgcacgaattacaaggcttacaaccttgacgccgtgctcgatggcgacctgcaggccgtcatcgattccgacatccaagccgacgaagccgaccgtctggccaaccagcagtgatagccgacctgattcgtcaagccgccgcgcagttgcgcgaagccggcatcgagacgcccgaacatgatgccaaactgttgctggccgaggccgtggacgccgagctacgcgatatcgacaaggccatgctgatgggggagggcctcgattcgctggcccccgccggcgggggctgtcgcgcagcgactgggggtggtcaggccgaccccgtcaccaatatccttgccgccttccacgccatgctttcccgacgcgccaaacgcgagccgctccaatacatcaccggccacacgcctttccgctacctcgacctgcaggtgggccccggcgtctttatcccgcgcccggaaaccgaaaccgtagtccaggccggtcttgactggctgacccggcacagcatgatccacccgcgcatggtcgacctgtgcgccggttccggtgccatcggcctgtcgatagtcagcgaagtgcccggcagccaagtatgggccgtcgaattatccccgcgtaccgccgaatggacccggcgcaatctggcggtaaccgcgaaacgatacccctccatcgcctccaattaccaactggaagtcgccgacgccacgtcactggccacgctggcgcaactcgacggcaccatcgacatcgtcatcaccaacccgccctacgtgccacaaaccgacatcccggaacaaccagaagtacgcgactgggacccggaactggcgctatacggcggttcggcagacggcacgctcatccctgaacgcattattgagcgcgcctggcgcctgctcaagcccggcggcgtattggttatggagcatgatctcacccaaggcgagcgattagtggcctatgccaaggccacaggtttcgccaccgcctccaccggcaaagattggaccggccgagaccgctatctcttcgccgagaagtagccacaggcgcggggccgccgctgctactgcgcgtaatactgcagggcggaggcgtccgcgtccgtgatttcgcgaatcggacgggccggattgcccacggccacggtgtgcggcggaatatcgcgcgtcaccaccgagccggcaccgatcacgcaaccctcgccaatcgtcaccgggcaacaatccagcacagtgaagttgaagttggcgaacacgcgctcgctggcgcgcggcatacgcagttcgacgggaggcatggtggtggattcagcattgattccgctcattgaacactcctgtaatttcgcgaaagagcatggatgaactcattgtatctacggtctgtgcgtatggggcgaatcggaaaacagcagtacggcaaacgagcgatgatgaactatgcaagtcggggcgcaatggtgcaatggtagattgtgaatacacaggcgaacggaggtgtcgtgagcgtggagggcggaacaacgctgaaagtcacggatgaatcgctggcacaagcggcgcgtgtcatccgggatggtggattggtcgtcattccaacggatacggtatatggagtggcgtgcgatccgcgtaataaggccgctatcgaccgtatctaccggctcaagcgtcgcccgcgctataaggcgttgcaggtactgctcgcatccaccgaccagcttgatgaactcggtctcgacctgccgtctccactgaatcgtttgtcggcggcgttcctgcccggcgcgttctcgccgattgccgtagcccggcccgactgcacgttggagactttggccgacaccgccgatggtcgccccggcacgcaaggcatccgcatccccaattcggcgctgtgcctcgcgattctcaaggcgactggcccgctggccgcgtccagcgccaaccgttccggcgacgaaagcgcgcagaccgtccaggaggcggttgacgcgttcggcagcgaagtcgacctgtatctggacggcggtcccacccaaggccatgtctccagcaccgtcgtcaaagccgatccgtacgcgcgcgacggcatcgagatcctgcgtgaaggcgtcatcgcccaaaacgtgattcgcaaggccctccacctcaacggcgggggactcggcgcatgagaatctacctactgattgccgccatcgccggtggcgtcacctggctggtgactccgctgattcgccacgtcgccatcgaaatcggtgcggttggcgaggtgcgtgcccgagacgtgcacaccattcccacgccgcgcatgggcggccttggcatgctgatcggttttgccgtggctaccgtattcgccagtcggctgccttttctctcgggattgttcaacggcaattaccagatgtgggtgattcttgccggcggcatcatgatcagtctgctaggcatggccgatgatctgtgggatctcgattggatgctgaaacttgccggtcagctgctgatttccgtattcgtggcttggggcggattgcagatcatctcactgcctttgggtggttcgctgattaccgcctcgccgagtctgtccatggcgatcaccgcattcctgatcgtcgcctcgatcaacgcggtcaatttcgttgatggcctcgatggtctggcggccggtatcgtggcgattggtggcatagcgttcgccgcctattcgtatatcatcgcccggtcttccccgagttatgcttcgttggccacgctgatcgacgtgatgatggtgggtatctgcgtgggcttcctgctgcataattggcatcccgccaaactgttcatgggtgattccggttcgatgctgcttggctatctcatcacctgcgcttcgattgtgatgaccggacgtcttgacccggcctcgattcatgccagcatctatctgccggtgttcatgccgattctgctgccggttctggtgttgttcctgcctgtgctcgacatgtgtctggcgattgtgcggcgtttggccaaaggccagtcgcccatgcatccggaccgtatgcacctgcaccatcgcatgctgaagatcgggcattcggtgcgtggcgccgtgctgattctgtggggatgggccgcgttgatcgcattcggttcgctgacgattctgttcttcaaagcgcagcacgtggccgtgggcatggccatcgctgtggtggtgctgaccatagccacgatgtacccctatctgcggcatcgtattcccgagatccaagccgagaacctgacgttcgaatccgcacgtaaaaacgcgcagcatacagtgcctaaatcgcagtctgcagtaggggagagccgggattcgattggctctcaggcagcggattcgatgactgattcgcctgcaaattcgcgggactcgcaggtgggtgaggtgcaggacccggcagcggataagtgagcgctcacaagcgtgtgtcgtgaaggtcagcgcattttcatatagtgtttacatggctacaaaccttgatgaattaaacgcccagtcggcgtatgctccccttcccccgattttcgccaagctcggccttgcctatgacgatgtgttgctgttgccgaacgagacggatgtcattccctccgaagtggacaccagcactcatctgactcgcaagatcgtgatgaaggccccggtcctctccgctgccatggataccgtgaccgagtccgagatggccatcgccatggctcgtaacggtggcatcggtgtgttgcaccgcaatctgtccatcgacgaccaggccgctcaggtcgatgtggtcaagcgttccgagtccggtatgatcaccgacccgctgaccgtcaaccccgaggtcacgctggccgacctcgacaagctgtgcggcaagttccacatctccggtctgccggttgtggacaaggacaacaagctcgtcggcatcatcaccaaccgtgatatgcgcttcatcgcctccgaggattacgacaccctgaaggttaaggatgtcatgaccaaggagaacctggtcactggcccgtccaacatctccaaggacgacgctcaccgtctactcgctcagcacaaggttgagaagctgccgctcgttgacgaggaaggccacctgaccggcctgatcaccgtcaaggacttcgtcaagaccgagcagtacccggacgccaccaaggatgagcagggtcgtctgcgcgtggccgccggcgtcggcttcctcggcgacgcctggcagcgtgcctccgctctgatggaggctggcgtggacgtgctcgtggtcgacaccgccaacggtgaggctcgtctggcactcgacatgatttcccgcctgaagcacgactccgccttcgacggcgtgcagatcatcggcggcaacgtcggcacccgctccggtgctcaggccatgattgaggctggcgcggacgccgtcaaggtcggtattggccccggctccatctgcaccacccgtatcgttgccggtgtcggtgtcccgcagctcaccgccgtgtacgaggccgcccaggcctgccgtgccgctggcgtgccctgcatcgccgacggtggcatccactactccggtgacatcgccaaggccctcgtggccggcgcctcctccgtgatgctcggcggcacgctcgccggctgtgaggaagccccgggcgagaaggtgctcctgcacggcaagcagtacaagctgtaccgtggcatgggctccctcggcgccatggccccgcgcggcaagaagtcctactccaaggaccgctacttccaggccgacgtgacctccagcgacaaggtcgtgccggaaggcgtggaaggcgaagtgccgtaccgcggaccgctgaacgccgtgctctaccagatgctcggtggcctgcaccagtccatgttctacatcggcgcccacaacatcgccgagatgccggagcgtggcaagttcatccgcatcaccgatgccggtctgcgcgaatcgcacccgcacgatatcgtgatgaccgccgaagccccgaactactccggcttccacaacaactgatcggttgatgcccgctagcttgcgctagttaggggttgattccttgtgaaaagggtctgcttatgcaggcccttttcgcgtatgtggctcgagatagcttgtatgcgctggggtatagtctgaactgttctgcataagcgatgaccagcgaagaaaagaggcacaccatggtcgacagccatgacgcggaaacgtacagcgcgaaggactcgcgcctgatttggatcgattgcgagatgaccggacttgacatcttcggcggcgacgaactcgtcgaggtgtctgtggttcccaccgactttgacctgaatgtgctggacgagggcgtggattacgtcatcaagccgtccgagaaggctgtgaaccacatgaacgatttcgtgcgccagatgcacacccgttccggcctgatcaacgagtgggagaatggcctgagcctggccgaggccgagcagaaggtcaccgaatacgtgctgcgcttcacgccggaaggcgtgcgcccgctgctggccggcaacaccatcggctccgacaagaagttcctcgaccactacatgccgggcctcatgagccacctgcattaccgcagcgtggacgtgagcaccttgaaggagctcgcccgccgctggtacccggccgtctacgagaaccgtccgccgaagaacggcggccaccgtgccctcgccgacatcatcgagtccttggacgagttgcgctactaccgtaaggccttcatggcccccgtccccggcccggatgatgccgcctccaaggccatcgccgccgacatcgtggccaccagcattctcaataagtagtccgccgtacttggctcccctccctgaggggagtctagagaggttgatatgcgccaaaccgaagccctagccattctgaacgccggcgcgaacgtgtttctgaccggtgcgcccggtgccggtaagacctatgtcttgaacgagttcatccgccaggctcgggccgacggcgccagcgtggcagtcaccgcgtccacaggcatcgcctccacgcatatcaacggccaaaccatccattcgtggagcggcgtcggcgtggccaccgccctgagcccgagtctgctcaaactcatcaaatcccggcgcaaacgcaagattcaggctacggacatcctcgtcatcgacgaggtctccatgctgcacgcatggctgttcgacatggtcgaccaagtctgccgcgaagtgcgtcgcgacccacgcccgttcggaggcatccaggtcgtgctgtccggcgacttcttccaactgccgccggtttcggtgtccgggcgcaaccgcgacctcatcgcccccacccccgaattcatcgccagtcgcgaacggtatgcccgtgccggcttgaaccccgaaggcttcatcaccgaatcgctggtatggcccgaactcaacccggtaatctgctatctgaccgaacagcaccgtcaggacaccggcgaactgctgaccgtgctcaccgacattcgcgaaggcgacgtgacccagtccgaccgtgacgtgctcgtcacccgtctgggcaaactgcccgagcccggccaggtcgccgtccacctattcccggtgaaccggcaggccgacaatctcaacgacatgcgcctgaaccagatcatgcttgagccgcacgagttccacgccgaaaccgcgggtcccgccaatctggtcgaccgactcaaaaagaacatgttggcccccgagcgattgatactcaaggaaggcgcggctgtcatggccctgcgcaacgacaccgatcgccagtacgtcaacggctcgctcggcaccgtgcgcggcttcgcgcaggagaacaagggcggctggccgatcgtggaattcgaaaacggcaacatcgtcaccatgaaacaggccacatgggaaatgatggacggcgacaccgtgctcgcctccgtctcgcaggtgccgttgcgttgcgcgtggggcatcaccatccacaagtcgcaaggcatgacgcttgaccgtgcggtcatggatctgaagcgcaccttcgcgccgggcatgggatatgtggcgttgtcccgcgtcgaatcgctgggcggactgtatttggctggcgtcaacgaacgcatgttcctcgtctcgcccgatgccgtggtgctcgacggcgacctgcgcgaagcctcggcctcggcttccgaccagttggccgatgaaggtgcaagcgcgttcaaacccgccgagccggacgaattcggtgtcaatcccgatgatgacttcgcccaggacgcgttattctgacggtcgatatatcgaacgaccgctaatttgagtgtttctgcacttcgaggggcggattttgagttttcgggacatctacttccgtttcaaggggctgatgtccaagtagacaacgcttaaaaacggcggaatgacgttggtatgaagccgtttctatgtgcgattgagcggatgaccagcccctcgaaacgcaagtagatgtctccaagaggcggaatcggccccttgaagccgaagaagacactgcgaacttgtcttcattgaggaactgaacggctaccatggaataagaggtggtagttatggtgctatccgagatatttcgtggaaacaatgaggttcgcgaggccgcccgggccggtgtgcaaatcgatacggttagtgtggctagtgcgtcagatgcagcaagcgcggcagacggcagcggcaaaatcactggcgcaatacgtccgccagcggtggctggttcgttctaccccgctgaccgcacaacgctcaagcaactcattacccatcaattggattacagtcgagaggttctgcaacagttggagcccacgcttccagcgggagtgccaaaggctgtaatcgtgccgcatgccggttatgtgtattccggcacggcggccgcgcttgcctatgctttgctcgaacgagggcgggggagtgtgactcgcgcggtaatcgtgggaccgactcaccgtgtggccgtgcgaggcgtcgcctgttccacggcagcggcgtttgaaacgccgctgggcactgtgccggtagacattgcagccgagcgtaaggctctgggcctgtctgtcaatgagccattgcgctccggtacacatgcccgtccgggcgcgtcggctcccgcaatgatcgtcaatggcccaacccacgcacaagaacatgcggtagaagtgcagattccgttcctgcaaaccgtgctcggcccagacctcactattgtgccgttgaacgcgggcgatgccacgccacaagaggcgggtgatgtgttgcgtgctttgtggggtggcccggaaaccgtcatcgtgattagttcggatctctcgcactatcatccgcacgaagtcgcccgcgcgttggatgaccagaccattgcggacattgcggctttgcatctgccgattcaccctcgccgggcctgtggcgcatacccgatcaacggccttctggatgtgttaaaaggccgcaaggacatgaagctcttcgagctcggctgttccacttccggcgacgacggcgtggtggcgcttgccggccaacctcgccccgcaatgcgagacgccgacgagccggtagtgggatatgtctcgtttgccgcgtgggaatccaaaccggaagcagatgctccagccggtgcagatgacttaggcgaatcgggaacagcccatggtgatgtgctgctgaaactcgcccgtgccgctatccgggaacggttgcatatcgagcatccgaccgccgctgattcgaccgcgtccattcttgccgcaaacccgtggctgaacgagtccggtgcctgtttcgttaccctgaccgagggtggccggctacgcgggtgcatcggttcgctggccgcccaccgctcgctcggcaaggacatagctgcacatgcggtggacgccgccacccgtgacccacgtttcaacccggtcaccgccgcggaatacccgttactcaatgtggaggtatccgtcttgggcgagcccgagccgattaccgtgaactcctgtgacgccgattcgcgcgataccggctcgaagaccgcgactctggcatcgctgcaatccggacctcagaccgacgccgtcaaacgggacggcagcaacgtcgaacgcccggtacgttcgcgcactgaacttgaggaagtattacgccccggcaaagacggtctgattctcgccgaccgtcgtggctgcagcgccacattcctgccacaagtgtgggatgagctgcccaatccgcacgatttcgtcgctcacctgctcgccaaggccggtatccgcccgtcctacgactggaacgatggcgaaatcgactgtcaacgctacgaggtgaccgcctatgccgagcactaacgcagcaaccatgtcccctcccgctggcgggaggtggcacgaagcgacggagggtggtcaccgagaatcagagggtggtcaccgggaatcgtgcggtcatacggcgtcagtcacagatgttcgtaaccccgccatagcccgctggcaaacgcaattccacgacggtaccaaccgcgctcgctgcgaactatgcccgcgccgctgcgtcctcaagcccggccaacgcggcttttgcttcgtccgctcaaaccacgacggactcatcgtctccgacacctacggccgcagctccggcttcgccgtggacccagtggaaaagaagccgctcaaccacttccaccccggttccagcgtgctgagttttggcacggctggctgcaattccggttgccgattctgccagaattgggatattgccaaagcccgcagtttcgaccggctcggcgtggaagccagtccggagaaaatcgcgcaggtcgcggccgaccggggcatcgattcggtggcgttcacctataacgatccgatcgtgttcgccgaatatgccatcgacacggccgaagcctgccgagcgctcggcattcatcccatcgccgtgactgccggatacatgagcgccgaagcccggcccgacttctacgccgccatggacgccgccaacatcgatctcaaaggcttcaccgaagaattttattggaaagtgaccggcacgcatctggccgatgtgctcgaaaccatcgactatgcggtcaacgaggcacgcacaccagaaggcgaacacgtgtgggtggagctcaccacgctactcatccctggactcaacgatgacgacgcccagctgcatgctgaatgtacatggatacgcgagcacttgggcccggacgtgccgctgcacttttccgcattccactccagttaccgcatgatggacgtaacgcccaccccgcacgagactctgacccgcgcccgaggcatcgccctcgaagagggactcaattatgtgtacaccggcaacgtgcatgatcgtgaaggcgataccacatattgcccaaaccctgaatgcagggccaagctcgtggaacgcgattggtatcgaatcattgccaaccgtttatctgccggatacagtggcaatgggcactgccccgtatgcaggactgctatcgccggacgttggtaatctgcctcaggtcgcccgcgcgatttagcgcagatcgccaatacgcgcggcgatcgtcctcattgatttgaggctcgcctcatagcgcgcggctgccacaatcagaatgatgccgcccaaagcaagccacacccaccggtagtggcgggagaattcggcccgccatggccacagcacagtcaccgtgctgacgataagaatcaccgtgccgtagatcaacggtgcttgcagcaaacgcacacccacaatcagcgcggccgctccggacaggccgcttgttccgggaccgacataggcgattgcacaaatggtggcatggccattggctgttgcgataccggttgtcgcggaactgccgttgggaattgcggggttgcagcagaaaattgcggggcccatgctgggccggttgatacaccggttgctccgcgggttccggctgattcccctgttgctcggtcggctgcgtcatcgtgccctcctacccttctagccatcattgttgtacgaatgagtccgaatgccaagatgaaggccggaatagtgcgaatagcaggcgggcttgtcggttcacgcgaatatcttggaacacatgacttccaatacccttcgtatgtcaaccatgttcctgcgcaccctgcgcgaggaccccgctgatgccgatgtcgattcggccaagctgctgcagcgcgccggctatatccgcaaggccgcacccggtatctggacctggctgccgctcggtctgcgcgtgctgaacaagatcgaggccatcatccgcgaggagatcaacggcatcggcgcccaggaagtgcacttcccggccctgctgccgcgcgaaccctacgaggccacccatcgctgggaggagtacggcgacaacatcttccgtttgaaggatcgccacgaggccgattacctgctggcccccacccacgaggagatgttcacccttctggtcaaggacatgtactcctcttacaaagacctgcccgtcaccctgtaccagatccagaccaagtaccgcgacgagttccgtccgcgtgccggcctgatccgtggtcgtgaattcatcatgaaggacgcctactccttcaccatcgatgaagaaggcatgcgcaaggcctactatgacgagcgcggcgcctacgagcgcatcttccagcgtctcgacctgaagtacgtacctgtgttcgccatgtccggcccgatgggcggctccgcatccgaggaattcctggctccgatgccgatcggcgaagataccttcgcgctggcaccttccggcaaggcatggaatgtggaggccctgagcactccggagctgccggaaatcgatgcttccgccactcccgccgcttccaaggaagccaccccggatgccaagaccatcgataacatgattgagcgtgccaacgccgaccacccgcgtactgatggccgtgaatggcaggcttccgacatcctcaagaacgtggtgattaccgtcaagcaccctgaggatgaagagcatgacgagccgtggcgtgaagtgattgtcgtcggcgtgcccggcgaccgtacggtggatatgaagcgactggaagcccagttcgctcccgccgagcttgaggaggccactgaagaagacctgaagcagcaccccgaactgg

SEQ ID NO: 2454 - DNA, 10463 bp, Unknown
  R50_10m  MAG No. k141_15657
cgctgaatcaacctaaaataaaaattatcaaaagtatcaaaaaaataaaaattatcaaaagttgggttgagccgactgaagaaaacagccgtggcgacaatgattctgccgcaatccgcggtgacaacaactgacgcggaccttcttggcagaatcgttgtttgtcccgcttcgccaatcaacgtcgctcaagttcggtgcgcagaccggctaccgtagcggtcagctcacgcacttcctcgcgcaataggtcgatttcgggattggctgatgttgcaatagcctcttgcgcggcttccttggccacttccttctcccgagcgtcctcgcgccgatccgtctccagattgacctgatccacgatccacgaagccagcgtggccgtcacaataccgatcaacgcgatgccggtgaacatcagcaccaccgcaatgatcttgccttggaaggtgaccggcgagaagtcgccatatcccacggtggtcacggtcacgaacgcccaccacaacgccgtgccgaagtcggtgatcgtggatccggacgccccgcgctccacggaatacacggccagcgcgcccacgtacatgagcattcccaccgcgccgaccgcgtatacggtgatgcgcccgcgcaccgccatgccggaggtgcggttcagcacgtgcagcacggtcagcaaacgcaacagtcgcaagggccggagcatcggcagcgcgatggtcagcagcgtgaacaggttgtgcttgaaccaccgccagcgatcgtcggccaaccacagcgagaccacataatcgacgacgaacaccacccagatcacgttgatgacggtttcacacagcgcgatatgcgtgcgggagagaatttcccacgaatacaccaccagaaacaccacggacagcaccatcagcggccagtccgtccacttcttccacgtcttcagtcccatattccgattgtagtggcgcgtccgctgcgccactgcggagcatgactccggacatcagtgttgtatacgttcgtatacatttcacgttgtgtacgaacgtatacagcggtatttttcatctcgtatttcccctatggctatcaccacagtgatataatcaagaatatgtaaggagagagaaggagccggccaatggagaccgcatcgatcgaactgtggcatggctcttcgcatgtcatcaagcatcctgaatacgggctggtcaagccgaacaacgattatggccgcggattctattgcacgcgcagcgtcgagctggccaaggaatgggcgtgcgcgggactggatgacggtttcgcgaatcggtacacgttgaccacggacgggctcctcttcctggacctgtcccagccgccctacaccatcctgaactggctggccatgctggtcgaaaaccgtcgtttccagccgaccaccgccgtcgccgcgcagggcatcgaatatctgaaacaagtgtttctgccggatgccagtcaggctgacgtcatcgtcggatatcgtgccgacgattcgtatttctcgttcgcccgcgcttttgtcaataacgcgatttccatcgaccaactcgctgaggcgatgcggttgggcgagctcggcaagcagatcgtactcgccagtcctcaggcattcgcggcactgcggttccaaggctgcgaaatcgcccgcgcttcgacctaccacggattgcgtaacgagcgcgaccgcacagctcgcgaagcctaccgccgcaaaagtgcagaagccgatctcgacggcctgttcatgcgcgacatcatccgcgagaaagtgaccaacgatgatccccgcctatgatgggacatacttgccggacgccatggccaacttggccggcgccttcgattatgcgctgaacgattgcgggttgccggtcggcctattcatggacttcttcgccacctccgaggcggccgcgcttttcgggcgaggcacgcccaaatacgtgtgtggcatgtccggcgaggagctggtggccgaaatcatgcggcaaaccggttgggcgcgcattctcgatatgccgccagccgcactgcgcgccggctcaacacccgaatactgggccggatgggtactcgcatactgccaatggaccaggggagtgcggttctcggacattctcgatgtgctgtcgctcgacgatatcgtgcgactgtacccgactctgcacgaagccgacgaaagccgattcgtcgacgtgtacgacgagcgggccgcccataatcgcaccgagggcgactcccggctgcacacgatccgcgtgcgcgccggactcagccaatccgggctggcccgccgctccggcgttaccctgcgctccatccaaatgtacgagcagcgccgcaaagaccttggcaaagctgccgtctccaccgtgctcgctttggcccgcacgcttggctgccgcatcgaagatctgttggagccgtaaagacgcggagtagtatcgcgccgcatcgattctgataactgaacaactacttttaaggcccggccggatgctcgtttggacatccggccgggtcttctggctccacacggggtgccgaggtatccgttctccgcttcgaggggctgatttggccttccgtagaggtttactcccgtttcgaggggctggtggcccgctagaacacgggtataaacggcttcgccccaccgtcattccgccattttggggatgcgcttacttgagtaccagcccctcgaaacggagatagatctccggaaagggtcaaaacagcccctcgaaactcaagatggcggttgcagggcggttgaggatcagtcgaagagcggttcaaacgcaaatgtgaacaatgccacatgtgattgggcgggtcgctgcacgccgattttcgggggtgcatgggaatggcggaatatcaacgaaaaaccctatatctaggtttgttatgtgacacgcgccactacatatagtgccttgatttcaaatcacaccgctgtaatatggccttcgcttcactgttcatcagaaccacacatcaaggggagtcgccatgaccgtcaccgtgttcaccaagccgcattgcccgcagtgcgatgccaccaagcgccagctcaccaagctgggtgtgccgtttgaaaccgtggacctgacgcagaacccctccacccttgagcagctgcaggccgccggtttccagcaggctccggtggtcatcacgccggacaactcctggaccggctaccgccccgacctgattcgcgaagtcgcccagcaggtggccgccgacaaccgcgccgccgccacggtgtccgcgtgagtctgagccagcccgaattcgcggccgaaggcaagacgatcggcgcattggtctacttctcgtcggcctccgaaaacaccgcacggttcgtggccggatgccgtttgcaggacgaaggcatcaacgtctaccgcatcccgttgcgggccgccgacccggcgctaaacgtccgcgaaccgtacgtcatcatggtgcccacctatggcggcggcgtggtcaagaaagcagtgccgattcaggtcaaacgcttcctcaacgatccagccaaccgcgagtggattcgcggcgtcatcgcctcaggcaacaccaatttcggtgaggcctactgtgccgccggagacatcatcgccgccaaatgcaaggtgccctacctctaccgttacgaactcatgggcaccccggaagacactgccgccgtgcgaaacggcctcgtccgcttcttcaccgaacagtaaatcttgaccccctcgaggtattggctcccctctccgaggggagctgtcaacgaagttgactggggggagcaactgtctgagtaaacacacttctgccatattccaaggatttccaatgactgacctcaccgccaccggcctgccgctcgacaatactgccgacaccgcagcggaacagtacgacccggcgcacgattaccacgcgctcaacgcgatgctcaacctctatgacgccgacggcaagatccagttcgacaaagacaaggccgccgaacgcgaatacgtgacagggcacgtggccaccaacagcaagcggttcgcctccaccgccgagcgtctcgaatacctgatcagcaaccagtactacaaccctgcggtcttcaaccagtattccgctgaattcctcgaccgcatctacgagcacgtggaatccgccggctttgagttcggcactttccttggtgcgttcaagttctacacgtcctacgcgctcaagacgttcgatggtcgcctctatcttgaggacttcccgcagcgttgcgccgctgtggccctggagctcgccgccggcaatgagcagcaggccatcgaatacgccgacgaaatgcttgccggccgcttccagcccgccaccccgaccttcctgaacctcggcaaggcccagcgtggcgaaccggtcagctgcttcctggtgcgcatcgaagacaacatggagtcgatttcgcgcggcatcaacgcggccctccagctctccaagcgcggcggtggcgtggccctgctgctgagcaacctgcgcgagctcggcgccccgatcaagcacatcgagaaccagtccagcggcgtgattccggtcatgaagctgctggaggactccttctcctatgccaaccagctcggcgcacgtcagggcgcgggcgcggtgtacctcaacgcccaccaccctgatatcctgcgcttcctggataccaagcgagagaacgcggacgagaagatccgcatcaagtcgctggctcttggcgtggtgattccggacatcacgttcgaactggccaaacagaaggcccagatggccctgttcagcccgtacgacgtggagcgcgtgtacggcaagccgttcgccgacatctccgttaccgagcattatgacgagatggtggccgacgaccgcatcaagaagacctacatcgacgcccgtaagttcttcaccaccatcgccgaactgcagttcgaatccggctacccgtacatcgtgttcgaggacacggtcaaccgcgcgaacccgatcgaaggtcgcgtgaccatgtccaacctgtgctcggaaatcctgcaggttcaggagccgagcgcatacaacgaggacctcacgtatgcgcatgtcggccgcgacatctcctgcaatctgggttcgctcaacatcgctaaggcgatggatggcggcttgggccacacggtggagacggcgatccgcgcactcacctcggtggccgagcacaccagcatcaacgcggtgccttcgattcgccgcgccaatgaggagggccacgccatcggtctcggccagatgaacctgcacggcttcctggcccgcgaaggcatccagtacggttctgaagagggcctcgacttcaccgacatgtacttcatgaccgtggcctaccacgcctaccgtgcctcgcacgcgctcgccgtggagcatggccgcacgttcgccagcttcgctacgagcgactacgccaagccggccggccagggcaactacttcgacaagtacaccgatggtcgtcgttcgctcactccgcgcaccgaacgggtccgtgcgctgttcgaacagtacggcatcgcgatcccgactgcggccgactgggaggccctgcgcgacgcgattctgaaggacggcatctacaaccagaacctgcaggccgtgccgcccaccggctcgatctcgtacatcaaccattccacgagctcgattcacccgatcgcctccaagatcgagattcgcaaggaaggcaagatcgggcgcgtgtactacccggccgcctacatgaccaacgacaacctcgggtactacaaggacgcctacgagatcggctggaaggccatcgtcgacacgtacgccgaggccacccagcacgtggatcagggactgtcgctgacgctgttcttcccggacaccgccaccacccgcgacctcaataaggcccagatctacgcctggcgcaagggcatcaaaaccctctactacatccgcatccgccagcaagccctggaaggcactgaagtccaaggctgcgtctcctgcatgctctgatcgttcgagggagcgtataccgcctttcttcggcactcgacgtaccttcgtacgccttcggcctcagacggcggtctccgcacgcattgaacaaccagagagccgttgttactcccctcactcggctaacgccgacagctcccctcagagaggggagctggccgcgaagcggactgaggggggggctccaccatctaaggaaccaacaatgtcacgaaccatctatagagcactgctccggctgaccgcgccggaggagttcgaaaacaaatccaacgacgataacgacaacgacaacgagtaataaggaacactcatggcaccgatttccattccgcgcaaaccgctgaaactcatcgaccgcgtctccgcaatcaactggaaccgcctcgaagacgagaaagaccttgaggtctgggaccgcctgaccggcaacttctggctgcccgaaaaagtccccgtctccaacgacatccccagctggcagaagatgaccgaggacgagcacacgctcaccatgcgcgtcttcaccggcctgaccctgcttgacaccatccagggcacggtcggcgccgtctccctgattccggacgcgctcaccccgcacgaggaggccgtgtacaccaacatcgccttcatggaatccgtgcacgccaaaagctactcgtccatcttctccaccctgtgctccaccgaacagatcgatgccgcattcgactggagcgagaacaacgagtttctgcagaagaaggcggaaatcgtgctcgactactacgagggcgacaacccgtacaagcgcaaggtggcctccaccctgctcgaatccttcctcttctactccggcttctatctgccgatgtacttctccgcgcacgccaagctgacgaacaccgccgacgtgattcgtctcatcatccgtgacgaggctgtgcatggctactacatcggctacaagtaccagaagggcatcgcccagctgagcgatgccgagcgcctggatctgcaggactacacgtacgacctgctcaacgagctgtacgacaacgaagtggagtacacccagtcgctgtacgaccgcgtgggcctgaccgatgacgtcgagaagttcctgcggtacaacggtaacaaggcgctgatgaacctcggctacccggctttgttcccggctgagatttgcgatgtgaaccccgcgatcctggccgccctgagcccgaacgccgacgaaaaccacgacttcttctccggctccggctcctcctacgtgatgggcaaagccgaagaaaccgatgacgacgactgggacttctaagggtttcgcggtccgcgaacccgtagcgccgccgcgttcgcacgacggcgctacgctggaggcatggaacaggagccgttggtcagcatcatcatcccggtatataaggtcgagaaattccttgatgaatgcgtgaagtctgtggttgcgcagacctatcgcaacctcgagattctgctggtggatgatggctcgcccgacaattgcccggccatgtgcgacgcctgggccgcccgcgacccgcgcatacgcgtgattcacaagcccaacggcggcctgtccgacgcccgcaacaccggcatcgccggggccaccggtgcgtacatatacttcgccgattccgacgacaccgtggcccccacgttggtggaggactgcctgaacgccatgcgcgagtatgacgccgacctcgtgatgttccagttcgacaccatctccgagaacaacaagccgctgctgtccaactatcgccacaacgacttcaccgaggtgcagatcctgaccccggtcgaggccatcaaaaagcaggtcaaggctgagatcgacggctatttctgggccttcctggcacccgcctccacctatcagggcaccggattctccttcccggtggggcgcaaaatcgaggatctctcccgtatctgcaacgtgatcggcgaggccacgcgcgtggtccgtctgcccaaggcgctgtaccactaccgcatgcgcgagggatcgattaccgccaactgggatccgcagctcacccgcgactggacccgcgccgccgacgaccgcgaggaatacatcgtccaccgattccccgagctcaagggcttcatgacgctgcaacagctgaatttctttgccaacctcgattacgagaccatgcgccagtcgctgatcgccgggctcaagatcgatcccgaggacgccgacgcgcttcgtcgccgcatcgagggcctgaccaagtccgccgatgagggcgatgagccagtaccggaaacgttgcgtgagttgctcggactgctcaagctgggcatcaccaaggtggccgatggcacgttcggtaaggccgatggcagcggtactgatgacgatgccgagaacgatgacgtaacgctggccgaccgtttccgcgacatgcgcgaggactggcgccagctgcgcatccagcgcatcgaaaacgccgaggagcgcaaggccgagcgcaaagccgcccgcaacggcgtcaccttcgagtctgtgttgcattagtcggcgactgatggaatccgtcagttcgggaagagcaggcctgctctacgccgggcgtgccggttcgcacgttcgagaaacaggcgtgtcatgggccgaaccacacaacacccccagaaacgcccataaagttaactacattttcagacacgccacttgccttggtccacggtccgtgtatagtagttctcggctcaacgaagagaaccttcactgaaccggaaaaaagtaaacgctgaagcttgcagtttccgaaagcaaagttgtacgtcggtggcgagggcggaagcgcagtaaagaacaaatccctttacaacggatcgtgaggcacgtacctgcctctgaaaggattagtaattatggcagaagtcgttttcgaccacgtcactcgtatctacccgggcaacgataagccctccgtggatgatctgaatcttgatatcaaggatggcgagttcctcgtcctcgtcggcccttctggctgtggtaagtctacgacccttcgtatgctcgccggcctggaagaggtcaacaagggccgcatcctcatcggtggcaaggatgtcaccacgatgcagccgaaggaccgcgacatcgcaatggtgttccagaactacgccctgtacccgcacatgaccgtggccgacaatatgggcttcgctctgaagatcgccggcactccgaaggaagagatccgcaagcgcgtcgagaaggccgctgagatcctcgacctgaccgagtacctcgatcgtaagccgaaggctctgtccggtggtcagcgtcagcgtgtggccatgggtcgtgcaatcgtccgtgagccgaaggtcttcctcatggatgagccgctgtccaacctcgacgccaagctccgtgtccagacccgtacccagatcgctgccctgcagcgccagctgggtgtcaccaccctgtacgtgacccacgatcagaccgaggccctgacgatgggcgatcgcatcgccgtcatcaagctcggtatcctgcagcaggtcggcgccccgaccgagctgtacgatcgcccggccaacgtcttcgtcgccggcttcatcggctccccgtcgatgaacctgaacacccacccggtggtcaacggcaaggcgaagatcggtgaggacaccgtggacctgccggctgaggccgtcaacaagctcaccgccgaagacaacggccagatcgtggtcggcttccgtcctgaggacgctggcctggccccggctgacgacccgaacgccttctccctgaaggttgtgaacgtcgaggatctgggctccgatggctacatctacggcaacatcgtcaccgatggctccgccgccgaggcctcccaggtcatgtccgaccagaacaagctcaccacgattcgtgtgaatccgcgtgcgctgccgaaggttggcgcgaccgtcaagatcaagatcgacccggccaagatgcacctgttcgctccgtcgactgagctgcgtctgaactaatagatacttggcgaggtctaatcgcttcgtcaaccattaaacgaggttattctcttcctctcttatggcctcgttggaaaagccctgcatagctgcggggcttttctttttgcctagaaaacgtacgctaaccggcccccgcaaatgaacgttttttgttcttttgtcaacttcttcctagagaggtgatatgatcgtatgcagtaacctcccgaaaaggggattgcaaatctatgaggggaaacgatgggctcgaaattgaagttcgtccgttgcgggtttaacggaggaacagaacaggaacctggacagcatcgccatgtcttgcggcgctgccttgcttcggttatcgc

SEQ ID NO: 2455 - DNA, 10252 bp, Unknown
  R50_10m  MAG No. k141_15664
gcccggcaccggcgggctttctacatctgagcttccctctttgagggggagctgtcagctaagctgactgaggggagccagaatacgcaaactagttgccaccctgagccattaaacggaaagcccactgggctttccgtaggcgatgcgaacagctatgctgcgaggggaatggtggcaactagaagttgccgccattccagccccaatcggtggtggcggtgtagcggatgtaggtgcggtcctcgggaatgccgagtgtggagttcagcgcggccataatgctttcggtcagcttttcccaagcagagcccggcacagagcggccgaatacgttgacctccacataggcggcgggctggtcatcgctaccaccgaagtagattggcatattgtcctcgaacgggcacatcagccagccttcggacttgcccggcacagcggtaatcgccttgccgtaggcggccttcagtgcctcacgctgctcgggggtggtggacacggacacatgagtgtgaataacgggcataattcctccttgattcggttcacttccagtctagcctcagcggctgctgttgaacatggcatgcggacgtaggaagctgcttgcagaacggaccggggcaaggccaattggggagatattggcctttccagccaatacacgttccgcagtcagcccaatagtgttgaatactcttgtgagaaaactgattgaacagctgatgaagttcggcattgtgggcgttatcgcctttgttatcgactggggtatcctcaacctattggttggcatattccacatgcacaacgtgctggctgccaccatctctttcatcatctcgctgattttcaactatctggcgagcatgaaattcgtattcaagcatcgtgatgacatggcacgctggatggagatccttatcttcgtggcgggcgctgtagtcggtctgttcatgaatgacgcgattatctggatttccacctatggtatgaaccatgatgcctatgtatcgcagcatgccgaatatctgttgcgcaccaatatcggcaagttggtggccactgccgtggtaatgatctggaacttcttgattcgcaagtggctgctcgacgatacgcacaccaatgcgatgaaccgtctgaagtccgctgaaaatcgactgaatgccgaggagcttgaagccaagtggcagaacagcttctcccacaagctcggcatctggtccttggagcacacgcccaaaggctggccgaagtagcgttttgacgtatgctaagccccctcgtcagagggggcttagcatacgtctcacacactcacttcagtcagggtcggctgctcggtggagcccttgatctgcttgaagccgatcagtgcaatcaccagcgaggccagtgccaaggtggtcaccaccatgaagcctccgtgcgagccaatgcggtcgatgaactggccggcaatcgccgaaccggcggaggagccgatagaattcatcgcacccatccacgccatgccctcggtcaagcgagagggcggcaccagatgcaacatgagctggttgccgttgatccacgtcggggcctggcatacgccaataatcaagtagatgatcatgatcacccacagatgcttggcgaacaggaacgtactgatgccgatgttcaccacggccaggcagaagtagaagcgcttccacagggcaatcgaccagttcttcgcgccatacaccaatgcgcccatcagcgagctgaaggagaagcaggcaaacacaaagcccgtgtactgcttcatattcgcttcggtggcaaacgcgatgatggagatgcccgtagccgactggaacgcgcccaaaccgaaccaggtgacgcacaccgcaatcagacccggaccccaaatggacgccttcttgcccgaacgcgcatcggcgaccgcctgcttaatggctgcgttaatcgtggcctcatcggtcacgccttcacgctcaagacggcggcgggtctcctcggcggcggtttccaccttcagcgcctcagccttggcggcctcgcgctcacggtattccttgcgggagatgccctcggcacgcgccagcgcggtctgcgacggtggctcagtggtcagctcggtcaggaacatcagcgcaccgaccaccacgcacatgccggtgaacgagaacgccagcaaaccggagatcacggccagcgtggaggccagcggattaccgatcacccacatgcattcgtcgagcacgccgcacagcgacagcgcgcggttcgtgcgctcccggtcacccttaagaatcttggtccagcgcgcgcggctcatcgcgccccacggcggaatggcggccaggaacggcgtcagacagtacagcacccattccggcgcgcggttggtaatcgccgtcaccagcgcgatggcggccacaatccaaacgataatcgtcggaatcgagacctgcctctggccgaacttgtcggtcagcttgcccagcagcggcgtggccacggccagcgcaatcgcctgaatggcggtgagcatgccggccagcgaatagttgccgtaataatgctgtacggaaatggtgatggtcatgccgaccatcgggaatggcatgcaggcgatgaccgagccgatggaataacgggcggtatgcggaatgcgcagtagttccgcatacccaccaaagactttgtggcctacttccttgatgccggtcagaatggtgctcgaattcgagttggacgagttattggacataacagcactacgctcctttccgctcccgattggatgtcccccgctggcgtggcgttgccggcgaagccctcatcgaatgatgtgttgtccatggtcgcgcaaagtttgcgtcggattttcccatccgcatatttgcgtcacggatactctacgggtgtccactccgcgacacgcggtagattggagatattaagacaacgttctcatgcccttcagggcgggaagcagaaaggcggctcatgagcgctaccaccatccatttcgtccggcatggcaaggtatataaccccgaccatctgctctatgagcgactgcccgacttccatctttccgaccttggccatcgcatggctcaagccaccgccacgtacttggccaagaatccccaaaccaatacgattgcagccgtctactcctcgccgctcgaccgtacgcgcgagaccgccggcgcgattctcgatgcgctgaaccccgtgcgcgaggctcgtggcgaggcttcgctcacgctcaccactgatgaacgggtgattgaggccggcaacgagttccgtggcaagcgcatcggccatggcgagggcgcgctgtggaagaacggcaactggaagctcgtcaccaacctgtacaagccgagctggggtgagtcctatcagcacatcgcggcgcgtatggacgacttcgcccgcgagaaggtggcccagcaccccggcgagcagattgtggtggtcagccacgaatcgccgattttcagttatcgccattatctggagaccggccaccccgagcactggatgttcctgcggcacacggcgctcgcctccgtgacctcggtgacgtatgacaacgaaaccggccgtgtgatgtcaatcacgtatgtcgacccagcagccaacgtcaagtaacggcacactggtgttaggacattggctccccgcggcgaggggagccaagacgcactgcaatcgagtggtggacgcaaaggagcatagatgaccattgaactcaatcgtgaggcaatcgcacaggttgcggcattgccggcggtaactgaggccgccgaagccggctcggcgctgatcagcctgtggccgctgaccgaagccatgcagatggacaatgacgcaaagtacgcggagaacctgcaggtgcgcgtcacccgtgcattcgcccgcatcctgaccggcgaggacgtcaccgtgccggacgccgagttcgtctacgaaggtgccgatgagattcccggtcgcccgcagagcatcgtggacgccctgctcgccgccaatgacgcctacgacacgatggccgactacgccgagtccggtgatgccaggctgatcgttgaggcggccgacgtgttgggaatcgactgggattccgcgacggcggaatcggtgagggaggcggtcgcggccatggaagcccaggtcgaggccgacgctgaagccgatggtcgtctggccacgtctgccaagcccgccgatgtggctgttcggttcgccaccgcgctcgccgtgtgcgatgcgttattgggtgaggtgtccggtgatgctgtggccgatggttcagcggacagtgtcgccaatgctgccgccaagattctgccgattctgctctacgtcaacgaactgcgcgagcagtgctcggtgccgcgcatctgcctgaccgacgagcagatcctcgggttgcttaatgcccgtgccaaagccgccgacgcagacaccctgaccgccaccgccgaatacatcgctcctctggccgttgccgaatggaacaagcaccgtgaggatgtgctctggaacccggacgaggctaagcgtcaggccaaggaagaagacgaaaagcgcaataaggaggctctggccgccaagttcgcgcatgtcaaggataatcccggcaaagagaccgtggagttgtaaagagtaagggcgttgctctggccgatgcttcgctcgtaacggttagaggcctggtgcctctccctccgtcatcgctttgcgatgccacctccctcgtcagagggaggtggggttactgcttatcgattaccgagccgcgatcggtcagcgtcgggtccacgtagatgtggcgggttgtagaatccgggttttggatgcggttgatcagcaggttgatggccgcctcggccagatccttatcggacgagcgcagtacggtcagcgggcgggagctgggcgtggcaaagccgttgacggagatcatcgagatatcgtccggtacgcgcttgccgcggcgctccagggtctgcgcgatggcgatcgccagataatcggagtgcaccagcatggccgtcacgcccgaatccagaatggtgtccacgatttggttgacgtccctggtgttgtacggctgaatgccggtgatggtgaacgggcattcgatggcgtcgctttccgtcacgatttgcttccagccatcctgaatcagctccgaagtcggtgtatcggtgaacgccgcgcccacacgggtgtgaccgtgttgcaggaagcgcaccgccgccttacgcacgccatagggatggttggtgcgcactgaatcgacgtagcgggaacccagcagcggcagatcacgttcgatgatcactgtcggcgtcttcgtctgctcaatccaattccacgtgtatttgccgcattccggatgggcattgggggccacgacgagtgatctcaccgattactcaatacacaaacttgaggggagggctcccggaccggtgaaggaggcactgatgaacaccgaacgattcgaccttgaggatgagtctcaggactggtcggcgctcttcgccggtttgacggcctgaggcacttccctccgcctgagtgtttgcgcaaagggcgattcctatacggggatcgccctttttctgcaattggctaattttggcatattttgccccgccggcgacggcgtattgtgtggcgaaaagagtttcgtagttcgtagtaaaacggaacatcctcatggatattctggttggtggattcggcaaactgcatcatgtggcttgccccggcatcgaacaattggtattggatgccggcggcgataacagtggcgacgccaaggtgctacgccgcgaacggctgctgtcggacgcgccgtcgcccactgggtgcagccagtgccggacggccgcgtgctgaccagcgatttgggtgcggatcgcgtttatgtgcaccattgggagcacggcgaactggtgcgcgagggggaagtcgtgcttgagccgggcactggcccgcgtgaccagcatctattgccagtcgcatccgatgatcttgcgcacgattggcgcgtggcggtcgtcggcgaatggggtggcacggcctttgtgcatcctgcggccatactttgcgattcttttttgttaaggaagtatcctatttagtgaaaagtatcgttcgcgcaatgggaatgggaaacttatgggcaatggtgtcgatttgcgtatgctcgccaacaatggcggcagcgtggtaatcagcgattacggagcgcatctgttgcgctgggccccggccgggcaggcggatgtggtgtggacgccgagtacgtggcatatcgaagccggtaagtcgctcggcgggggagtgccgatctgcttcccgtggttcggcccgggttttgcgcatggcaagcagctggcactcaatccatcccacggttttgcacgtctgcgtcggtgggcgttggacgagggttcattcgacgacagccacatacggtatgtgttggattcgcagcagctgaacgacaatgaagtgccttggttcgatgacgagccgggtgctcagtttcatgccgtgtatgacgtgcaaacgggcaatgcgctgaccatgagcctgaccgtgaccaacaccggcacggcgcctatgtcgtacgaggccgcgttgcattcctatctgcatgtcggcgatgtgtccggtgctcagctggtcggattgcagggagcgacgtatctggatgccaccgaagaagggtttccgccgaaaacacaggacgcgcaagtggtgacgtttggcgagcagccggtgaatcgtgtgtattactcggatgcgcgtctggaactgcgcgatgacatgttggggcgtgcgattcatatcagccgtaccgggtcgccgcaaaccgtggtgtggaatccgggagcggacggcgacaatatgagctacaccaagccgggcgaatggcgcggtttcgtggcggttgaagcggcggtatgccgcgaccgcatcgtgacgctgggcccgggagaatcccatgtgatctcccaaacgctctccgtaggcagcttgtaggagtagctcggcgcagcgtccatcctccatcgtaacgcattccggggaatgttgcgcgaagagaggggccgcaataacgcacaatgccctgtgtgctggaatgatccagtacacagggcattggcttactgaacggcggggaatactaccgccgcttgatgagtggggcctcattgttgggcttcatgagtgatgaggcgaacttcttaagcgaacttcgccggcgtcagtcactggccttgccagggtttctgtgcgttgtcatcggtgggagccgtgtgcggagacagcacggtggacccatcatcaacgttttcgggaatcggcggaacctggccgtactgtggggcctgagcgtcgggctggccgtactgcggggccggggtctccggctggccgtactgcggaaccggtacctgaccgtaatcgggcgtaggcacagcgggctggccgtagtcaggagccggtgcggtcggctgaccataggccggggctggctggttgaagtcaggagcgggtgcgttcggagcggtgcccggagcggcctggttgaagtccggggttgcgggagcgccgtacggtgcgccgtaagcaccctgaggcatcggggcagctactgcgtcatcgtcgaaacgtgcgccttccggcttgctgggcatagccatgaacacaatgtagacaatgcccgctgcggccgcgattatcgcgccgatgaacaggatgccaaggctacccgctgcggctgtggcatagtagccgctgtcagaggggcttccccagactctgaggacgccgaagagtgcagcgccgccgccaacaatcatgaggattgcgccagcaaacacggctccatagaagatggcaagccaccagccgggcttgttgatgtcgtggagacggcgaacggatagtgcgatgctcgggacgagtatggccaggctccacagcgaagagaggaatgacaggtggtcattggagacatccacgagggttgacagcacgacttgaatggcaaagctggccagcatccaccaccagaattcgctgcgggatgcgcggcccttgaacaccacgtacttcttccaaaaacgcaggaatgcctcggggaagaggcagtcgtaatacggcttgttcaacggcacggctgctgtggcagtgggagcggcgtactggttgtatgcgggtggcacctgaccgtaagcgttggcgtccggtccgggctggccgtaggtaggagccgcgccgggagcggggaattgcggagccgcattcgccgcgtacgggtcggcggcgggctgaccataggcgggagttgcaccgggcgctgcgccgggtgcggaagaatcgggagcgggctgcccgtatgcgggctggccgtaggccggctgtgcgggggccggagcgttgaattgcccataatctggctgtgcgggggctggagcaggtgcgccgtattgcggcgtgctgggattctgctgggccggggtaccgttgggcgcgggcatctgcggcaacggcacgttgttgggatcggtcattgattcccctttcataagacgattgcgtcgactcctattcttccatcgtttgggtaaaaaactcaacaattgcgccaaatggtgtcgaagccttgcgtgcgggcgtgtggatggcgccaaagtaggtgtcaaaacaggtgtgaagacaggcatcaagatatcgggcactaccaaagacaggcaaaagagatttcgttggaaaatggccgttttgggatggtgttggctcgaaatgtcaataacgaagcaaaagagcgaggagcgctgctctccgcgtccggcgcgcgcggcacaataggggactatgactgatgctgaaaacaccaaacccgaactgcccaagaacgttcgtgttcgcttctgcccgtcgccgaccggaaccccgcatgtcggcatgattcgtaccgccctgttcaactgggcggaagctcgcgccaccggcggcacgctgatcttccgtatcgaagacaccgacgccgtgcgcgactccgaagaaagctacaaccagatcctcgaatccctgcgttggctgggtatcgactgggacgagggcatcgatgtgggtggccctcacggcccgtaccgccagtccgagcgtaccgccatctacaaggatgttgccgccaagctgctcgaagccggctacgcctacgagtccttctccactcccgaggaaatcaaggagcgcaaccttgccgccggccgtccggccgagttcggctacgatggctacgaccgcaacctgaccgatgagcagaaggccgccttccgcgccgagggccgcaagcctgcgctacgtatcaagatgcctgatgaagacatcgccttcgacgatctgattcgtggcaccatcgagttcaaggccggctccgtgccggactacgtgatcgtgcgcccgaacggcgacccgctgtacacgctgaccaacccggtcgacgacgcgatgatggaagtcaacgtcgtgctgcgtggcgaggacctgttgagttccacgccgcgccagatcgtgctttaccgttaccttatggaacttggcatcgccaaggagatgccgctgttcggccacatgccgtacgtgatgggccagggcaacaagaagctctccaagcgcgacccggagtccaacctgttcaaccaccgcgacaacggcttcatccgcgagggcctgctcaactacctggccctgctcggctggtccattgcaccggaccgcgacgtgttctccatggacgagatgatcgagaagttcgacgtgcgcgacgtcaaggccaacccggcccgcttcgacatcgacaaggccatctccatcaacgccgagcacatccgtatgctcgagcccgaggacttcctgcgccgctcggtgccgtacctgcaccgcgatggtgtggtttccgccgacaactgggatgccctgaccgaccgtgagcgtgaggtgctgaccgccgccgctccgctggtccagccgcgcgtgcgcctgctgggcgaggtcgccggcatggtcggctccctgctgtccaccgaggagtatctggagcctgcggacgacgccaagaagcagctcaaggattccgccggcgaagtgctggacaaggccatcgccgcactcgaggctgtggatgaagctgactggaaga

SEQ ID NO: 2456 - DNA, 9931 bp, Unknown
  R50_10m  MAG No. k141_15688
gaccaacgttgtcagcaggaccaacggagcgaacgccgccccggaaccaacggaaccaactgaatcgccgtcacttgatgatgggcttctgggatgcggaaacatcaatctgatgtttgccggcaaagccagccgtgccagcggtgatgttcttgtcgatttcctcgacttccgccagcttcagcttcagttgcgaggagtctccccaaatgattacgcggtcaccgtcgttaagcgtggtggtcaccgaatcctgcgtctcagcggtgaccttggtaatggacttacgcatcgattccggcaatgcgcccagaatcgtcagcgcctccttcaccgaacggttcttgagactggcgtctatatccttgacctcgatcaccgggatgccatccacgttggcgttcttcaccgagttcaacacacgcgcctgggaatccaccgcggtcagggtatcgcctcttttcagcatggccgcaggccgttgcgccttgacttccacgctcatcgacttggggaactgtttggagaccttggcctcgctgacgccgggaatggacttgagttgctctgtgacctcatgggtggagaccaggaacaacgactttccagcctgcttatcggcgatggcatggatggtctgcgcgctcacccattcgttggcaccggatacgccgatctcgctggtttccagacgaaacaccgacgagaagagcagcagccacgttagccccgtcactacagccacgctgacgacagcaatcaacacgcgtaacgcaacgacacgtacgttcgcacgcttgcgttctttggcgcgttcggtgaaattcaccactttcgggcgtgatacgactcctagggagccggtggtctggtgcagcgtttcggcaacgtaatcctcgctgcgcaaccgtcgtgcatcgacgaaggcaccggcctggcccttggctaccgtcacatcgtcgatgatctccggctcgtcgatctcatgcccggaagacacggaccggggagcgcgagacttcgacgagtgacccgtgtttccgcgtgaaccgatggtgcgcggcttgcggggacttccggacgaacgacgtgagccgttgtcattgcccccggatctgaccgtgcgcccggacatcactcgcagctttcccgatgggcctcaagtgcggtgagcagcacctgatccatgtcggtgatgtcgcccgcgcccacggtgaagatcacgtcgccgtggtgggcacgcatggccatcatcttggcggccaggcacatatcctcgaccggctgaatccacgtgcctgcggaagcgtccttgagtccctcagccgcgtccacgatggtggaggggctgatgtccgggaaatcggtctgcttttcacgggccgggaagatgccggtgataatgacgtcatcggctttggccaaggattcggcgaactggtgcgcgaagaacttggtgcgggagaacaggtgtggctggaagatcacacgaatggtcgaatcggggtaccggcgtcgggccgcatccagcagggccgcgatttcggtgggatggtgggcgtaatcgtccactacagtgacctgcttgaccgtgccgcgcacctggaagcggcgtgccgcaccgaggaatgtgccggccgccttggccgcgtctgcggggctcacgcccagcagcacggcagcgctgatggcggcggccgcattgcgcgcattgtgcacgccaggaaccttcagggcaacgctctgagacaccggctcccccgccgtcaccgcggccggcagatgcagggtgagctgttcgacgccgctgcctgcggtctcgctttccgaagcgatccagacatacgcggcaccgcccaaatcgggcagggattcacgcgcggtagtgccgtaggcaacggtatgggatttcacgtcggcgggcatggcctccagcacggcaagtccgtcggggtcgtcgatactgatgatcacgtgaccggtggcccggccggcgtgggcaacgaacgcggcacggtagtgggcttcgtcgccgtaatggtcgagatgatcggcttcacagttggtgataatggcgatggtcggatggtatttggcgaagctgccgtccgattcgtcggcttcggccaccagaatatcgcctttgcccgcgtgtccaccgtccagcgtggtgccgtccgggccttggataaagccgccgatggcgtagcttggatcagcaccggcgttcaccagaatgtgggacagcatggagctggtggtggttttgccatgcgctccggccacggtgacggctcgtttgccgttcatgagcagggcgaggatgtcactgcgatgcacaatgcgcttgcctgccgcgtgcgctgcgacgatttccggattgtccggtttgatggcgctggagtagaccacggtctcggcctgggcgacattttcggctcgctgcccgaattcaacggtgatgcccagcgtttcaagtcggtcggttttggcgctgtgtgcgcgatcggagccgtccaccgcgactccttcggcgtgcagcatttcggccagaacgctcataccggcgccgccgataccgatgaaatgggtggcgccgagatccgcggggcgggccgcagcatcgaacgaggcatacgtggggtcaagcacgatgggctgatcttgagacaattcaaaactcctttggggattccagcaccctatattatgaccgtatctcgtgctgcgggacgggattggtctgtatcgcgcacgggatgatatctgaatactatttggatggttcggctaattgcagaacgtgccgggccatgatttcggcagcgtttctgatgccgtattcccatgccttgcggccgaattcggcaagtcgttcgtgatcggcgagcagatcgggcacatgctcatgcacccactgcggggtcaggtccttgtctgcgaccagcaggccgccgccggcgttcaccaccggttcggcattgaaacgctgttcgccgttgccgatgggcagcggcacgtagatggccggcagacccagtgcagccagctcggataccgatccggctccggcgcggcaaatcaccaagtcggcacaggcgaaggccagatcgattcgttccagatattcggcggtatggtagtcaccttgtccggccgattcggggccgatgccggtaagcacgtccgcgccggccgaggccgtgaccagttcgcgtacttcgctgattttgcctcgcccggtcaagtggatgatttgtgcgtgggccaacaggtctgcggcggaggaggcgatggcgcggttcaggctttgcgctcccagcgatccgccagtgaccagcaccagcggacggttcggatcgacgccaagctgcgcggccgattcacggcgtacggcggcacgatcgtcaccgatgcgtttggtcagggaggcgatggccgggcgcaacggcagaccgacacgctcgacgtcggctccggcacgcggtttgagaccggtgccttcgtacacggtaccgatgaaatcggcccaacgagcgcccagtttattggccatgccggcacgcgcattctgctcatggatggcaatcggaatgcccatcttgtgtgcggtggcgtagacgggggcggaagcatacccgccgaatccggccacgacatccgcatgccgcgtttcaagaatggagcgcaccttggcggtttctcgcttccattttgccgggaagcgcagcatgtacaggtcagggcgacgcgggaacggcactttttcgatggtgtcgagctcgtagccggcctcaggcaccaaatccttctccaaacccaccgcagtgccgatgacggtgacctgtgccgtgggttcgatgtcgcgaatcgccccggcgaccgcgagcagcggattgacatgtccggcggtaccgccgccagcaagaacgatatgtggtgtgccttgattcatgattaccgagtctacttacgcgctctgacgcgactgttttatctgcggttgagaacgcataagtcccacaaccagtccggccgccgtcaagcacatgatcattgatgagccacctgcggagacgaacggcataggcacgcccaataccgggaacacacccacgaccacgccgatgttgaccatggcctggcccacgatccaaatggtgacgcacatcagcaccatggcaacataacgatcggtgacctgcaatgcgatgacgatcatgcaccaggcgagaatcgcgaagaacagcaatacgatggcgcaaccgacgaatccggtctcctcgccgatgatcgcgaaaatgaaatcgttatgggcggccggcaggtaattccatttctcacgcgaattgccgatgcccaatcccagaaagcctccggaggcgatggcgtacttggcgtgaatggactggtagcatacgctctgcgcgtcagcggccgagcaatcaccatatgtggccagaatacgacgcatgcggttcgggctggaaaccgccaatgcaccgaccataaccaccgcgcccaatacgccgattcccatccatttgccggggaatccgacgatcaggaaggccacgcctccgatggagaccagaatcatggccgtgccgaggtccttgccgcccatcaccagcgccacgcctatcgcatacaacaccaacggcgcggcatatgctttgattcccttcttgtggtacatcttgctgcaggcatgcaacgacgagggcagccatatgcacatcgcgaacttcatgaattcggccggctggatagtggtgaagccgaggttcagccaacctttgttgccgtagacgtcgatacccagcggagtaaaggtcagcgcctgcaacaggcaggcacccaccacaaagaacacgccggtccgtttccagaacgtcaccggcatcgtcaatgccacgaagcccagcaccaagccgatcaggcaaaacgcgccctggttcagaagctgaaggaacggcgacttgcccagtgcggccatggtgaccgtggagctggagaacaccatgatcaggccgaagcatgtcagccccaccacggccatgcggaatccgtggtagcaccatagcgggttgagcaagcttcgccaacccgtgtagtcggtgatctcgagtgcgggcctgtcaggggctctgtatgccttacgcttatgggtatcagtggaggccatgcacctcgctccacgtcttggctgcggcggcgaatcgattgcctcgatccgcataggacttgaactggtccatggaggcgcaggccggagccataagcacgatgtcgccggcggcggcatacgtgccgcaggcttcgacggcacgatccatgacggtatcgttgtcttcgggatcgatgatggtcaccgggatgtccggagcttggctggcaaacgcttcgaccatcggctgctggtctttgccgatgatgacggccgctttgatggtatgtgcctggtccttgaccaggtcctcgaatcgactgcccttggccagacctccggcaatccagatcacagacttggccgggaagctggacagcgaggcgcgtgccgcatgaccgttggtggctttggaatcgtccacgaaacgaacggagccgccctcgactgcggcctcagccacggtttcgatgcgatggccgcccggcttgaacgaggtaagcgccttcaacgcggtatctcgatcagcgccaagtcccagcaccaacgccaatgccgtcaatgcatcggccaccagatgcgggtacagtgagccgtccggctctgccagatgcgtgaaatcggtgatggcggccagtctgaccggctcccccactgcgccgccggccacgccgctcctgtccacgatccagccatcttcaatgccgatctgaccggcctggggggcctcgagcgtgaatcccaccttgcggcatccttcggcggtttgggcctcggccgccagttcgctgactttggcgtcctgcgcattgtagacgatggcgcgtttggcgttgtggaacaccttggatttgtcggcggcgtaattctcgcgcccgccatgccagtcgaggtgatcgtcggcgatattggtgatcgccgcgcagtcaagtgccagcgaatcggtgaagtgcaattggaaggagctcagttccacgcacagtacgtcgtgctgaggattggtggcgcaacgagacaggctcatgctcatgtctccggaggcgatattaccggcggtcggcgcgtcgagtccgcaggcggtgagcatttccgaggtcatctcggtggtggaggttttgccgttggtgccggtgatgccgatccatggagccggagtaccggtgcgctcgttattcacacgcagctgccatgcgaattccacctcgctcatcacggggatgccacggcgttgggcttccagcacgaacggggtgcgggggttgaacaccggggacgacatgacgtagtccacatggtcccagtccacgtcatcaaaggagcggagaccggcctcgggcttcctctcgtcgacgccaatcacgtgggcgccgcattccctcaatacctccgccaacgaggtgccggacacacccagtccagcgatcaccactgtcttatccgctacttgcattgttcctcctgatataggaattccgtgggtgagcataatcccacccagatttccgctagctgaacagcaggccggagcgggtgacccagtcgccgtagaaaatcgtcagggcgagcagcacgaagatgagttcgatcatccagaaccgcaccaccaccttggtttcggtccaacccttcagttcgaaatgatggtggatcggtgccatcttgaatacacgtttgtgggtcatcttgaagtacccgacctggatgacgtcgctcatggcttccatgacgtacagtccacccagaaccaccgccaggaattcggtgtgcgtggcgatggacagggctgcgaacaggccgcccaaggccagggacccggtatcacccatgaaaatcgatgcggggttcgagttgtaccacaggaagccgaagcaggcgacggccgcgcatacggcgatgacggtcagatcgagaggatcggacacggcataggaatatccgccatggctgccgcccttgatgtggtagctttcccagaatgcgatgatgccaaaaccggtgaaggcgatcatcgacgaacctgccgccagaccgtcaagcccatccgtcagattcactgcgttggtccatgcggtcatcaggaagttcacccagatgacgaacaggatgatggttacggcacggccggcgaagtcgaagttgaagaacggctgttcgatgaagctgatgcccgcctgcgcactggggaatcccgatttggtgggaatcagcagcgcaagtaccgcgtagatggtggcgaagatgaactggccgatgaacttgccgcccaccgataggccttcgttctgcttcttacgcaccttggcgaagtcgtcgataaagcccagcagacccatcgacagcatggcgaacagtacgagcaccgcggaccaggagggcacgtcgcccgaacgcaggtatcggtacagtgcggaggatgcccaaccgagcagaatcgcgaagttgatgaccacgccgcccaacgtgggggtgccgcgcttgaccagatgcgactgcggcccatcctggcggatgtactggccatagtgcagcttgtggaccagccgaatcagcagcggggtgccgactaaggtgacgatgagcgacaccagcattccaatgatcagagcaatcacgtgcagcttctctttcttgtcggtttcttggggtggttatcgggtcagttctttgcccagcgttcagccaaagcgctcaggcctgacgcgtgcgatcccttgagcagtaccacagcgtcggaatggttgcgcgccaagtcgatgaccagctgttcggccgcatcgatgtcgtgtacgcaatccaccgacgcggatggggtctgacgggcaccgtccgccagagcctgtgccagtgcatcgagatgttggtcttgggcggaaccgaccgcgatgatcgcgtcgatgcccaattcggccgcatacgtgccgatagaggtgtgcaatgccgtctcatcggcgccgagttccagcatggcacccagcagcgccacgcggaacggatccttgccgtcatttgagttccaagccttcaacccgttcaggccggctttcatggagtcgggattggcattgaaggaatcatcgatcagtgtgaaggaagtcccctcgcgattcaccgtggacaatgccatgcgatgagggctgatggtgtgctgcgaggccagaatccgcgccaccgtttcgggtgccataccgtaacgcatcgccacggttgcggcggccaacgcgttcatcacgttgtgacgtccgggaatgcccagatgcaccggcgtatggttgccgtccgcatcgaccaacgtgaattcagcatgatcggaccggtcggcagtgacatcaatggcccgcacctcgggctcctgcgacgatcccaagccgaaccacagcacatcgccgctggccaggccggccatgggaaccacgtgttcgtcatcggcgttcagtaccgcggtgcctccgggaagcagtccctgcacgatttcgcttttcgcctgtgcgatgcgttcgcgggagccgaattctccaaggtgagcgacgccgaccttcaatacgattgccgtgttcggcggtgcgatacgggtcagtcgcgcgatttcgccgatatggctggcacccatctcagccacgaagaaccgggtgtgctcatcgacccgcaacgcagtgagcggcaggccgatctcattgttgaacgatcccaccggagccacggtcgggcctacggtggcaagcagggaggagagcagatccttggtggtggtcttgcccaccgaaccggtcaatccgatgatgtcgaagtcgccgtccagctcgcggcggcgaacgatgttgtgtcgggcgagctcgccaagggcgtcgaccgtgtctttcactacgatctgcggcaggccatcggactccacctcatggtcgacgatggccaccgtggctccttgtccagcggctttcgccacaaagtcatgcccatcgacacgctcgcctcggatggccacaaacaccgatccggggccggcctgccgcgagtcgctgaccgtattggtggctcgagactcggaatcggcgtctccgatcaatcgaccatcgacggccttggcgatctcctccacgctcatcggaaccatggtgtttcaaactcctttacgattacgcttcgtcccgcatccacggacttaattgagattattggccacatgcagggcactgcgtatgttgtttttcctcacgccggcggccagtaccatggcgatggccaaggacatgtgcccgagtcggacgcggtcgtacatggccggtgaatccgcagccatttcatccgattcgggtgtcgacgaggtcatggacatgtcatgttccgcaacgaatgcgtagcgtgtcttcaattcgttcaagcttgcgcttgcgttgacatcctccgtgcccagtacatccacgttcaccgattccaacgcatgctcggccaacgtgcggtcatccatggcgatgatcacggccgccacaccgtcttcggcgcacacggacagcgcgcgctgcatatcgaggatgcccagaggatagttcaggttcatggtacgtgtcatcgacgtggacccggatgcggtgattaccgccaccggattgcccagcatgtgcaggaattcggagagctgggacacgcctgcgtcgacggcctgctcatccgcaccggtcaccgcgaacaccgccatggcattggacggtccgccggccagaccgctggccagatcgccgagtacgcgatcgtcgaaatcgccgtaga

SEQ ID NO: 2457 - DNA, 10015 bp, Unknown
  R50_10m  MAG No. k141_15750
aggcacagaccggccaccaatgccgcggccagtccgccggccaacgatttcggtatgtggcgggccagaaaatcggcgctgacgaacgtgctgaccgcggccgacatcatcgcgcccagcagcatgaacggaatcgcctgcaggataagccccgcggcaccggtgccgatacgcaccagcggaaccggaaacccacgcgactcgagcatcgcggaagccgcaatcaggaacgccaccagcggcgtgccgataatcagaaacagatagttcgccgaatggtcctgttgcgcggtgttcacctgttccgtgcgctgcgtgcgaggttctttcatgcgaatatcacctgccatatcgccgtcatattagcaccgtacgcatgatagtggtcgagataatatgcgagttccccgcataccgatggtacacatcgatatgcggggaactttgcacatggttgcctgggccgatggcgaatcggtgggccagcatctcggtggccacttcctccttgctcatggatgccgggtaatacgtgggccagttgtccatttccttgagggtttcttcctgtcgttgaagtgacgttgcacggtggcggcggtggcagaaccggccccggccttgtccgcgtagacggcgttgatggcttcggcggccttcagcacggcttccgggctgaaccacaggtgcgggttcgtagcaccatggtggtgatggcggccttcttcgccctcggcgtggtcgtgggaatgctcgtgctcgtcggtggcggtgacgcccatgaggccgcccgcgttcacgatggtctggcgtttcttgtcaagctgcgccttttccgcccagccgtcgtagccggcgccgttgagcaccacgatgtctgccttggcgagcttggccagatcggatgcggtggcctcataaaacggcggttcgccccggcaggtgacggcatacggaaggaaatgggagaaagaacgtacgccgccggcctgtggagcgggccgtcgagttgttgttacgagacttgatggattgcggaatccacgatgttggttatggcttcatatacccctttcgtacggctgcggccagattctgcggaacctgaaccacttcgccttcaggcgttctgaccgtggccagctgaggcaccttggccttccagttggctcggcgcgaatgcgtgtttgctcgggacgccttgtacttgggcagtgccatcagccttgcctcgccttccagtgggggttcttcttgttgattacatacagatggccgcgccggcggacgacataggagccatccttgcgggccaatgagcggaccgatgccttgaccttcatgtccgttcctttcttcttgtcttacggtctttgcggaatgtgcggcgaatcacttgcgcccgtaacgagcgttgaacttctgcacctgaccggcggcgtcgatcaccacattcttgccggtgtagaacgggtggctgtagctggacacctccacattgacgagcgggtaggtgttgccgtcctcccagtcgatggtcggcaggtttacggccttggccaccagtgtggacttggtgaggaagtacttgtcggcggagcggtcatagaagaccacggggccgtattcggggtggatgccctcttgcatggttatggacctttggttgtgtggtgttgtgtggtgatatggatgagaatggcgtcggacgcacgggtggaatccggtgaattgagatggcctgagacggcctgacggccggttgtgccggcccgatcaccagctggatttcaccacgccgggcagtttgcccttgtgtgccttctcacgcagattgatacgtgacaggccgaacttgcggttgtaggcgcgcgggcggccgtcgatggaatcgcggttgcgcagacgggtggggctggcgtcgcgggggagggcctgcagcttgcgcatcgcctcggcgcgttcttcggcggtcagatgagggttgacgctgtcgcgcttgtattcggcgcggcgttcggcatacttggcgaccatgcgttcgcgctgcaattgtcggttgatcttactggttttggccatgtccggctccttgataaggctccggggcgcgggaatcgcgccggccggagctgggacgagtgcattcgttcattgggcgcatgccgcaaggttcggaagatgagttcatgaaatggtgatagaggaaaccgccggaatgccaacaaggaaacgatttcggcgggtgcttaagcctcttcctcgcctcgcgactggtgtccaatgaacgaacagatggattagcgggtctctcggaagagcacccgtttgcggactaccggatcgaacttggtgagctcaagacggtccggcgtattacgacgattcttggtggtggtgtaggtgaatccggtgccggccgtggacttcagggtgatgaccgggcggattgcggaggatttgcttgccatgagtggtgctttctatgtgtgggtgtcacgctgttatgtcacgtatgtcgcgtacgtcgcggtgccatgtgggtgatgcagctcgttagcgcggtttgttgcgcggttacgcgccggcacagtggcgggcctactgactgcccgagcatgggggtgatgccgtggccggttcagttgacgttctgatcgcggcggatgcgggcgatcgccgcctcgatgccgatgcggtcgatggtcttgatgcccttggcgctcacggtaagcgtgacgtgccgctgcaaggacggcacccagtaccgcttggactgcaggttcggggcgaaggttcggcgtgttttcctgtgcgagtgggagacgcggttgccgaccccggcgcgtgttcccagaatttgacatgttttggacatgcctgcaactatatcataatgataaccattatcaaataagaaaggctgtcatgattcatccggcattgcaatcacagggaaacgcggaggggcgcacgcccgtggtgctgctcaccggcgccgaccgcctgagcctggactccgtggcgttctcgttggtcgattccttcccgtccgtatgctcgattgcttatgacgtgcgcccgaacgaagccgtggaatccggtctcgatatcgtgcgcaacgtcgcgaagccccaggcaagcggggtggtgttcggcgagtccgattcgttcgggctcgaggggtgctgcatgagctgcacggtcaaacatgaccttgaacggacgctcggatcgctgcaagggcgggccggcgcgtttctggtctcgctgcctgtgggccttgaggccacgccggtcgcgcagtatctggccgattccttccgtctcaacgagtggggtgagtcgatgttcgtgggtgcggtggccaatgccgtaggccttgacgaattcgaagagcgattctttgacgacgaccgtttgtgcctgtacggcatgggcgaggagaacggcgtctatgacgagcgttcgaccggcgtagtggtctcccgcctgatccgtgaggcctcgtgcgtgctcgaattgccggtcattggtgccggttgcctggcacgccatttggatacagacggggagtgcgcctgccgcgacatcatccgtacaatcgccttgcgtgatgcgctggtctgtgaggatgcccgcaccgtggggctcgtcgacctggtgcaggcgtcggtctgtgccgcgatgccgttgtgacatgtgcggcaaacggcagaacccccgcgtccgaacgaaggtggcgcgggatttctgtcgtttccgaggccttaaatggcagaacccccgcgcgggtatcgttcggacgcggggatactgccgtttcgtctgccgaaaacggcgggatcccgcgttgtcatcgtcggggcgcgggatttccgccggcagcgcgggtgtgcgcgtgcaacacaccgacgtaaatgcaaatgataataattctcaatacatgttattctgtcgtgttgggggccgggcgatgatgcagcaacagcagcatcgcccggccaaacagccgaattagagaggaaaatccaatcatgtccatcatgtccaacgccaagcgcgcgctcgccatcgcggccgccgcggcgaccctgttctcgatggccgcctgcggttccagcaatgccgccggcaacaagtccgattccagcagcgccgcgtcttccggcaagatcgaggtcgtcgcctccatcaaccagtggggttccgtggccgaagacctcggcggcagcaacgtcgaagtcaccaacatcatgaccaagaccaacgttgaggcgcacgattacgagcccaccagccaggatgttgccaagttcggcactgccaaggtggccgtggtcaacggtgccgattacgacccgtgggccaccaaggccgcccagtcgaccaaggccacgctggtcaccgccgccgaaaccgccggcatcaaggaaggcgacaacccgcacgtctggttctccgccaaggtgcgctccaacaccgcggacgccatcaccgccgcctaccagaaggccgacccgagtcacaaggacgactacgccaagctcaacaaagaatggcacgccaaggaagaccagcttgagtccaagatcaaggagacttccgccaagaccgagaacctgccgtacgccgccaccgaatccgtggcctggcacttggccgacgacctcaagatgaccgacgccaccccgaagggctacgcccaggcttccgccaacgagagcgagccgaccccggccgacatcaaggacttccaggacaccctgaagggcggctccatcaagatgctcgtcttcaacagccaggaagccaactccaccaccgaccagatcaccggtgccgccaaggacgtcaacgtgccgatcgtggagctcaccgagcagatgccgaagcagtacaccaacctgctcgactggatgagcgcactggtcgaccagttcgccgccgccgtgaagtaatgcggcggtagccggcaatccgcaacagcaataaggggaataatcaagtcagatagcgaggcgttgcctaggggagaacagaacgcttcgctatcagggaaggctccttatatatcagggtgcttcggggatgtcccgaggcaccctttgcgttagggtgaatagttaggaaacggtaagaaaaatagtggaactatggattttccaaggttcagcggcaacaatatgcccttgaaaagtcacatacggaaacaggcgaatgagcgagaacactagtagtatcaccacagtgaaaccccatttcaagctttgggtcaaaaaggccgaagccaatgaagtcacgccccagcacccccacaagcccttccccggctgggcgtacggcgtgctcttcgttatcttcgacattattgttgtgacggcgctcgaagtgggcgtttcgtccagctccacccgtgtgcaactgtccagtccgaccgtcggattcggcttcgtgagcaagatgtggaccgacggcaatttcgtattcgtactcaacgtgatacttgtcgcgttgctgtacctcatgttgctgatgctgttcaacagattctggacggcaagcatcgtgattcttgcggtcggaatcatcgtggccgccatcgaacatttcaaggtcgagatccgttacgaggccattctgcccgccgacctcggcttccttggctcgaacaccggcaatatgctcaccttcattccggccggcgcgcacgtgaccatcctcgtggcacttggcgcgttcgccgcgctgctcgccctgattctggtgctgcgccacttcgacgggcgcaaaggtcgcatgatccgtacggacaacctgagcctgaacctcacctcccgtctgattctgctgctgctgccgattctggtgttcgcgttgtactgcattcatgtgagcaccaccgattcgctggccaacaagttctcccgcgccttgggagacacgccatccatgtgggattccgtgtatgacgcgcagcgcaacggtccgctcgtggcctttacccgtcagctcaacccgaagatcatggacaagccgagcaactactccgaggagaccatgaagaaggtcgccgctcgctaccagaaggaagcggagacaatcaacgcctcccgcaccaacaacctcactgattcgacagtggtgtacgtgctgtccgaatccttctccgacccgagccgcgtgccgggactgaagaccaataaggattcgatgcccaacatccgcaagatcaaggcgggcaccacctccggcctgatgctctcctccggctacggcggcggtacggccaacctcgaatacatgggactttccggtctgagcatggccaatttcgattcctccctgtccagcccgtaccagcagctggtcccgagccagcattggacccccaccatcaaccagatgtggggtgcgcccgccaactcgctcggctaccatccgtacgagtccagcatgtactcgcgcgctacgaactacaagaagttcgggttctcgcacttctacacgctgaccggtccggacgtgatcaagtatcaggacaagattgacgagtcgccgtacgtctctgataagtcttcctatgattctgcgctggaaggcatcaggtccggcaagacgaacaagttcattcagatcatcaccatgcagaaccacatgccctaccacgagtggtatgagaacaacgactacaccgctgaatccaccacgggtacgccgctgggtgatgatgaacagcagtcgattgagacctatcaaaagggtgtggagattaccgatcaggccactcaggagttcctgaacgaactggatgcgctggataagcccgtcaccgtagtgttctacggcgatcacttgccgggcatctactcgtccgccagcgaggatggcaacaactccttggccctgcacctgaccgattacttcatctggtcgaataaggcttccagctcccaaggcaataaggcaagcgatgcagcctactcttcgccgaacttcttcgtggcacaggccgccgatcacatgaacgccaaggtcagcccgtatctggcgttcctgaccgaaatgcattccaagattgccgctatggaaccgcctgtggtcaacaaggtccaaggctgggatcgtattcccgaaggccagaacatctatctcgaccaaaacggcaacccgatgtccaccgatgacttcgacaaggaaaccaagcagttgcttgccgactacaagctcatccaatacgacatcaccgccggcaaaaactacctcaaagacacagattttatgacgttgccgtaaagcagacagcccggccgaaccgtaaagcggatagctcagtgggctatccgtaggtgaggggagcggctgtgccgcgacggaaaatccggaggattttcggtctgtaggcaacgtgcgagccgacaggcgagccagcaaaacgcgggcgaagcccgtccaaaattgctgtaccgttgccatagtgctgtgagctccctctgatgagggagctgtcgaacgaagtgagactgagggagagatcccacagaccaatcactcccgccttacaataaagccatgaagcgcatcgatgtgaatcatggctggcggttccgttcaattggcaaggaccgcgatacggcaacgcggcagccagtcacgctcccgcacgatgcgatgattcacgagtcgcgcgaccctcgcgggccgcacctcgcgattcatcgaacgaggacatgacggcgtggccagctggtcatgggcgggctatgagggccgcgacgccatcgtgcatgtcaccgatgaccgccgcattgtggttgatgcaggcgggcatatcgccgtcggaccttctgccgaagctgtggatgtggaggtacaagtggactctgtggccgcacaacacgacctgcctgccaatgccgaactgctcggcgtggccagcgccaatcccatcaccgtcgatgaactcgccgacaatacctgcaccacctacttcggccgagcccaagctatttggcgaataccagccgaaacgtctggtattgcctgcagcacaaacgccctcatgccatcgtcatgacggtacgataggtacagtcgatgcccggaaaaccgacccgggcatcctgcgggaaggatgtgccatggtcaatgcggatttcgctcagttgcgtcacgcctacgaatccgggtgtacgcggccattggcttggcgacgggcgcaattggatgcgctatgccgtctggtagcggacaatcgtgatgctttcgtggctgcggccatggccgatttgggcaaacccgcggcggaaaccatactgatggagctgaatctggtggccggcgaggcgcagttcgtccgcaaccggctcggactgtgggccgcgcgccatcccaaggcgatgcattggatgctgcaacccgccgccggctggacgatcgccgagcccaagggcgtggtactcatcatctcgccatggaattacccggtgctgttggctctggagccaatggccgacgcgctcgccgcaggcaacgccatctgcctgaagccctccgagctttcgcccaacacctcgcgcctcatcgccgaactcgtgccgcaatatcttgaccccgagtccgtgtgcgtggtcggaggcgggcccaaggaaaccggcgaactgctgaaatgtccgttcaaccatatcttctacaccggcggcgggcacgtcggcaaaatcgtcatgcgtgcggcggccgagcacctgacaccggtcacgttggaactcggcggcaaatcaccgtgcttcgtggaccgtacggtggatatcaatgtggccgcacgacgtatcgcatggggcaagttcaccaatgccggacagacctgcgtggcacccgactatgtgctcgccacgccggatgtggccgaggctctggccgagcgcatcgccgtagccatcaccgaattctatggcgaagatccgaaggcctcgcctgattttggtcgtattatcaacgatcgtcattttgaacgactgtgcaagctattgccggtcggcaccgtgccgtctgaggagccgagctcgccgctggtacaggtggcatcggcggtaggcgcggccatggatatggtcgggcggcgcttcaatgtcgtggctgccggacgcggaagcgcgggggagacagccggtggtggcaccggtagcgcgaacaatgcggcgaagccggcggccggttcgaatacggcagccgctgatagtgatgcgactgcctcggccgctgttgagccgagcgagattcacaaggtgcccggcgtattcgatccggccgggcgaatcgtttgcggaggcaaggtcgatcgcgccgcccgatatatcgcgcctaccgtgctatacggcacgtcaccggatgcgccggtaatgaaggaggagatcttcggcccgattctgccgatcctggtggttgaggatgccgagtccgcaatccgattcatcaacaagcggtcccggccgttggctgcatatgtgttctcgcgcgatcacgaggttcggctgactttcgaacgtcagaccagctccggagctttgggatattcgttgccgttgggtcacctgctgtccagccgactgccgttcggtggcgtgggcgcgtccggcatcgacgcctaccacggtaaagcaggcttcctcaccttcagccacgtcaaaaccgtggttaccaagccgcagttccccgacactctgcgcctcgtgtacccgcccttcaatgaagccaaggccaaactgttcaacatcatcgccaaattcagctagcgtgatatcgctcgctgatattgggtgatggcgttgtcatagtgacgttcgctgtcccggcagccacgtcaatcgattgattcgtgtaccgggccagatttttctgtcctggtatttgatttcgagtcattttctgcttaccgggacaaaactgacgccgaaagtatcgtccgcgtattacgaaaatggcggaatagtgcggttttgcatggaatggaattcca

SEQ ID NO: 2458 - DNA, 31149 bp, Unknown
  R50_10m  MAG No. k141_16229
cgagcggtctaaggagcacgcctcgaaagcgtgtgaggtgaaagcctccgcgagttcgaatctcgccttatccgcctgcaagggttccgaggtcatctcggaaccttttttgtttttgcggaaccccatctttgggttaagtaaagaaaagtgggttaaaaagtgtctattccctcgtgtcatggtcaggttgatcgcccgacccatccttttctgatcccgaacccgctctcgtaggcgtcgacgccgtcggtcggttcctgcacggccgtcatggtgccgggcatgggcccgtcattcccgaccggcttccccttcctcgtcctccggtgttcaggtgtgacgagcgccatggggccgggctgctccgtgagcatgtacaccgtccattcgcagcagcgtctcatatgctcctccgacaatccccggtggtggtcgagcgcgcgcttgaccacggcgttgacgccgcccttcagctggttggtcgtcgacggcagcgggccgccgctcttgaggacggccggatcgcagaacgcgaacagcacgccggcccggttcagtctgaccaatcggaagtgggcgcggcgcaggcgttcgtgcgtccgccgccacttgcgtcccctcgcgtgcatgggatcctgtttggcggtggtgcgctccttgaagtgatcgtcgtgcctgccgtgccagtcgttgagctccttgagccatgcggcgtcctcgtcggccgtcgtcgccctgacgagcctgcgggcgagtccgggcagctccctgccggcctcgctcttgggcctgttcgtcaggtcgacgcgggtgttgcgcagcacatgcaccaggcagcgctgcacgttgcaggcgctctccgcgccgcgcagcccgtccgttatcggcacgtccggagcagggatgcgcgagaacaacgccatataggcggccttgctctcgttcgagcaccactggaagcccggcacctcgccgttcccgccgtcgatggctatgaccaggcaccagccgtggttcatgtacgtgccgtccgccatcaccgtatgatgtttcaccctgcacggcgggatggcgggccggatgttccggcaccacgcggtgcgcttgcgcagggcccgcgaatcgccgttcgcgtcgcacgcggactggctcgcgcggccgagcagccatccaaggaacgcgtcgagctgcccggcccgctccgtgttctcctgtggcatcgtcgagctcagcgagcaggatgcgcacttccagcgctgcaccccttcgcggtccgaccgttcttcttcatcggccggccgcacaccgggcatttcttcgccttgctggacttcgttctcatgcgtccagcccaccaccgggacgcccctattttcccgccgggaaaaataacaccccggcacgcctactcccacaaggccaaacccgggttataagcaccacaaaagttcctataggccgtgttcgtttctgttctgttcaatgttcgttttcaagcgatacttgaggacagcacacggcgtgttgggcgaaaatctgcgaattactccaacgttatactagttgcgtttgcgcggttttgcgtactggtgtaccttgtgtatcagcagtcggtacaaggttgtactaaatagaaagaagtgttcaaagcaaccgattgattcgatgattctcccataagaggtggtttccgcttcgtatgcaccgaacattgtttcagaaaggttgtggttcttttttcgcctttaagacaacgttgtactaactctgtgagaaacagtaacaggaaagggttcctatggcacaagaagtcactgcgaacaaggcgcgtctcgtcgtcgatgacgcatttgaggtcgcgccggtcaacaatcgtctcttcggctccttcgtggagcatcttgggcgttgcgtttataccggcatctatgagcccggtcatcccacggccgatgaagatggtttccgtcaggatgtgattgatctggtccgcgaactgggtgccaccaccatccgatatccgggcggtaattttatgtccggatatcgttgggaagacggcgtaggcccgaagggtcagcgtcctcgtcgtcttgatttggcttggcattccactgaaaccaacgagttcggcctgcacgagatggtcaagtggctggacaagtgcggcggcaacgaactgatggaagccgccaatctgggaacccgtggtttgcaggaagcgcttgatttgctggagtattccaacattcctagcggaacggccctttccgagcagcgccgagcaaacggtgctgacaaaccgttcgacatacgtatgtggtgcctcggcaacgagatggacggtccttggcagattgggcacaagagcgccgaagactacggcactcttgccgcttcggtcgcggcgggcatgcgcatgatggatcccgaccttgaactcgtggtatgcggttcctcttcccatgagatggacaccttcggtcgttgggaagaaaccgttctcgagaagacctacgaagccgtcaacttcatttcgtgccatgcttattacttcccggcccttaaggaagatggcacccgcgatatgggcagcttcctcgcatccggcgtcgatatggacggattcatcaatgatgtggcggctgccatcgatgccaccaaggcccgtttgaagagcaagcatgaggtctacatctccttcgatgagtggaacgtgtggtatcagcatgatgagccgagcaagaatccggaaggcatcggcaactggccggttgcgccgcgtctgcttgaggatctgtactccgtcgcggatgctgtggtgtttggcgatctgatgattaccttgctgaagaatgccgatcgcgtgcatgcggctagtcttgctcagctggtcaatgtgattgcgccgattatgactgagcccaatgggccggcatggcgtcagaccacgttctacccatttgcggtcactgcagaatatgccaagggcggtacggtgcttgagccgaaactcgcttctggaacctatgacaccgctaaatatggcgaggtgccggtcgtcaattcggtggcggtacgtggcgcggatggtacggtcagtgtattcgtggtcaatcgttctttggacgctgagcaggacttcgaaatcaaattgcctgaaggcctttttgcgaaaaccgtcacggcgcagacgctgcatgatgatgacctactcgccaagaacactctggacaatcagaaccgtgtcgtgctgcacgacaacgacaccgcatcactcgatggagagaccggtacggcgcatgttgtgctgccccccgtgagctggacggcgttgcatttcgcttaatcgtagcgggcgcgccaacaacataactgtgctgcgggatttcgttaatcgcttcgacgaatttccgcagcgcccataactaaagaacaataaggaaagaacaaatgagaatccaaaggaggagctcatgaagaaagtaacccgggttatggcagccattgcggctggcgctatggcattgaccgtaagcgcttgtggcggaagctccaacgcgaatggtgccaaggtcaacagcgataagaccgctaatgacagtgcatcctgcaccaataccgttaagaaaaagggtgtgcagaaggttaccgtttgggcttggtatccagctatcgaacaggtggtggatgatttcaacgaaacccacgatgatcttcaggtttgctggaataacggcggccagggcggcggtgaatacaccaaattccagaacgccattaaggccggtaagggtgcccctgatgttattcagcttgaatatgaagccatgccccagtttatggccggcaaggagcaacatctcgtcgatttgagccaattcggtttcaccgatcataaagacgattacaccgaaggtgcctggaagagcgttcagctgggttctgaagacaaggtttacggtgttcccgtcgaccttggaccattcgtcatgtatgtgcgccaggacatcttcgacaagtacaacgtcaaggtgccgaccacctgggctgagttcgagcaggccggcaaggacctcaaggcagccggatacgacggctacctgactgatttcgcgccgaatggcaccgcgttcaacattgcactgttcgcgcagaagaatcagaacgtctacaactactcggcgtctgatcccaccaaggcctcggtgaacttcaacaccgatggagtcaaggaagtgctcgactactggcagaacctcgtcaaagagggcctcgtagacaccactgatgccaacacgaacgactggaccaccaacattcttggcggcaagtacgccacatgggtgcaggcttcgtggcagaccggctatctgaagggtgccggcgacaccaatggtcagttccgcatctacaatgctccggtgtgggatgactccaccccgatggtgaaccaaggcggttccgcttgggccgtaaccgatcaggccaaggacaccgaagccgcatacaaggtggcacgagagctgttcgattccgacaaggctcaggaaatcggtgttaccgatggcggcctgttcccggcttggaccaagaagctgcagtccgacagcttcaagaacatggaggaggagttcctcggcgggcagaagctcaacgagatcaccattcccacggctgagggttacaagggctactcattcctgcccttccagacctacgcatacgacgagcaggtaaagacgttcactagcatcgtcaaggatggcaaggataccaccagcaacctcaagagcctcgatgagacgctcaacaactacgccaagcagcagggttacactgtcgaataaccctgacagcaggtgagttgcgggctgggccaacggctccgaagccaaccggctcggcccgcagcttcttcacctgattattggagatacacatgggtaaaaacgcaacaaagaccgttagtaaagacggtatcgtcactcgtcgcggcaatatctggggatggctgttcactgctccattttgcgtgattttcgtgattttcctcgtagtgcccctcgtatatgcattcgttatgtcgctgttcacatccaacgtgttcggcgtccaattcaccggtttgtcgaattaccagagggtgttcactgacccgttgttccttaagggcatggggcgcgtgattctatacacggtggttatggttccgattcagcttggcctggccttgttcttcgctctgctgctcgactccctcaaaaaccgcttcgcatccgtgactcgtttggtcattttcctgccgtacgcgattccaggcgtggtcggagcgttgatgtggggcttcatgtactccaacaacatgggtccatttaccacgtttttcgagttgttcggactgcctacgcctggcttcctcactcctgatggaattttcggcgcgttggtcaatgtggttacttggcagtggaccggctactacatggtgattctgtattcggcacttcaatcggttccgcatgagctgtatgagtccgcgcgaatcgatggtgctacggaactgcagatcgccacacgagtcaagattccgatgtgctccagctcgatggttatggtgaccatcttctccctaatcggaaccttgcagttctacacggaaccgacggtactgcgcaatcaggcaccgacggccatacagccggaatacacgccgaacatgtatgcacaggcactggcgttcaactacaaccagcccaactatgcggcgacggtttcgttcgccttgggactcatcgtcgttatctttagcgtcgtctttatgaaactgacgaagaaccaatcgggattggaggactgacatggctaagaatgcacgcaaagctgctaaggccaatcacattcgtggcaattcgagagtgtttacgattgtagtgttctgccttgccatcgtttacttcctcattccggtgtggtggcttatcgttgcctccaccaagaccaataacggcttgttctttggcgcgcacggttcactgtggtttgacgacaagttcgcgttattcgacaacatcaagcagctgaccacctatcagggtggcatctactggcgttggattctcaactccttcctgtatgcgttggttggtggactgggcgcaaccacggttgccgttctcgccggctatggcttcgctaagttccgcttccgtggcaagaagatgttcttcaatctggtgctcgcagctctgatgatcccgaacaccgcgttggtcatccccaccttcctgctgatgtcgaatatcgatatcgttgatacagtttgggccgtgttgcttccctcgctgctcaaccccatgggcgtgtacctcatgcgtatctactgccaggaatcgttgcccgacgagatgatcgaggccgcccgtgtggatggtgccggcgagctgcgcacgttcttccaggtgtcgctgccgattatgaccccagccatcaccacggtatatctgctgtccacggtgggagcttggaataacttcttcctgccgcaggtagtgttgacgaacaacaagttattccccatcactgttggtctgacgcagtggcaggtcaagtcccaggctggtgcggcttctgaacaggtgtggaatttggtcacgtccggtgcgttcatatccatcatcccgatggtgctggcctttctcttccttcagcgctactgggtgggaggtcttacggccggttctgtgaaatcctgacgacttggcgggtcttctccttcggcccgccttcgctctcgacgagcccgacgcacatccttcgcttctttcgatgtgtgtcgggctcgttttcatagtggcattattgaaggtaaaccgtaattacaatgtgaataatgagcaaattgttaaggagtgaataatgcctaggcgtgtgaccatcaaagatgtggccaaagaagcgggcgtttcgttcaaaaccgtttccaatgtgctcaacagtactggcagtatgcgtgactccacgcgagaacgtgttgaaaatgccattgtcaaactcggatatacggttaacttgtcggcccggtcgctgaaaaccggcacgaccggtctgataggactatctatttttgatttctcgcagccttttgctccctatctatctgatcaggttatcgactatgcgcgtcagcgtgggtatggcgtaatcgttaatacatatggccaaggcggtgctggactggcatcggttatggataatgccgccatgttggcacctgatggatggttcgtattcattgaccagccccttgccaatgaaggcgcgttactggagcagccgtatccgttggttgttgctagcgactatgaaacatatgacagagtcgataaagtgaccatgcccaatgtcgaaggtgtgcggcaggcaaccggccgtttgcttgatgcggggtgccggaacatcgcgctgttcggtgcatgcgagggcaaccgcgattacgactactatatgaacgctactgaaggcacacaggagatgcgtgttcgtgggtacattcttgctttcgaagaacgaggactacgtccggacatggatatgctgttttcgtggggcctaatgatgagcgacagtggtgtgcgtgccgttaatcacatgttgaagcagggggtacggccggatgcgattgtctgcctgaacgatgctatggcgattggcgtgttgcatggtcttgaggcgaatggtcttcatgtgccggaagatgtgcagcttattggatacgacaatgtgccagaagctcaattctccaatccgtcactcaccaccgtagatccgcatgtgagcgattacgtgaagtgcggcatagatatgttgattgaacgtattcagggctacgaggggccaatacgcacgtattgcactgatttcgagcttatagagcgtggttccactcggttgtagcgtataggtctcgtgccagcagttgcttggtgcgatgcgtaatgcatacgaatacaggtgttttacctgttgaattgttgaacggcatcgcgtctaccggactatggttcacgaaaacggttactgcgaaactactcgaacaatgcggcgtcagtcgctgggtagccaagttggaacgcggtgtaggcgtgcttggcggccagtgcggcgaggatgagcagcgtatcgctctcggtggaagatttcgattcggtcacggccttgatctgcgcgcgggcgcaatccatttcgatggcagcggccgtgggtacggtttggccacttgccttgtcgacgatggtggtggggttggccagtagttggtcgatggcatagaccttttggcgggggtcgctttggccggaagaactggattgtgcgccggaatcatcaaaattgccgtttgccagcgcaaccagctgctgcccggcggtcttatgcatatcgctcaacgccaacgtagccccagcggtcgctcctcgtgcggccaagacctcgatagcgaatccggcgcgatcctcggccacggccatcgcatccaataccggtcggtcaacgttggcggacgtgacgccatcaagacgcgccggcgtcacctcaggcgcggactgcccgaatttatcggccagaaaagccagccattgcttggtctgcgcgtcacgtaacgttccctcggcaaaacgacccgaacaatacccggcaacgtcaatccaagtcaggggagcggccaggccggtggcatactgctctaataacggcgtgccttcagccggatgggtggcgtagtccgccaacgtcatcgctttctcgcaagggctcatttgagcttccgcctcggcccgtccggccagtcgcggcatcgaacacgccgaaagcgaacacagcatcgcgctcgcgcatagtgcggatgccaagcgccgggtaaaccgtcctgaagagaagcgtgtctgcatggaaacctacactaatagctaactgtgaccactcataggccatgcgccacataacttcataggaggtacggatcgatggaactggacctgacaggaatacacaagctcgccgccgagcaaggaatcgaccccggaaccctggatgatgcgctggcagaggccctgcgcctcgcctacctcaagaccccgcacgccgccaggcacgcgcgtgtggagcttgacgaacgttccggcaacttcaccgtctgggccgccgacgaaatcccggtcgagcccaccgaggacgacccgcaccccgctcccaagctgggcgaggaatacgacgacaccccgcgtgacttcggccgtctcgccgccgccactgcacgccaggtcatcacccagctgttccgccgcgccgaagatgagaaggtattcggcgcgttctccggtcagaagggcaagctcatcaccggcatcatccaacaggatgcttccgacccctccaacgtgcatgtcgcgatgggcgatgtcgaagccattctgcctcgccgtgagcaggtgcccggcgaacgttaccgccacggcgaacgcatccgcgtgtacgtggtgaacgtggcccgtggcatcaagggcccggaaatcgtggtgtcccgctcccacccggagctggtccgcaagctgttcgagcgtgaagtgccggaactggtctccggtgccgtgtccatcatggccatcgctcgtgaggccggcgcccgcaccaagatcgcggtcaaggccaacaccgatggcgtgaacccgaagggtgcgctgatcggccccggcggcgctcgcgtgcgtgccgttatggagaaccttggcccggagaagatcgacatcgtcgactactccgacgatccggccaagttcgtggcagccgcgctgtccccggctgtggccaccggcgtacaggtgatcagcgagaagaacaagaccgccatcgccttcatccacgacgaccagctatccatggccatctgccaggaaggccagaactcacgacttgctgccaagctgaccggctggaagatcggcatcgaatccgccgaggcccatgccaagaaggtcgccgccgaaaaggccgcccaggctgcggccgaggctgctgctccggaagccgaataggccgccgggctcgaaggcgaatgatcttcagggcgcattatttcctgatacgagccgcgtcagcaatggcgcggctcgctgcgtctacgctatccagcgctatgagtatgcttgattggcgtatgtgggctggtgcagtgtgcgcgaaatcgcccacaccagagacgaggtaacacgatcatggtcgcacgatgagacagggtaggcttgccgtcatcaccaactgaccacgcccatgcacgcgcgtggtcacagaataggagtaattagtggcgaaaccacgcgtatacgaactggctaaggttttgaatgtcgatagcaaaaccgtgcttgagaagcttaaggacatgggagaattcgtcaagtccgcttcttctacgattgaaccgccggtagcccggcgtctgaaggcagagttcgccaaggacaacgccaagggcgattccaagcccgcatcttccgtacaaaagcctgctgccaagcccgtgcagcagcgccgcccggccgcaccttcggccccggcttccacttcatcttccgcaccgactccggccgctcccgcacgtcaggcatcgcccgcctcggcacatcagcaggctccgactccgggcgcaccgacaccgcgtccgcagggcggcgcacgccccggcatgccgacccccggccgccacggtcagcacgacaaccgtgagaatggtcgcgataatcgcgaaggccgcgagaacggtcgtcagagtcgcccgaacgatcgccgtaacaacgatcgtcgtaacaaccagggccgtccgaacaatggccagccggggcagcatcagaacaaccgcgacaatgcttcggctccgcgcccgcacgctcagggcggcgccggtgccaatggcggcaatgccgcttcaaacgcgattccgcgcccgcacgctcagggcccgcgcccgggcaacaacccgttctcccgcaagcagggtatgcacaccccgacgccgggtgatattccgcgtccgcatccgatggctcgtccgactgctgatagcggtcgtggcggtcgtccgggccgtcccggccaaggccaggggcagggccgcggcttccgtggcggtcgtccgggccaaggtggtcagggcggtcctcgtcccggccagtggggccacaaccgtccgggtcagggcggcggctcccagggtgccggtcagggcggcgcacgcggcggcttccgtgggggccaaggcggcggcaataacttccagggcggcggcgcaccgagcaacggtcccgcacgtggcggcggtcgcggcggtcgcggcggtgccgcaggtgcattcggacgtcagggcggtaagtcctcgaaggcccgtaagaaccgcctggcaaagcgccatgagtatgaggagctgaaggcaccgaccatcggcggcgttcgcatccccaacggcaacggtcagaccatccgtctgcgtcagggcgcttccctggccgatctggcggagaagatcaacgtcaaccaggccgcgctggtcaccgtgctcttccacctgggtcagatggctaccgccacccagtccttggatgaggagaccttccagattctgggcgaagagatcggctggaacatccagctcgtctccgcagaagaggaagacaaggaactgctccagcagttcgacatcaaccttgacgaggaagaactgcaggatgacgaggatctcaagcctcgcccgccggtcgtcaccgtcatgggccacgtcgaccacggtaagacacgactgctggataccatccgcaagaccaacgtcatcgcacgtgaggccggcggcattacccagcgcatcggtgcctaccaggtcaccgtgaaccttgaaggcgaaccgcgcaagatcaccttcctcgatacccctggccacgaggcgttcaccgccatgcgtgcccgtggtgccgagctcaccgacgtcgcgatcctcgtggtcgccgccgacgatggtgtgatgccccagaccgttgaggccatcaaccacgctcaggccgccaaggtgccaatcgtcgtggccgtcaacaagatcgatgtgcccggtgccaacccggagaaggtccgcggccagctcaccgagttcggcctggtccctgaagagtatggtggcgacaccatgttcgtcgacatctccgccaagcagaacctgcacgtcgacaagctgctcgaagccgtgctgctcacggctgacgctgagctggacctccgcgccaaccccgacatggacgcccgtggtgccaccgtcgaagcccgactcgacaagggtcgtggtgccgtggccaccgtgctggttcagcagggtacgctccacgtgggcgatgccatcgtggccggcacttcgtacggccgcgtgcgtgccatgctcgacgagaacggtcagccgatggaagcggccggtccgtccacacctgttcaggtgctgggcttgacctccgtgccgaccgccggtgacctcttcctggtcgcctccgatgatcgtgccgctcgccagatcgccgagaagcgtcaggccaccgagcgtgccgcccagctggccaagcgtcgcaaggtcgtctccctcgaggacttcaagaagaagttcgccgagtccgagatcgacatgctcaatattgtcatcaagggcgattcgtccggttcggtcgaggcgctcgaggattccttgatgaagatcgaggtatccgacgaggtcggcatccaggtcatccaccgcggcgtcggtgcaatcacccagaatgatgtcaacctggccacggtcgacaaggccgtcatcatcggcttcaacgtacgcccgaaccgtcaggtggcggacctcgccgagcgcgagggcgtggagatcaagtactactcggtcatctaccgtgcgatcgaagacatcgaggcatccctcaagggcatgctcaagccggaatacgaagaggtcgtcacctctcactccgagatccgcgagatcttccgctcctccaagttcggcaacatcgccggcgttatggtgcaggacggcgaggtcaagcgtggtacgaagtgccgtatcctgcgcaacggcgtggccacggtcaacgacctcgagatctcctcgctgcgtcgcttcaaggacgacgttcagtccgtcaaggaaggctacgaggctggtatcaacctcggcaccttcaacgacattgaactcggcgacatcatcgagaccttcgagatgcaggaagtcgagcgcaagtagtcattgttaagccctctctgacgagtgggctgtcagccgcaggctgactgggggagagacatggtagttccatgaattttctctcccccagcctcactgcgttcggcagcccctcgtcagagggggctcaagtctagaaaaggaaattcctatggcaggaaccaacccgcgcgccgcacgtattgcggccttgattcagcgtgtcgtcgcctcctccattgagcgcgaactgcatgacaagcgactcgccagcatcaccgtcaccgaagttcgtgtgaccaacgatctgcagatcgccaaggtctactggacccagctcggccacgaaggccacgaggaaggcgaacgcaagcgcgcccagcaggcgctcgatcaggccaagggtcacctgcgttctctggtgggccacaaggctggcctgcgcctgactccgcagctccaattcgtgttcgatgaagtgcccggcgaggctcacgagatcgaagacattctcgccgtggccaagaagcgtgacgaagaactcgcccgcgcccgcgccaccgcccagtacgccggcgacgccgatccgtacaagcacgacgacgaggccgaagccgagggcgatgagttcgagtccgacgaggagtagtgtgcttcatacaacacccagcggcctactcatcatcgacaagccgcaaggcgtgaccagtttcgacgccgtcgccgccgtgcgcggcgcgttgcacatcaagaaggtcggtcacgccggcacccttgaccccatggccactggcacgctggtcatcgccttcggccacgccacgcgactgctcaacgccatcgtggcgcatgacaaaacctacgaggccaccatacgcctcggcctgcgcaccactaccgacgatgccgaaggcgaggcgcttgtcgatgatgaagcccgctcccgctggcaaacgctgtcagcgcagctgactgagggcggccagagcggcgaaccaacggcgtcaccaactgcctcatggcaaaacctgctcactcgcaccatcgccaccaatttcaccggcgatatcgaacaagtacccaatacgttctccgccatcaaaatcaacggccagcgtgcctacgacttggctcgcgaaggcaaggatgtggaactcaagccccgcctggtgaccatcagcgaattcaccgtgctggatatccgcagcggattcgtagcaggggagcaggccgctgaaccattgcgggaagacgcgaacacgggaacgattcccgcacttgatattgacgtgcgggtcagctgttcatcgggcacctatatccgcgcgctcgcccgcgacctcggcaatgaacttggcgtcggcggatacctgacccgtttgcgtcgtacgcgagtcggccgattcgcgttgccggacgatactagcggacttatcgcctctgaggcgatgcttgacacgcgaacccataccgtcaccgcacataccgatcagaagacgttcactaatcgggaagggcaaaccgtcacgcgcaacaagtgcgtattgaacactcctgaaggccttgccggtgacgagcgccgcaactggctgcttgaccatgccctcaccatggaacaggccgctcgaggcgcgatgccggcgcttgacatcacacctgaggaagccagcgaattgcgcttcggccgccgtatcgagcgtacaatcagcgagcccactgccgccattgtgccgcaaacgcatgatgtggcggcgattatcgagcgtgccaacgctcatcaggccaagccggtcaccgtattccccctcgcgtaaagtagacgcggtgaaaagtgcagcttgatacaggccgcgcacaacaacgcctatattgcatgaataacatcgcacggataaaaggaacagcacactgatggatatcacgcacctgacccctgacgccgaaggttcgattgaatggccctcgttcagtaacgacaagaaggccgtggtgacattgggcgcatttgatggcatgcacttgggacatcaggcggtgatcaagcgtgtggtggaactcgcgcaccagcatgatgctttttccgtggtgattctgtttgacccgcgccccgcattcgtgcacggctgggccgcctcgcaccatggcgaggaacccgcggtgcagaacgtggatgccgaagccttgaccagtgtggatgatcgactgcaccgcatggaacagttcggcgtggaccatgtgttggtggtgcactacacgctggccttcgcagccatgtcatacattttcttccttggcagactcaccggcaagctgggcatgcgtacgctggtcctcgggcaggatgccgccatgggcaaggggcgagaaggtgatgtgaagcatatcgccaatcttgccgccgccaccggtgtattcgaacttgatgtggtcgatgaccgtggcccgggtgaagtgcgcattccgcgcgatttcaagccggaagccccgagcgaatggggagagcccgtcgacccgctggccaatgccaccaaggccgagcgccgcgcatggagcaagaagaaccaggccaaggcaatgcgcgcctggagctccaccaatgtgcgctacctgctggctcatggccgaatccaggatgccaacgccattctgggtgctccgcacgccatcgaaggcgaagtggtacacggtgaggagcgcggccgcaccatcggattccccaccgccaatcttggctccgacattgcaggctacattccggtcgacggcgtctatgccggttggctggtagatggtgagaaccgctggcctgccgccatctccattggcaccaaacccaccttcagcgagaaaacaggactcaacgaacgcgtggtggaggcctattgcatcaccgatgagtggattgatctgtacgaccataaggttcgcgttgaattcgtcggtttcctgcgcccgcaggtcaagtttgatggtcccgaccaactcgttgacgaactcaagcgcaacgtcgaagagaccaagcgtcttaccgcctgaggcatatctcagggctatttacgcactcccaaggcatctaaggcgtcggacaatgtgttggactccaccagccgaagtccctcgacatgcaccggcttgcgcagcggaggaatgactgccgtcgtaaagccaaggcgcgcggcctcgcgaaggcgatattccatacgcggtaccgggcgcacctgaccggtcagggaaatctcgccaatggcgcacgtggctcgcgcaatgggttttgacgtggcggcgctcgccagtgccgccactatcgccaaatcggaaccgggctccttggcctggcccccggcaatagtggagatatacaggtcgttggacagcaggttgagcttgctgtgacggtagagcaccgcgaccagcatggcgatacggctggggtccacgccattgaccgcacgtcgaggtgtgggcagcaccgacgtggtgaccagagcctgtacttcgataggcagactgcgatgcccatccaatgtgaacgtcacacaggtgccttccatgggtgccgcgttggccgcatcagggccgtctccagacaggaacaatccggcgggatcggtgacctcttcgatgccctcaccgctcatgtcgaaacagccgacttcatcggtcggaccaaaacgattcttcaccgctcgcaacattctcagcgcggtctcgctgtcgccttcgaattggcagaccacatcgaccagatgctccaatgtgcgcgggcctgcaatcgaaccgtccttggtcacatgaccaaccagaaataccggaatgtcaagcgtcttagcggtatctatcagcgcgcttgccacttcgcgcacctgagtcgaaccgccggaaatgccatcgacctcctgcgagacgatggtctgcgccgaatccacaatggccaaggccggcttgttctgttcgatcagccccaatactgtggacagatcggtggtggaggccagtaacaagttcggctccaccgcgttgatgcgggaagcgcgcaaacgaacctgcgcctgtgattcctcgccggaaatgtacagcacggtattggcatgtaccgacggtgcgttgccctgtaccgacaccgtgtttgatgtgccgccctgcgcccggcccgactgttgggcagaccgctgaccggctcctcggaatgtactgtctcccgccacaacgcgcgcgatattgccggccgtctgcaacagcaatgtcgacttgccgatacccggttcgcccgctatcagcgtcactgaacccggcaccacgccaccgccgagcacacggtcgaattcggaaaacccggtaccgagccgctcgacgctttccgtgcccacttcggtaatcggacgggctgcagatctggcgttgtcggcaaccgtaaccgactgcgtgcgtgatgttcggccgggagcggccgtgcgagagcctgccgccggccgagcctcgtgaaattcctcgaccgtgccccactgaccacactcggggcaacggccgtaccacttcggcccgttccaaccgcattcggaacatacatactgcacacttgatttcgccatggtctcaccctaacccaaacaccagcggacggtaaatttttaccgttcacaagagtttcacgcggcttgcgcacaacgactaagattacggccgtctagcgtcacgcggctgtgagagaatcggggcatgactaatagtgagaactcctcgaccacacaatcccatggcaagttgattgcagtggtggttgccgcagctgttgtgattatcctggcggtgctttcggcctttgtgtggccgggttgggccatccagaagaatgatggcacctccactaccacccaaaacagccagcagaaaaccgaatcatccgagccgatcaagccgaccatcgacgccacagctttgccggatgatgccagtgagctgttgaaggccatgccggacagcgtgctgaattacgcgcgtaccaaggcggatgcctccacgacgtggaattccgcgtcgccgctcgaggagtacactctgacctactccactggtgatgccgccaaggatgtcacgctggtcgccgcgcagtggtcgtcggcggacaatgccaagacccagtacgatgcgttggtcgctgcgcagaccggcgatgagtcggcatccggcaacgtcaaggtttccggcaacgtcacgggcgcgtacgtggtgaaggccgatgcctccaacagcaagaacgccgctgccatctggcagaacgataccgtggtcttccaagctaccggcaccaaggaagcggtcgatcgcttctaccagaagttcccgatgtagtatctagtatcggctgtcagctgctgcacaaacttatgaacgttggggcatccacattgctgatgtggatgcctcaactgcgttcagggcatatgcggactatcgacaacatactggtttcctctgtctggcaacacgtgtattatggtgcaagttgcaacttttacgattaatcgaaatggaggcttcagatgggttctgtcatcaagaagcgccgcaagcggatgagcaagaagaagcaccgcaaactgctgcgtaagacccgccaccagcgtaagtagtcttacctgcaatcaaggcattagaaaccccgtgatcgttatggtcgcggggtttctctttttggctcctttgccttgttcgggcaacagtaaagcccgcacctgcgatgtacagatgcgggcttggaaaagttcagtgatgtgagacgatcacttgttggcgttggtcaacacgcgcgggccgttcgggtcgccgacgatgaccttgtcgaccatgttgaggaacaggccgtgctccaccacgccgaccgtgttgatgaggtcttcggccagctcctgcgggtgatcgatgcgctccaggtgcaggtccaccacgaagttgttctcgtcggtgcgcacttccttgccatcggcgtcaagacgaagcaccggcttgtagccgcggtcctcgaacttcttgatgacgtggccagcgccgaacggaatgacctcgaccggcagcgggaacttgccgatggtgtccacaaccttggactcgtccacaatccacacgatctggttggagttggtggccacgatcttctcccacagcagagcagcgccaccgcccttgataccgttgaagttcttgtcgacttcgtcggcgccgtcaatggtcacgtcgatgtggtccacgtcgtcgatgtccacgatcttgatgccgtagctttcagcctggacctgcgtgcggcgagacgtggttacgccagtgaactcaagaccttcctcctgatgacggcggccgagctcgtccaccaggaacttcacggtcgaaccagtgccgaggcctgcgatcatgccgttttcaacgagcttggcggcttcgatgccggccgccttcttcagcgcatcctgctgtgccttatccatggtttctcctttgccatccttgcctccgccgcatggatcaacggcgtgaagccttatctcctatcctaacgcgaatgagcgattttgtgtcatcgtgtccgattgcggtacatattcgtgtgtttgggtgttagtgtcgtacgaatggtgcgttggcgatggtcaggttgccgtcgccgtccacatagccttcgatttcgatgctgcctttgatcggcatcggctgcccgttgaaatacgggctcgttttcggcgcgggggagaaggtcagcgtaccggataccgtcagtccgcttggctttgcggggtgtacggggtgcgctgattgtacaggttgcgctgattgtgtcgctaagggtgacgaagacttggtctctggccttgtggcatccgtcgaatccgtcgccgcagccggcttgcgcaaacttgccgcatccgccttgccatccagcaccaactgcacgtctggaggcacatcggtgccatgtgcgtattcggagcccagtagcgactgccagccttcaatcggcagatagccgtcgcgcgcacccgaacggcaatcgcccgcataggtgcgtgccagttcatcgaccaactcattgccctcgttgccggcgtgacctttgacccatcggaaatccaccgggccagggcgttgtgagatctcacggtcgatcgcctgaataagctctttgttcttcacaggctttttctgcgaatttttccagccgttcttcttccagcctttgacccacttggtcgagcaattgatggcgtactgcgaatccgattcgatgagcaatggctcagggcccgggtgcgctcgcaaagcttccagcactgcgcacagctcaccaatctgattggtgccgttggtcgcgccgcccgcatcataaccatggtcgtcgtgcttatggccgggcttgccgccggcgttctgctcatgatcggcccaggcccagcccattggcccgtttggattccctaatgcggacccatctgtggatactgtgatagtcatgttctccaccctaacgcaagttgtgcaatctcttgctgaagtggggttgtccagtgcgaggcaaaacaacgtagtgaagagtgtgaataacatcacacctattgactttgcttgaaaaacatgccatcgcgcgtgaataggtgagcgctcacaagaaaaacaagacatttcctctctgcgggtgaggccggcaacaatggcgcatccggtatctggaatgagaataagggactgtacaaaaccagtgacggcaacatcgaaatcctcaaaccagaggcggacagcgatggttcgacggccacggccgcatccaagggcaccatgcttatcgcaggcaactccaaaaccgtggcactcggtccaggcggcatggccttggctcccggcctgccgctcggtcttggctggttcatccgacgccgcttgggattggatgcctccgacattctggaccgtaagctcggcttgaagtaacggctggttcggacgtgattgctgtcacgtacggatcatgacgacagcgcgaaggtcctcatcggtttacgtcgatgaggaccttcgcgcgcattaggggagtctgttgcgggctgcgctacgcgggtcatgctgcgcgggcgtgctatgcggacaaactacgcgaacaagtcgttcagtgcctcggcaatcgtcggatgcgtgaacaccatatcgcgcaacgtgctggccggcgcgtcaagatccatcgccaacttgacgatattgatcacctcgtgcgactcgacggaaagcagcatcgcacccagaatgcggccagtattgcgttccacaatcgccttcatcagaccatccggtcgccgcattacctgggccttcggcacagcggccaccggcaatcgcttgaccacataatccaatccggccgccttcgcctcgcgctcattcaatcccacgcgagagtaaggcgtggcgaggaatgtgctcgacggcacatgcttgcggtccttcaccgtgtacggacggtcggaaccattgagctgcgaccacaccacgcgatagtcatccagcgaaatgtacgtgtgctgcgggccgccgttcacatcgcccagagcccaaatgtcggctgctgtggtgcgcagaagctcgtcgactttcacggcaccgcgttcggtgagctccacgccagctgcctcaagatgcagtccctcgacgttcggcgtacgtccggtggccaccagtaccgcgtcggtggtcaggcagaatcgggcttcagccggctcggcgaaccgcggctcgccatcgtctgatggtttcgtttgaacgtgtgacatcgtggcgtgatcggtcgggttgctagtggggctggtggttgttgtagtgtcggtggcgccggtggcgtcggtggcaccggtgatatcggtatgagcgttcccggtgccggcgggggtggaatcgcaagcttgcgatgcgccgcgagtcatacccttcaccgcaacggacaacctgacgccgccgtcagcagcaggcgcgatggccttggtatccgcgttgaacaggaacttgacgccctgcgcttccaactgtgcgcgaatcgcggccgccacatccgcatcctcgcgcggcaggaactcggcattgtgctgcagcacggtaaccgccgtgccgaaatcggcaaacatcgaggcaaactcaagtccaatgaatcctgaaccgataatcaccagtcgctgcggcatatcgtcgagatccatcagtccagtgctggtgtagacgccgggcgtagtgtggataccgggaatatccggaatgcgcggcgtggcaccggtattgatgaagatcttgctggcggtcacggcgaccgggccctcagcggtggcgatttccacgctatgagggccggtgaagtgagcgcggccggtgattacggtgatgttgtcttggtcggcgagcttgtgatagttcttgtcgcgcagcatcgaagtgacgcggcgcttctccttgatagcagcctcgaacgctgcttcgcgggtttcgggagtactgttcgcgccatcccgccgcgcctgttcggcggacaaaatcagtgacttggacggcaagcatccgatattgatgcaggtgccgccgtacatgtcggcgcttgcctcggcgacgacgaccttgcggccggctgcactgagcttggcagccaaggttttgccgcccttgccgaatccaatgatcagggcgtcggtggtgatagtgggggaggtgctgggtgtgctgatggcattgggtgtgctgatggacatggttacttccttacgtattcgagtgataagagtgcgttgtgctgatgtgttgtgtgccgtgcggcgtctgttttcttctttgactgccgaagcgttatcgactgatgctggctaggggaaacgcgcgggattattagcctttgcgctcgctgaatatctgttcggtgatgtcgtggatggtggtgtgttcgagttgttcgaggcaagtgcggttgagcccggcatagatgtcgttcatcactgcgcccattgaagatgacaccagacagtcctcgtgtacgtcgcccggtgtccagttcactttcacaaaagtggtgccggtggcttccgctaccgcacgcaaagtgatttcggcggcgggccgggccagagcgtacccgccttcagcaccctctttagtggcgatgagtccggctgaggcgagcggtcgcattactttgcgcacgcgcgccgcattggtgcatatgttctcggccaggatctgactgggcaggtgtgtggcgcgatggtcaaggtagaccaatgcgtgcactgccagtgaatggtcgccgttcatgaaacgacctccttaccgagtcgatactgtaactatgatgtgtacagttatgatactgtaatcatatcagatgcagttagtgtgtcaaatcggggttgaagaggtggatgactatgtgtataagtgaggtgtccacatggttatccacaatgaatgtgcgtaagtgaagctaggaccacatacctcggatcggcttccgtttccgcacccactacccatatggtggtgtcatgaacaggatgaccgacggcatcaccaactatggagctctgccaggctctatatacgatcagcctccggaagaatcggaggcagtttttgttccgcccgaatttgcggggtcattttctactgactcgaaatacccgacttctcgcgactcgtcatcgccgaacagtggtgcacatgattctgcagcgacaccgaccatgagcgaaagcctcgcccagcgcagacgcgacatggtcgcacgctgcactgaggaagcgaaacgggcgggcaagaagctgcttttcggcatgaccacttccctcgctctgcaatccgtaccgattcccgccgattgcgacctcgactcggccaagctgcacactgtatccagcgttaagagcaagcggtttcgtacacgccatgcaccactgcaaacgcatatttggaaacatgcggctaaagccgccaatgtggaaatgaaccaacacgtgtttgcgctggacctgtttcacgtatgggcccaacttgccccgtatgtttcttttgagtccctgattgtgctcggggatgccgtcatcgctgctacgagcaaacagccagtattggccaaggatcgtgatgctgctgcaatctatcaggatctggtgaagttcgtggagcaatttacccgattcagagggcgcccgtcctgcgttcgagcattgcctctgatatcacctggtgctgattcgcccaaagaatcagaagaacgactctctctggtagcgcatgggattccacagccggttgcgaactatgtggtgccggatgcggcttttgcatctggagctcccataacgttggacttagcgtggccggagttcaaggtcgctgttgaatatgatggcgatcatcatcgtacgagtaagactcaatggcgccgtgaccaagagaaaaggggtgtgctggtcgggcggagatggctggtcttcgtcgccacggcggcaagtatcgctaacgaggacgctcgtgctgaattcgctttcaacgtggcgagggcgcttgcttcgcgcggtgccgtattcgagtttcatgtagttgccatgtctcttgaagagttggcgcagagcctgctgtgaccatgatgttcgaaacggactgatgtaaaggcaatatttgtacgacctgttgttgtggtgtgtgcttgatattgcatgccgttcgattgcgatgcctcgtagtgatggatttcgtgaatgactagtgttcgattgtggagggaaatgtgtcatagtggtcgattgggggtgttgtcggtgcattgagcgtggatttgcgccaatgggtgtgggacgctacgcatgttttgccgatttttgcgtggcgtcccacggcccctcgggtaatggctgtgacgggtgtggcaggaatggcgtctttccggggtttccagtttgagtgtgtgggatgggggaaatgtaaaacgattgacttagctgttgtcccacgcttttgtgggatggcagctctggaatgggcaaattcgtcgtggcgtcccacaacgatgttaaaactcgaccatgatgcaagccgaccgaacgcttcggcggtcatctggccgctgtgaccccacaatgatgatggtaggcaggcgaacgtttcgcggtcatctggccgtcctgccctgcagtgatgttgagaaaatgcagtcacggtgcatgaggagaaccgttgacctgcgtgtttcagtggtcgcgaactgcatatgcgctaaaaaaagctctgcagtggattgcatgaatccaatgcagagccttattggttgcggtgaacgcgactaacgcagcgatttcactcgctcagggccttgtcgaccacgacggtggcctcgtcgagtaccttgtccagagcctcgggggagacgaaggactcggcgtacaccttgtagatgttctcggtgccggaggggcgggcggcgaaccagttgtccttggtggtgaccttcagaccgccgatcttggcgtggttgcccggtgcctcggtcagcttggcggtgatgtcttcgccagccagggtggaggcggtcacgtcgtcgccggacagtgccgcgaacttggccttctgctccagtgtggtcggggtgtcgacgcgcttgtaccaagactcgccgaagcgctcgacctgctcctggtgaagctgggccgggttcttgccggtcttggcagtgatctcggcggccagcaggtcggggatcagaccatccttatcggtggtccacacgcggccatccttgcgcaggaagctcatgccggagctctcctcgccgccgaaggcgacttcgccgctgaacagcgggtccacgaaccacttgaagcccaccggcacttcgatgaccttcgcgttgatcgatgcggccacgcggtcgatcagggaagaggagaccagcgtcttgcccacggctgcgccctcaggccagcccggacggttgccgccgaacaggtactccacgcacacggcgatgtagtggttcgggttcatcacgccccagttcgggcagacgatgccgtgacggtcggcgtccgggtcggtgccgccgaccagatcgtacttgtcccaagcgccggcgttgagctcgtcgaccaggcccttcatggcgtacggggaagacgggtccatgcgaatcttgccgtcgtggtcgatggtcatgaagcgccaggtcgggtcgacctcaggacgcaccacgccgatgttcaggccgtacttctcgttgatgagcggccagtagttcacggaagcgccgccgagcggatcgatgcccagacgcacgccggagttgcggatcacgtcgaagtcgatgacgttctccaggtcgtccacgtagtgctcgcggaagtcgaagccctcgacgtactcggacttgatggcctcctcgtagggcacacgcttgatggacttgaagtcgccgagcagctcgttggcgcgagcggcgatggcgttggtggtctcggccggggccgggccgccggtgacggggtcgtacttaaagccaccgtcggtgggcgggttgtgggacggcgtgacgacgatgccgtcggcgaggccctcgccctcgaagcgctgggtgccgtcgaccgcacggttgtgggtcaggatggcctgggagaccaccggggtgggcacgaagtcgtcacgggagtcgacgcgcacgtgcacgccgttggcgacgagcacctcgatggcggtcttcttggccgggccggacagcgcgtgggtgtcggagccgaggtacagcgggccggtgacgccggccttcttgcggtattcggcgatggcctgggagatggcgatgatgtgggcctcgttgaacgaggtcttcagggacgatccgcggtgaccggaggtgccgaagatgacacgctgctcggggacttcgggatcggggacgaggtcatagtacttgccgataacctcatcgacattaatcagatctgctggggtggcgggctgacccgcattgtttgctaccatgttccctattctgccacgtttttcgccactttgggtactcttatgttaagagttgtcaacttttgtgcgaatcgtgtgccggttgtctagtgcttggtcatttccttctcgatttcctccagcgacttgcccttggtctcgggtaccaagcgcagcacgaacgggatggacagggccgagaacacgccgaaaatcgcgaacgggccgcccacattgttgccgaacgcatcgagcagcacgaggaagaactgggagacgatgaagttgcccagccagttcgccgccgagccgaaggatgagccgatgccgcgcacgctcagcgggaagatctcgccgataagcacccaggcgatcgggccccacgagaccgcaaagccgaggatatagaaagcgatgagaatcatcgtcggcactgccagcacggccacgtcgcccacgaagttcatcacggcgagcaccgcgagcgaaacggtcatcacggtggaaccgaagatcagcatgcccttgcgcgggaaacgatccatgataagcgtggccacgatggtgctcacgaagttcaccacgccgatgcccaccgacacccagatcgcgtcgccttcagggaagccgaagcccttgatgaacacctgcggcaggaagtagatcaccgagttgatgcccacgagctgctggaacagcatgataccgatggcggccaccagcgccggacgagcgatacggaacagttcgcgcacaccacccttggtgtcctgtgcggccacggccttgatttcgtccagctcaatctgcacctgggtctgatccacgtccttgcgaatcagcgtaagcactttgaaggcgttgcgggtgtcgcccttgttcaccagataacgcggggattcgggcagcaacaggccgccgagcagcaacaaggcggccggcaccagcgccgaaccgagcatccagcgccagtcgcggatgccgaagaggttgtggttcaggaatccgaggttggaggcgtaggccagcagaatgccgaaggtgaccatgagctggaacagcgtggacagtgagccgcgacgctccttcggcgccagttcggccaagtacgccggggtcagggcggaggccgcgccgacggcgagacccaggatgatgcgggcgcacaccatcatcgcgaatccggtggaggaggcgcacaggcctgagccgagcaggaacagcagcgcggagacgatgagcagcttcttgcggccgaaccggtcagacagtgcgccgatcgacagcgcgcctgcgcacgagccgatcagcaccgaggaggtgatgaagccggtctgagagacgctcaggccgaagtccgattcgataagcggggaggcgccggagatgatgccggtgtcgaaaccgaacagcatgccgccgagcgcgccgaaggtgaagatgaatgcgctgttgagcgggaagcgcgtggagaagccgtgcgattcggcggcttcgaggtcctcgattgcgttggctgccgcgtttgtggccgcgcccgccactccggccacgccggtttcgatggtttcgattgcggtggccgccgcaccggttgcgctggtttcctgcgccgcggatgccgtctgtttcgatacgggtgatgccgttgtcgtcgtcattgccttgtcctttcgccgttgacggaccgcgcctgttgcgtggcccctctgccgcgtgcaaggtcaggcttcgattgtctgaagtcgcccgaaaacaaaaaaagacctggaacaacgtggaattcgcatattacgatacgcaaattccacgtcgctccaggtcttgcctcgttttgagtaacaaccctgctacgcaacgtgtgtgaaagatagaatacgacttccgcagtcgcgacactccgaataggcagcaaaaaacgatgatttttgacaacgattgcaggattctgcatggtggaatgatgtcggaatgggcgctgcggcaaatacggagaacgggtgtggcgaagcatcatcgcggaacattatggcgggacaccatcgcggagcaccgtagcgcatagttgccgtttcgcgatgctttgccggcattgccgtgcttttggggcacccagcgccgataatggaacacagtggcatacggcagcaaggaggaaccgtggcgaacgcatcgaacgcaacgcctgcagtgattgcggcgcgcatcgtcgatgccgtcggcggccccgcgaacattaccagcctgacccattgcgccacgcgactgcacttcgaactggccgatgccggccatgtcaaccagcacggtcttgaatccatccccggagtcctcggtgcattcccgcgagccggcaatcgttatcaggtcatcatcggcggagcggtcgcctcggtgtacgagcagatcgttcggctgcggacggcgcgattgatgccggcagcgcaattgccatcggcagtgatgcagtcagcgtcgcagtcaacgcaacccactcagtcaatgcagcccactcagccagcgcagcccgcgcagtcagcgcaatccacacagcccacgcaacccgcgcagtccgcgccgtacctttccgacgatgccgcaccatcgcgcgatactgccaccgacgccgaacaaagttgcggcccatccaatacatcccgtcacttcacgcctcgtaccgtccgcgagtggggcagtgccgcccgcgcttgggctgccgcgtttttcgactacctgtctgactcgttccgcccgattctgggtgtactgctcggtgcctcgctggtcatcgccatcgtcaacgtgatcgttgcactcggcatcgtgcctgacggcgagacctccgccggctggatactactcaaggcgatttgggagggtgtgttcaccgttctgccgattatgatcgcctacaatgcggccaagaaactggacgtcgacccctggctcggcggcgcgattatggccgcgctgatgaccccgcagtttactggcgtgatgtccggaatgtccgggacgtccgggacgtccgtatccagcgccctctccggggcgattcaatgctcggccaacgccgtattcggcgccgaaacctgcaccgtgtcggcgttcggcataccgattcaactcaacgactacggcggcaacgtcttcgtgccgttgctcatggctgccgtgctcgccgtggtctaccacgggttgaagcgcgtcattcccgacagcgtacagctggtgttcgtgccattcctctcactggtcgtcgtttttgcgctcaccatactggtcatcgggcctctgggaatatggctcggcggtgggctgggagcggccacagcatggcttaacgcgcacgtgccgttcctattcgcgctcatcatcccgatgctctacccgtttctcgtgccgctcggtctgcactggccgttgaatgccctgatgctgatgaacattcaggcgctcggctacgatttcgtccaaggtccgatgggtgtatggaactttgcctgcttcggtgccaccgctggcgtgctcgtgctggccgtacgcggcaaggattcggccatgcggcagaccgcggtgggggcgttgctcgcgggattgctgggtggcgtttcggaactgagcctgtacggcatccatctgcatcaccgccgcgtctaccgctggctgctcgccggctgcgcggccggcggcgtgaccagcgcggtgcttggctggctgttcccgtccgtgctgccatccggtcagatggttcggggcgtcacgactacggcgttcgccttctcctcgttgctgacgattccggtgtttgacagaatgtgggtgta

SEQ ID NO: 2459 - DNA, 5388 bp, Unknown
  R50_10m  MAG No. k141_16232
tcgagcggagtgccgttgagtacgtcgccgggcacatggaccttggccgggtccaggccgagcggctcgaccacagtgcgatggatggtcgcatgataggactcgggatgggtcagcggcagtccaatgtattcgtcaagcgcatagccactcacttgggagacgtcgattgactcgtcatgcacgatcttggcgagcgcctgataggcggccagcgggctcgaacccgtcgcaagtcccagcaccgcattcggctttgctttgatcaggtccgccacgcaacggccgtagatctcgccggcctcggcttcgttcttgacaatgatgatttccggcatcggtttcctccagttccgtgcggcccgcccgatgcgagtcgctgtaccgccgcccgtcttgcggataatggcaacatccttgtcacgtccgggtgccgcgcggcgttccaaccaccgttcggcgtagcgccgattggtgattcgctatttgttaatgatagtaacaattttggacctcatgaacactcacggtgtttcctgacgcttcacacaggtacactggaatttattagtgaagtttcataacagtttcaacgacgaaattgcgcttcaccgtctaagctgtgtatggaacaacaatcgccgtccactcgctcaccatcaggtaggaggaaacatgtcatatctcggtctcaacacaacgaccgacgaccatgcggccaaggcttcccccgccgatgtgcgccgcaagaaccgccaacttatcttcaggttgttgttccccaccaaccagtattcgcgcgccgagctcggccgacgcaccggattgagccgcgtggccgtttccgatgtggtcggtcggatgctggaggaaggattgctgcgcgagaccggtcaggcacccagcggcggcaaaggcaaacgaggcacactgctgagcatcgatatcgatcgactgcgcatcatcagcatcgacctgacgcaggagcacctgctgcacggcgcagtcaccaatctgctcggccagccgctgcgtcacgccgaagtcaccctgaacaccggctcattcgtttccgtggatgtgatcatcgagctcattgagaagatgctgggcatgtccgatggcgaggtcatcggcatcggagtcgcctcccccggcgtggtagacaacggcgtggtccgctcctccacgatgcgcggctggaacaatctcgacctgtccacgccaatcgccgaacatttcggacttgaagtaaacgtcagcaacgacgccaccgcagccatgctcaccgaacgtttctttggccaaggcgggccgaatatgcttttcgtgcgcatcgaaagaggcatcggttcggcgattctgctctcggacacgccggtaatcggcgaactgcacgcggctggcgagctcggccatatttccatcgatcttgacgggccgctgtgcccttgcggcaagcacggttgcttggagacgatgatttccggaaccgcattgaagacgcaactcagcgcggcagacgtggagcagcatcagggtatccttgctcgggcgggccgctatcttggccaagccctggccatgcctgtgggccttttggatatggcagacgtatgcgtctatggccagccgaacatcatcaacgcgacgttcatcggcgcggcccagcaatatctggatgccgccacatcctcgtccttccacaaacacacggtaatccggcgctgcgaatgcggacctgacatcaccgtacagggcgaggccatcgccgtggtcttccaacacctggccaaataaaagccggtcaccccggcaacgaaacgcgcaagaccaagcgcggcacagcacgacataaagcgatataggaccgcgcgggagatggggcctcggagacaaatctgaggcctcatctcccatgccccggcactatgccaggctacgccgccatggcggcaccgatggctccgactggttggccgacaggtgccagacgcagccgggccggcaggtccagcgtttcgaggaatcggcattgcgattcgcgccggcgcagctcagccgtgatcacctcgaccaatggttcgccggttttggccatgccaccgcccaagatgatgagtcgcggatcaacggactgagccaggatttgtatggtgtcgccgatggcgcgcactaccatgtccagcacatcgacggccttggcctcccgctttttcgcgcgacgaatcaggtcgggcatcggcgggtcggcgttgggccacagacgccccacggatgcgcccgagcagactgtttccaagcatccgtattgcccgcaagggcacttgaggcgatgaggttcgactgggatatggccgatttcgccggccgcgccgctatagccatgcatcagcacgccgttttcgacgatgcccgcagccagtccggtgccgaagttcaggaacgcaatggtaccggccatgccgtccgcaccgcccaatacggtggccgcgccgacggcggcggcattgacgtcgttttccacatgggccggcacgcccgaacgctgcgagaccaacggccccatatccagcgagaccacgtcgagattcacgatattgcccacatgcccgctggccgaatccaccgtgcccggggtaccgacaccgatggccctcacctcgtcaaaacgctcacccgctgcctgatgtgccacagcgacgatgtcttcgatcacggcatcgttgccatgcctggcgggaatacgggcggaacccaataccgtgcccattgcgtcaaccagcacagcttcgatttttgttccgcccacgtcaacaccgattttgagattgttcatagtgttttcagacatcagtcctcccctgttcttcatcgaacgtttcgcttgatatcagtgtgcatccgactattgacaaccatcttaacaaattcccccaagacgacactcacatgcacgacacaccgaatgacatattgattgcgtcaatcaattaacagcgttaatatcttaatcaagttcagattcaaagacgagcggaacaactcgcaacggtgcagacaaggaggacttaagaccgatggcaacaaacaccacccatgccacttcccaagccagtgtctccgaatccaaccgctcccgcatcgtcaagcacctgtatcacaacggcatcagctcccgcgcgcaaatcgccaaggcactggaactcacccccgcggccatcaccaaaatcaccgcacgccttatcgaggccggcatgattgaagagaccggcgatttggaaggttccaagaaccgccgttccatcggtctcaaactcgacaccacgcggttccgcatcatcggcatcaaattcgcccgctcgctggtgcagatcggcgtgttcgacctgtgtggcaacaccctgagctttgaaaacctgcccacggtgtacggcaacaccatcaacggcaccatcgtcaccatccaccagcgcgtcgaacaactgcttgacaacgacccgtccattgtggccatcggcatggcggtgcccggcccctacctgcgtaacgtaggccgcaccgccgtggtgtccagcatgcagggctggcgcaaaatcaacttcatcgacgaattcgccaccgctttccgcgtgcctgtgttcatcgaacaggacgcccgcgccggagccctcgcacattatctcttcgacccgtcggtgcacgccgacggcaacctcgcctattatctggtcggcgaaggcgtgggcctcggcgtcatcgacaacggtcgtctcatcaacggcttcctcggtgccgccaccgaaatcggacacatctccatcgacgtcaacggccgcccctgcgattgcggcaacgtcggctgccttgaacgctactgctccacccccgccattcacgacatgctcatcgccgatggcaccgtggttcccggcgcggccgatatgacccacaccgaagccgcccgcgccctgttcgccaaagccggcgacggcgacgaagcgtcaatcgccattgtccgcgaagtcgcccgatacgtcggctacggatgcgtcaccatcttcaatggatacaatcctgagcacatcatcatcggcgacatcgtgtccgaagccggcccgatactgctcgatgaggtgcgcgccacggtggccgaacgggccatccccgaaatcaatgcctccacttccatcagcctatccaccctgtccgccgacgcggcggtctccggtgccgcagcagtggcggtgacccaattcctcgaacacccctcggtgttcttcgacgtctcctaaaccaagcgccgacatcacaagatgttccatacgaaacacccggtaaaagaaacaaaggaaaggaaaccaaccatgactaccccgatcgttctgagcctcggtgaactgctgtgggatatgctgccgagcggcaagcgagccggcggcgcccccgtcaacttcgcctaccacgcgatgaagaacggcaccgaaggctgggctatcagcgcggtcggcgaggatgagctcggcgacgaactgattgccaaggccaacgaggccggcatcaacaccgtcatccagcgcaacgcctggccgacctccaccgtcgaggtcgcgctgaagaacggcatcccggagtacaccatcgtcaagggcgtggcttgggaccacatcctgtacacccgccagctcatcgacgtggtctccaaggctgacgccgtctgcttcggcaccctggccttgcgctcccccgaatcgcacgccaccatcacggagctgctcaagcacaccaagccgggcgcgatgaagttcttcgacatcaacctgcgtggcgaccactactccaaggacctcatcgaggaactcctcaaggcggccaccgtcttcaagatcaacgacgaggaactcctgctgctgcgcgacatgttcgacatccgcggcacctccggcgaagacgcctcccgctggttcatcgaggaattcggccttgactacgtgattctgaccgccggctccgcctactccaccatcatctcccgcaagggcgaggtctccacgctggacactccgcacgtcgaggtgaacgacaccgtgggtgcgggtgactccttctccggcaccttcaccgcccgcatcctgctgggcgacacgctggcagaagcccaccgcaaggccgtcaacaccgccgcctacgtctgcacccaggccggtgcctggccgcagtacccggccgagatgcccgactatctggctgaaatcggcaagtaatccacccatccccttatccgccattcgtgcgacttcacgaatcgactgatcgcaaccggtgagattctccgaacaggaaatctcaccggtttttcatatggtgcgctcacactcatgctcttca

SEQ ID NO: 2460 - DNA, 3436 bp, Unknown
  R50_10m  MAG No. k141_16387
cagcatctaagcctctatatccttttttcttcctctttctcaacggcgttggccccgtggaatacgggggccaacgccgtactggtcgcatgtcattgtctgcaagccgatgcaatgaccgttctacgccatggtatccatgggcttggcggtgctgtcccgaatcaccagtttcggggtgaggattcgccggttgccgctcacctgctctccggcaagcactttgagcagcagtttggccactttggcaccgtattcgctggcatcacgatgcgcggcggtaattgacggatacgccgcctcacaaatgaaactgtcttcaaaactgacaatggcgggcagcccattcggatagacttccgcatggccctcccccgcctccatctgccgagcggaataatcttcggccatggcgtgaagactggccgcggcgaggatctccgtttcatagatgaacgcggtaggcggcttcggtgaatgcagcatctccaacgtgagcatcgcggcctgttccgcaacaaaatcggtgaattcgatgttgatggattccagctttcgccgtttggcaaatgcgcggaacgccgcgacacgcccctgtgaataatccaggttcggatcgccggaaagataggcgattcggcggtgtcccaatgacgacaaatgttcgagcacggttcccatcgtgcgtgaatcatcgatggacagtgacggcacataattgttcgggtcgggtcctccggcaagcactgcgcgcacacccagattcttcaacaattccgggcgtggatcatcggctcgcaaatcgacgaggataacgccatccacgcgcttgcgcgacgcccaatccttgtatacgctcatctcctcgttcaggaatcggcatgggcggtacagcaaaccatagcctttggggctgagcgaggcgtgcacacccgccatgaagtgcagcatgaagctttcatccgtgagcccctgcgtggatcgtgcgggggcaaagcctatggtcatggtcttcgaggatcccagtgcttgtgcggcgtagaccggcgtccagccgagcctggctgcagcctctttgacccgacgtttggtttccgcggaaacgccgggccgatcattgatggcgaaggataccgcggtctgcgagatgcctaattcatctgcgatgtctttcaggctcacacgctgcgtgccgtcagacgatgacgatgcctcgcgagcagatctcatgaacactcctttttacgaccgcattgcgactattgcgatacggttgacggcacccccgcattgggccatatgcatcaaccgtgcgctaactcttatgatatcaataattttagtcaaataactaaagcattttagtcactggtctcggcatatgtcttgcgacaaaacaaacgggatttaggggggcacccattgggcaacccctaaatcccgcttatggcacgagtatcaacacccgtattgcgacgaactactccgtcttgctacgagcgcgaagtaccaccgcacccgcgccaagcagcaccaccatggccgccacaatcgcaatgaccgacgaacccgtggcactcaacgaagcgccattcttgtcattgttcttgttgtcgttctggctgggcttgttcggcttggtatcgccaggcttgttctggtcgccgggcttgttcggcgtcaccgcggccttggtgaattcgacggtgacgcccttgccgatggcattgccgttcagcacggccttcaccgtgtacttgccgaccttcgtggacacgacgttcagcgaagccacgccggcggcatcggtcttgacggtggtgtttccgccaatggccgagacgccttcgggcagttcaaacgccacctcggcattggccagcggattgccgaacgaatccttgaccgttgcctgcaccgtgcggatggccttgccgtcggccacggccgaaccgtcgaccgcggtcagcgtggacttcttggcatccggctgggtggggtcggcgaccgtgcacttggccagttcgtcggcggtcggaatcttcaccggatcggtcttgttgccgctgtaatcctcgacctgcacccgcagttcatgactggcgggggatggacctggtgtatgaggcaggtgtggtacgaccacggataataccagtgattggcggagtgttctgcgagtaggtgtagctagcacccagctggttctcctgctgctgcttgccattctcgccgatccacttctcggtcatgtacaggtagcgccagtcttgagtctcaggacgggccagcgtcacattatcgccattccagatcaccgagcaagccggatacggctcaatggcggcatcggcaaatgcacctgttgccgtagcggtagtgccacctgcagtatcgacgttcaccacatagcgggagctgtcaaccggcgcattggcaatcgtcactttgctcttgtcggcggcgaccttgacggtctgggaatacggcttcgcggcgtaacgccacgaaccggtgtcggatttgacggtcacggttttctcgccggatacctgcggattggtccaagagaccttgacgttgccgtccttgcctggttcgactttcacgtcggagacggccgccgcttcgttcagcggcgcttcggtggcgagcgaacgcgagccgtccgcgcccacggcgtagagcttgagcgtggcgatcttcttacccgcgtactgggacaggtccacgctcgcggtcttccagccgttgcctgccgaaccgtccgtcacgtccaccggcaccacggtctcggggtcgtcggcaaggatgaggccaagctgcaacttggaatcatcgctgttgagcttgttgtaggtcaggtcaatcttggagccggcagcgacatccaggtcggtcttgtacaggcgaatggtgttgtcgttggagagcttgccgctcagcaccagcgaatcgccgccttcgtaaccaccgaccttggtgtacttgaagcgtggtaccgcctcgtagtccttaccgtagtcgaagtcggcctgcagcgggtcggagtcggcatcgatccaccactgccatgtcggcagaatatcctgcaggttgatgttgccccactgctggtcgctggtccgttcgccgccatcacgccattcgagaccgtgaccggtgtcgaacgacgtagagaacatggaaccgccaaccacggagcattcggcgatctgggaagcgaagcccttccaaccgtcattgctcgtgccgtcgtcgatgtaattgtcggcgatgtcggtggtgcccttctcgccggtggacgagccggtccacagtcggcgttcgcggtcgaacacctggttctggtatttcggatagaccttcttgtcgtcgcccagttcgcgggagacgaagtcggtgccgagcgcggcgaggctcacatacggcttac

SEQ ID NO: 2461 - DNA, 9964 bp, Unknown
  R50_10m  MAG No. k141_16431
ggttcgcccgtcgatctccaccgcgtcctcgggcagtttctcctcgtctttgccgtcgaaggggtcggggtcggagacgacgcattggacgagcggcacaccggtgacgatggcgcggtcggtgtgatgctcgctcacgccactgagggtggccttgacctccacgctgtctccgggcttgaggatcagcgtctgccagtcatcgggatactcgaactcgccgatctggccgtcgccggcgacgagctggtcggtgaggctcagctcgctcgccttgaaccaagggccgtctccggtgtcagggtcggtgggcgatgcgttggtgatagtgaacacgatgcgagtgtctctcccgttcatgttcagcgcctcgtcaacggtgtcacggtcgccgtcgggccagccggattgctcgtcccatttctcgatggtgagccggggcgtcatgtcgggcgtgtgcgtggtgacggtgttcgagggccgttcgaccccgttgatggtctcggtgaaccggttggccacgggaccgcccgcggcgatgcgctggcattggatgaacgcggtccacgcctgctcatgctcggtgtcggccgacacgagtccaagcatcagctccgtggcgcgcacggtgaccacgccgcgctcgtcggtggcgagctcgaagagttctccgccgaaacggctggcgtcgaagtcggagccggcgatgcgttcgccccgctcggccagggtctcgccgtccttgatgaggtcgcgggcggcgtagacggcccattggccggtgaacttgtcgtaccgggtgtcgatcgggtcgctgatggaccagtcggagacctgcgggtaggcgcggtcgggcggcagcgtggagctgtcgagccggtagaggaacaggctgttgagatagatgctcttgccatccacgctctgcccgtccaccttgaccacgacatccttggccgggttgatcggcttcaaggggttggaaacctggttggtgtccttgcgcacgtcgttgaccagctgggtggccgtgttcgtgaccacgtaatcgtcggtgaccttgatgacggtcatcggcagcgtgacctcatacgaggtgcccagaagcgactggtcgatggccgggtccttcaacgggtcgtggtccttgtcgccaagtgcggcgtagatcttgagatcggctggctgggggtcgcccttgatggtctctcccgtcgccggaacctcggtgtcaacggttttggcgaacacgtatgccacgccgtcgatggcctggatgttgaaccggtcggtcacatccctgccgttggccttgtcggtcacggtgatgtggctctcgtcgagttcgaggtattcgtcgtcccagtcatcgaccatgcccagccgccacaccttgtaggcatggttcgtctgcttggcatcgaggtcgatccgatagtagatgcggtctccaagcaacgcggtcttgccgtcgatcgaaatggacgggtcggcctgggtgtcctccttgcccggctggaagtcgggcggatcgttccataccttgttgcttggcgtgaccgagttgttcaaggtcaatgcccaccggttgtcaaccacggtgtcagccggggcatcctcggccacgacgccctcgaacctgatgatgatcctgggattcgcgcccgccagccagttcgcccgcacatagtcgtcggcgaacacgagacgcacggcatggttcgcgtcgttccactcgctgcggtactggctcttggggatgaacttgccggtggtcaggtcggtgacctccagggtctgcttgtccggctggaagtgctcgtcatacgtgtcggtgaccgccacctcgacgatggcgtaggcgagactgtcgggcaaatgcggctgggtctccagacggtattcgagacgctggccggggaagacgatcttgccgtccacgctgtcctggccgccgccttgggaggattccccgaccacatccttgaccacgggcggtacgtaactgcagaccttcggctcgttggtcccgaccgtgtgggtgttgatggtctgcgaaccggcgttggtcagctccgcgccgttcttgccggcggtgcagaacgtgatctcgtcgtccgcttcgatgtcgaagtcgtcgcgcacttggcccgccccggccccgttggcgtagtttgcgcggccgggcacgagcatcgtgatctgcctggccttcgccaagcccttcaacccggtaaggtaggaggccttggccatggcggtgaccacggtgccatcgatcgtgatgccccactggtcggtgatgtcacggccacggttggcgatgtcgctcacgctgctggaacgatcggtgcccgagtccgcctcgtacacgcggactgccgccgcttcatcggcgtcgaacaggtaatcggctgccgtccaatcatcgaccaaggtgagcgtctgtggggcctggatcaggttcgccggcacggtgccgttgaccacggaggccacacggtctccatcgaggaacaccttgccgtcgccgccggtctggttggtgcggccggggtcgatcacggcctgccacttgccatcggcatcaagcatgatccagcttttgtcgggattgggccgccaggtgtcgaactcgcgttctcccgcatcggcctcgggcagctggttccacttgccccacgcatggtcgctgatgttctggtaatcggatggcaggctgacggtcacatcaaagccgaacacatactcatgatcgaacggcatcatgcccctgtcggccgaacgaaccgcgctgaccgtgttcgacgcgcggtcccagacgatctcgaactcatcggagacatcgcgattgctgtcggtggcgtccacaagcgtgaagtcatccaccgtgtgatcgacgccgttgggttcgatcacgtccctgaaactcagctcgtaaccgccccgcccggtcccatacgtgatggtggtgcggttggtcatccggtcggcgctgacgccttcctcgatgctcttgaccggatctgccggcggcacggcgctgaccttccaggtctccgccggatcccggtccgtggtgtccacggccgcctgcatgcttccctgtttgggcacttggatgtcgatccaatacgtgccctcggcccaggactccatgccgaaatcacccggcgaggccaggttgtcgatcacggtgtcgccgctattggcgaagctgatcggcttgctcacgctgcccgccggcgtgtaggggccgccatcgtaatgcacgatcgcggtgccgcgcaggctctccttgatcgacgaaccgccgttgtccgcgtggatggtgtcgccgaccggcgtggtcgagccgacctgcatgtcggtctgctgacggtgcgaggtggtgacggtcaacggataatcgacgggcggctggttcttggccaacacgaccacacggaacgaggcatcgggattggcattgatggaatcctgcaccagactgtccaccgaacgcacgccaagccggtcggtccatgtggtgccggtcatgtacgactggccttggtactggtaggtgccacgtccttcggccgcccattgggattcccaacgctgacgcgcgttcgagctgacataggagccgctgaacacgccgttgccgaggcgcgcgtagccgacggcaaccatccggcattccgcgtcaccctccccggtgtacgaggccttgcactccgagatcgcgtcggcgaggatggcgttcatatccacgaactgattcgacccatcctccagatcggaagacagggtggtgcccgaatcacgtatcgcctgcttcatgccctccagagtggcgggccaggaatccttgtagatccaatgcacgtcggcggtctgcgatggaacctgcccgccggaaccgccaccgccctcgccggaaccgccaccgccgccctcggcgaacgcggcgggtgccagacatcccaaggccaacgctcctgcggtcagggcggccatcagcatcgtgcgcctgctcttcttcccacctgacatacgtatccgtcctttcatcggaagcgccccatgatgcgctccctcccgtttcacacggatacggaaaaatgcgggcgaccattcacggccgcccgcatccttccttgtccctggaagaagaacgcaccggcgggccttccgccgggacgcctttcccagcttccccctgccagccgtagccagcggcggacaactgcaatcgcatgaaacggtttaatgggactatctgcctttcttttctgatatgtgtgccttttgatacgctattggcttagttaccggctggaggttcgggctgaaccagtaaatgaagagggatgaatggcgggaattgcattttttgatatcgacggaacgctcacatacggcattagctctggcgcatttattgcggaccggttgggtaccggcgacaggatgcgagatgcagaggatcgatacgcacgcggtgagatcggaaatgacacggtatgcgatattgatgctcgtggatacactggccatcgggtaagtgaaattcacggatggttgaacgatctcccgcttgtgcaaggaatcgcacagtccgttgcggaatgcaagtcgaggggaatcaagccagtcctcgcatcctgcgcttggacagtcgtttccgagagccttgcgcagagatttggatttgaagcatggtgcggtccagaacttgctgtcaaggatggcgtgtttattggtaaaacagcggcatatgccgatgaacaaaccaaagtaacattcatgaggcagcaatgtgaatgcttgggagttgaagcttcgaattgcatcgctattggtgacagtcgttctgacctaccgctgttcaaagccgtcggtgtctcgcttgccttcaacgcggacaagcagacacgtgctgctgcgacttttgctttcgaaggagcggatctatccactgcgctagcccgtctctttgaacatttgccagttgaaagctgacttcagactgacaggctgcacactgaggacaagattgggaacgagcctcccaaaaagcttttcgaggtcgtatcattcgtgagcttcatgcgtgaacacctgcgcggtggtgcggttcacgccgactacacgttgcgtcatgtggcacattgcgaaagcctgcccacattcatcgaggatggatggtggtgctggctcttatcaagagcaaagccgaaaacataataaggaatagactgcatctgtatgtcagattgtttgcttgtatgaatgcgggacttgcagccgcacatatcacagtgggtggcttacgcactggctccatgcggatgatgtgtggaacactgtctcaatccgcgagagccacgcgcatgaccagttcaccgtcgtgttcgctaatgatggtgaagccaagcgactcgtagagatggagggcgttggcgttggtgcgctggaccgagaggctggctgcggcgtgaccatcggttcgcagtcggtccagtaacgccgtcatcaggcggtgccctatgcctcggttccgccagtcgggaagcaaggatatggagacttccggtgttgccgtatcgatggtgccgtagcctgcggagttgttcgggaagatccgggcccatgcggcacccacggcctgcgaaccgttcggtggctcggcgcgggcaaccatgcaggcgtcgccaggccgtccgaatccctcgatatatcgccgcaattccggcagctcgacaacgctcctgtccggtgccggggttcccggcggcacatggatcgcctgatacaggaactcgacgagcaacggatattcctccggtcgcatcgccgtgattgcgatggccggaggaacatgagccatgttcgcctccatgtgaagttttttgccatgtgctcgcggcataatcggtcgtgtcatactggtgtcctcttgctcggtcattgccatcgatacagcttcatacgaaaaggaatgcgtcttgccgatatccaagtcttacgaaggaacgtaaactcatagatagcgtcatgacgcgcatcgccatcgaatcgatgtgacggcattcagaaaccattcgtcatggctgactgcgaccaatgcgcccgcataggaggatagcgtattagcaagtgcctgtttggagtgcaggtcgaggtggttggtcggctcatccatgatgatgagctgtggctgttcaatcatgccgaggcacaacagaagtttgcgtagttcgcctggcgagggattgccgccggcgagcagtctgtcggggtcggcgttaagttgggcgtaggcgctgagcacaatggcgcgttgctcgtccgtcaaagcatgcaagcggttcattgcgttggcggtatccatgtcgctggaattttggggaatatacagatatggcattctctccgaatgccgctgcgcttcatcacgctccagcgcttcgatcaatcgtcgtatcaatgcggttttaccgctgccgtttggaccgctgatgccgatgcggtcgcgcgggccgatgctcagcatatcgggttggtccgcgatggcgtggtcgttggggatgcgcgtcaattccctgcgtgagctcggcatgacgttcatccagatggtgccgtcgtagcgtttggccgcttcgctgaggtgagcaagtctgtcggtggcggcggcgatacgcccgtcgaattgcgcgcttgtctgtgcgacagtggtgccgatagccggtttcaggtttttcagggctttacgagcgtcgatgtccttgatatcgatgcgcattccctgattcttccgcatatccagttcgcgcgcacgctgcgcccgctcccgcttgatgcgctgcatgcgttgcagctcctttcgagtggactgtatggcggccgtatcggcacgttgattgtcgcgcatctgctgcgcggcctgggtatatccaccctgataggtgttcgccgccgtgatgttacgcccacgcgcatgtcggcgctccagcatcacgcagcgcgaacacgtcgcgtcgatcagttcgacatcatgggagatcacgatgcctatgccatcgaaccgacgcatcgcctgcgtgatggcttggcgcgtcctgccgtccacatgattggttggctcgtccaacaccagcacgtcgggatcgccggccagcgcacaagcgatttgcagccgcttggcttcgcctccagagagagtctcgtatcggtatgcccaatcgtcgccgatgttcagcgcgtcgcggatggcgatggtctcgcccgtccaatccgccgcgaaatcatccagattcgtaggcgtttcatcagtacgttgcggacagtaggcgactgccatcttgcacgggttcggcgagactgtccccgaatcgggggaaagcatgccgcaggcgagtttggccagtgtggtcttgccaatgccattgtctcccagcactgcggcccagccggccgcgaatgtcgcggacagatgttcgaacaatggttccggcgcgcccggatagcagtaggaaatatcggttagtgtcaatatctgactcatggaagcctctttcgataaggcgcattaatcaaactgtgactatcgaaaagtggcggactgtgccatttattgccaagctgtattcagaaagcagtcctcgtgacggcaccgaaagtcgctatgctaacgagaacttcatcgaatcaggcattgcgattggtacaacggcagatacgcgcgataatgcgcagaacacgcggaatctctcctcatgcaatccgccactgctcaaatcaccaatgctctaaggccttcctgcttcggaaccaccttggcatgtcaggtgttccatcaaatttagttggattttaccatagcaactatcaattcctcaatcctcgcatctcggcatgcacggtgtcccttattcagtcgttgctggcgagtcggtcgagttcgtgttcgatggcgtggcgcaggatctgttgcatggcgtgccgtgttcggcggcggcgattttgaggcggttcttcagccggacgggcaggcgcagggagagcatgactagcggttcgccggcgttgttcttcccggtgggttgtttgtcttcggcctgttggtcgaggactttgtcgaagggcacgggtcggggcagtggctggtagttgcctttcatgccagttcctccttggcgatgcgcgtcagttcgtcggccagttcccggtattcgtacagttgtttggggttcatgccgagcgaggtcttgatcggttgtcgtttggcgatgaaggtgtcgaagcgcgcggtgtcggtttgctccaacgtggctagggtctgggcccaggcgttggtgttcgcctcgacgcgcaccggcagcagggccgccctggtggcatgtcgggcgcggtcgagcgtgtcccatgcctgctggaggtccatcggcgagtccgaggtgggtaggatgacgaaatcggccgcggccagcgtcttgtcgagcagcgggccttgcggaggggcgtcgatgatcgaccattcctttgtggccggggcgccgcccaggtgggcgagggtggccatgttggccggcagtacgtcgaatggtagcgggtctcccgcctgttcggcggcggccgcccataggctggcgctggactgcgggtccgcgtcgtagactgccacctcgatgccgcgccgggccagcacggcggccagatagatgcagctggtggttttggccaccccgccctttgcgttcgccaacgctactcgcatgatgcttcctccttggattcgggaccattcgccggatcgtcggcatggttgattgtttgattgcttggttgtcggattgtttgattgtctgcttgcatgatggtttgacggtcatgtggcccgtctccgggctgggcgcggcctgcggcgcgccatcggcgttgcccgcgttccatgctggccttgccccgggccgtgtcgaagacctcgggatgggcttggagccagtcgacgaacaggccccagcggcggacccagggcaccgtgcggtcgcggcagggcacgccgtcggcttccgccaggcgggcgatctgacggcggtcggtgcacgagcggccgccgtacaagccccattccaagccggcggcgccggcgtaggccaggcattcggccctcaccgggcagtcgtgctcgcataccgacgcgcccgcctgccggaacacgcgggccaggggatgcgtgtcctcgaactccaggccccacatcaggtcggcccacggctgcgggaaatccgcgcagcatcccatgctcttccacgcctccggcgaacgaggcgcggcatccgctatgccggtcatgccttggcctcctcgtgggattccttgtcttcggcgcggtcggttttctccaggccgatggcgtggctggcttggttgcgccggtcgtaggcgcacaccggacactctgcctgcttggtttcgccgtcgaggtgcgcctggcacaatgcgatcgacaggatgccgccgccgtagaccggcacccgccaggccaagcccgaactaaccgccaccggccggtctggatcatggaccgacgtgagctcggtagcagcggcatggctgccggaatgctgcggacctcgtgcccgcttggtgcgcatgtcgaggctgacctgcgcgaagtagcgttcgaccatcgtgccgtccaccagccatgagatccagcgcggattgccatacgcccaatcaaggatcgtctcgacctccgtcagagagcgttccatcagcagctcgtggaccttgcgtcggtctcgcatcgacgccggcctggctgccttcgggtcgatggccgccacacggtcatggatcagcgtcagcacgcgaacctcctgcaaggcccgggaacgcacccgctcgtccgcatcctccgcccctggcgtccacaatgggtcgcgcactccccgaggtggcagcgcca

SEQ ID NO: 2462 - DNA, 3702 bp, Unknown
  R50_10m  MAG No. k141_16451
cagaagcattcgcgtgattattgcggacgaccaggagctggtacgtgccggttttgccatggtcattggttcgcaaccggatatggaggtggtcgggcatgcgcacatccatcagcaccacgtcgggatgcagggattccgccaacgccacggcttgggcgccgtcggacgcctgcccgaccacctccatatccggttgcgaaccaatgaccatggcaaaaccggcacgtaccagctcctggtcgtccgcaataatcacgcgaatgcttctgctctcgttcatgctctccactgtatccgtttcctatcggagcgccgctccataaacaccctgattgttccctgagttcttattgggcaagtctctcaccggggtaacgttcccgcgtgttgcatctgactatccaacgaagccgccggtcgcaactgcatatccggctgcacaccctcatgggcctcgtcgctgaacccggtttcacgcaacactctcaacagctgacgcatatgagccaatgcggcgcgcccccgagcaccaatcgcggcaaaagccgcttcaatctgcatactatcaggcgcaggttcggcgttgagcatcaccagtccctcgtcagcctgcgcaatcaccgattccagcgtggtcagtacttcggtttgcatcgccgcactaatacggttgcgctctaagttggccgccagcaccttttgccgctcctgctcggctcgcagcgcctcctcgcgtcgcaacagcaccagagcgtttgcgccacgcgaacggctccatcgagccatcgcaatgcaggcaaaaccgaccaacatgattcccgcgcccggcagcaagccggacaaaaccagcctccattttgagagcatggaactaccatcgggcaaaaacagatggaacagctgactgtatccattccacccagccatcaccttgatgcccgcaagccacgaatcggctgccagcgccacgctcacccagcgccaagcggactctcgtccatacaataccgccgaatacacggataccatcgcaaacatattgatggtcaaaatcgatggcaagaacaacagttgcacagcagacagcaccgccatcgccagcgcgctgccctctgggaagcggcgacggaacgccaaaggcgagagcataataatcgtcagcattatagtcggcacgcggttcggcgaatacggggcattgccgatcatttgcaaatcgccatacgtggcggaatcaaatagcgcaatcagcacgatagtggcgataacgtccatcagaagatagtgccgctcggtccactgcgcaaatcgacccacccagttcgactcatgcgtatctccttggtcgagtactttggggcgcgcccgatccatcaatcctcgtatacgcgagataacggttagcaccggatcctccgtatcggtgccagactgtggggcggcaggggagagcggaatcgtagccgccacaataaagccaccattcggccctgggccggcctgcacgctgccacccaacgactcaatgcgttcatgcataccaaccaatccgtatccgggcttatggccgtctgctgcagacgtcgcgccacggccgttatcggatacggtaatcgacagcacatcgtttgaccagatttcatcgatggtggctttagcaccctcgcccgcatgtttgcgcgtattggtcagcgcttcctgcacaagacggaacacggcggtttccgcgtcggcagacagccggtcaggttgcgctttgccggtcatatgccgggacaccaccagatgaccgtcaaacagcgaatcgatgtcggcatatccggtactgccactcgcaccgaacacattgaacaaacgctgcatatcatgctgcgcgcgttccgcttcatggcgaatcgtacccatcgtgtgcttggcgatggccagatcatgcgcacccgcataccggccgccatccgactgcacaataatcgtggagagcgtatgtgccaccacatcatgcatatcacgggcgatgcgtgcgcgttcggccagcgccgcgatgcgcgtctcctcggcctctttcgccacaatggaagcgttgcgctcgcgcatggccgccagcgtggcgttgcgcgctcgctgccacaaggccatgatgatgacgctcagcacgctcgattcgatgaacgccgcctccatgccgaagtcagcgagcatcttggccccgcagttgacggcgccgcttgcccccacgacgccggtgaccgccgggcatgtgggcatcgtgatggcatcggacagccagccgtcgcggatgacgcgcgaaccggaggaaggtccgtcgaacagcggacccacgttgaaagacaccgaccagaccatcgccgcgaccagtcccatgacgaacgccgtgacgatgaaccgccaggaatgtcggggattgccgtacagaatcaccgaatacaccatgatcagggcgtagaaatcgaaatacatgatcgccgggccgaacacaagatgcgtgatggtcagcgccacgaacagccaggccgccggctccgggcaatacctgcgcagcatcagcggcacgaagaccggcagcgaccacagcgtcatcgacgcctgagttgcgggaaacaatatgccgcccgtcgaatcagggctggtgacgccgatgaacggcacgcagccggcgatcagcgctgcggcgagcaacgtgtcccatagcagtgtgcgggtcgactcccgtgcgcaccatgccctcacgcgcgccataatctccataacgcgcaaggctagcgtgtccggcgacgaaccggtatcactcttcaggaggatttatggactagagtcttgaaccatgacaatgctgagcaaatactacgtgcccggactggccatagaggaccattccatcgatgttccgctcgactggaccggccatgagccaggccaagcgttcgacggcgaaaccatcaaactgttctatcgcgtggtcaccgcgcccgaacacgtgcatgacgacctgcccctgctgattttcctgcaaggcggtcccggcggtgccggcccgcgcctcaacagcccgacctccgacggatggatcgaggaggccatcaggcacttccgggtgatcctgcccgaccagcgcggcaccggccgctcctcgcgcgtggacacgcacgccatggcccgcatcgccgccgcgcacgacgatgatgccgcggccggcgcacgagcccaagccgactacctgaagaagttccttgccgattccatcgtgcgtgacttcgaacatctgcgcctgaccgaattcggtggccgcaagtgggtgacgatgggccaaagctacggcggcttcctgaccctgaccacactgtccctgttcccggccggcgtaatcgccagcttcaccaccggcggcatcccgcacgtgccggccgacgccgctgaagtgtacgagcataccttcccgcgcatggtgcgcaagacgactcagttctacgagcgctacccacaggacaaggagcgcgtggccgccatcgccgacaagctgccgactactgcggaagtcgccgaattcgttggcaaactcaccgattccgtactgaatccgatggctggtaccgatgtggagcatcgacttggcgtgatcgccggcatggccgcccacggcttcccgctgatgccgaacggcgacccgctcaccatcgaacg

SEQ ID NO: 2463 - DNA, 3644 bp, Unknown
  R50_10m  MAG No. k141_16457
aggaccggggtcatcacgccattgggcgagctgttctccgccacgccacgcgagacgaccctgctcacggaaaatatacttctcgccgaaaggcgcgtatcacggctctggaaccagattcccggcgtcatgcgctgggactacatacggcattccatcagtgaggaactgttcgccaccaacgagatggaaggcgtgcgcagcacccgcaaggaaacccaggacgccgtggacgcggccgacaaggcaaggagggacggcgacgactccaaggcgcggttcagcgaatttgccaagctgtacctgaacctcacggacaaggactccgcgttgccggcgggcatcgccgacatccgcgacatctatgacaaggtcgtgctcgacgaaatcgatgagagcgatcagccggacggcgacctgttccggaaaggcgatgtggaaatacaggggccgcacggcctcgcgatccataacggagtcaaaggcgaaggcaacatcggcgcactcctcaccgatatgatccatctcgcgacctccgacgagattccccggctgcagtcggccatcatgtcgcacttcctgttcgaatacgtccacccgttctacgacggcaacggcagaaccggccggtatctcctggccctgtacctgaaccatgacctgactatgcccaccgtgctatccctgtcccgcaccatcgcggagaacaagaacgcctactacaaagcattcatggaggcggaggacaagctgaactgcggcgaactcacgctcttcgtgaacaccatcctcggattcatccaacaagcccaggatgagctgattgacgaactcggtatcaaggtcgatcagctcgacaaaggtcggatactctgtacacagcttgaaaagaggcatgccctatcgcgcaatgccgtctcggtgctctatggcgtgattcaggaagagctgttcgactcgtccaaatccatgtcgttggacgaagtggcccagcacatcggactatccaaacagagcgcaaggaaatacgtggaagagctcttggccgcggggctggtcatacagaccggaaaacgtccgctgaaaatacaggtggcgaaatcattgaggaatgttctcgccacaggagccgacgagaacgcggaagcctaagaaaagtagacgcaaacatctcatctcaacgaggttcataaaggttcgtaacatgaagaaaggtctgggcaaccaacactgctcggacctttccgcaacactcccgtcagtcgctttccgcgacggctcccctcaggaaggggagccgaggaaaactacttggacacgttgaatttgaactccacaatatctccgtcggccatgacgtagtcgcggccctcctgacggagcttgccttcctccttgatcttggccatggagccgtcggcggccacgaaatcgtcgtaggagacgatgtcagccttgatgaagcccttttcgaagtcggtgtgaatcacgccggcggcctgcggggcggtccagcccttgtggatctgccaagcgcgcacttccttgacgcctgcggtcaggaaggtctgcagtccgaggatgtcgaagcccacgcgggccagttggtcgagaccggactcgctcaagccagcgtcggccagcatttcgcgggcgtccgcctcgtcgagctcggtcaggtctgcctcgaactgagcgttgaggaacacggccggagccggggccacggatgcggcgagcttagcctgcaggtccttgttggccagctcgttgtcgtccacgttgaacacgtagatgaacggcttggcggtcatcagatgcaggtcgtagacggaatccttgtcgaagcggccttcgcgtgcggccttgtcgagcgtctcgccggcttcaaggatggtctttgcctgcttgactgcgtccatgtaggccggctcgatcttcttgcccctcagatccttctccagcttgggcagcgcgttttcgatggtctgcaggtcggcgaggatcagctcggtgttgatggtgtcgatgtcgtcggccggatccaccttgccgttgacgtggacgatgtcgtcgtcctcgaaggcgcgcacgacctcgcagatcgcgtccgcctcgcggatgttggccaggaacttgttgcccaggccttcgccttcggaggcgcccttgacgatgccggcgatgtccacgaaggtcaccgtggcgggcacgaccttttcggtgtggaccagcttggccagcacgggcaaacgcttgtccggcaatggtacgatgccggtgttcggctcgatggtggcgaacgggtagttttcggccagcacgttgttgcgggtcagtgcgttgaacatggtggacttgccgacgttgggcagtccgacgattccgatagtaagagacatggttccagtctagggagaagctggacacattgaacgtgcatgtggtgaaccggccatatgcaaaggcctccgagcatacggctcgaaggccttgactgtgatatgcgaatatacgcgaactctgattggcagtcagccgacgatggcgtctacggcgtcgatgaccgagccgcggaacccgtccttttcaagctgggcgacgcccttgatggtggtaccaccgggcgagcagacggcgtccttcatggcaccgggatgggtttcggtggccatgtagagcgcgccgacaccttcgaccatcttggcggcgagccggtaggcggtggctcgctgcagaccgtactgcacgccggcgtcgcccaaggcctcgatgtacatgtcagtgaaggcgggcgcgcagccggccaccaccatggcgatgttcatatgcgcggtgtccacgcgctcgatgaggctgatggggccgaatagctgctcgaaggtttcggtttcgtcgtcggtcagggtgttgacggattcggtgacgagcacgcccttgcccacggccatcggagtgttcggaatggtgcactggatatggatgtccggggagtcgacggattcgccgtcttcggtggcgaacaggtcctggtacttcttgagattccagccggcggcgatggagacgacgatcttgcccggcctggcaagttcgtcggccagcggcttgacaacggcggcgatctggtagggcttgatggcgatgatgaccacgtcggcggccgtcaccacttccagcgcattgtgcaacggacgcacgccaagttcggcggtggtcttctcaagcttgtcgtagtgggcggcgcaggcgaccatctggccgccggcgaccacgcccgcgtcaacgaagccttgggcgatggcctgggccatgttgccatatccgataaaaccgatggtgaggttctgagtcatacgttttcctttcgtgcatgtatacagagctccctcatcagagggagcttgcttccttgagtcagaacagttcttcgaggtcgccccggttaagggcttcgtcatagagatgcttgaagacgagcgggccgtgcagaccatcatgctcgaattcgttggcaaactcaccgattccgtactgaatccgatggctggtaccgatgtggagcatcgacttggcgtgatcgccggcatggccgcccacggcttcccgctgatgccgaacggcgacccgctcaccatcgaacg

SEQ ID NO: 2464 - DNA, 6513 bp, Unknown
  R50_10m  MAG No. k141_16727
cggggcagggctcccagcggcagccgtggtgtgaacggtgatgccgtcggcagccactccaccggtcacgtcggcactggcctcggtgtccgggaccaccagcgcggcggcgcagcggaagcgcgcggtacgcttgtcatccggaatatcttcgatttgggcgagcagcagcgcattattggccttgtcgtggccgtgagcacccgcccagcgagcagacagaatgcccggagcgttacccatcacatcgacgatgagacctgaatcatccgctacagcgggcagaccggtacggatggccacggcgcgggccttgagcagcgcgttctcctggaaggtgacgccggtttccaccgggtccggcaggtgaaggctaccagcggacaccagttcgatgttttcggcatccgcgccaagatcctcttcgagaatgcggcggatttccacaagcttgccttcgttatgggttgcgacgacgatttgcatgggttctcctttaagaaggctccccttgtcaggggagctggacattgcagaccgtacggcttccagccgacaacctcccctaaaggaaggggagctggcttagtctagggacaaagcggcacgctgggcggcttgcagttccttgttgcccttttcggccaagtcaagcagggtgccgagttcggcacggttgaacggacggtgttctgcggtgccctgaatctcgatgaaggtgccggaaccggtcatggccacgttcatgtcggtcatggcctgactgtcttcaatgtatggcaggtcaagcatcggggtgccgttgatcacgcccaccgatacggcggacacatagtccttaagcacgcggctggcggacttgatatggcggtgcttctccgcccaattgactgcgtcgaccaaagccacgtacgcaccggttacggaagccgtgcgagtgccgccatcggcctgaagcacatcgcagtcaagctgaatctgattttcgccgagcgccttcatatcgatgacgccacgcaggcagcggccaatcagtcggctgatttcgtgggtacggccaccgattttgccacgtacggattcacggtcggtgcgttcggcggtggcacgcggcagcatcgagtattcggcggtgacccagccgaggccggagtccttgcgccaacgcggcacaccaggggtaaaagtggcggtgcacatcacgcgcgtgttaccgcattcgatgagcacggagccttcgggggcgtcggtgaagtggcgggtgatgcgcacggggcgcagctcgtcgaccttgcggccgtcggcacgaattatttggtgattgccaagcatgtctttgatttcaaccatgcgccccagcatacgccatccgctctatgcctggatagcaactcgtcaaccagcatcaaaccccagcgcaatgtcattccctgcttacatatccattccatgacacttggctgcacgccactattttcttatgcaccactcgcttacagagtcaatgcctgcgtacctgatgaggattgggaaagatcgtccgctggaataagaatgccatattccatgaaatcttggttgaattgcttgcgctgcatagcgttgagttcgtaatcgattaacggcaaatatgtatagtccatgtcatgcaacggctcttcatatcgatgaagcacgtgcataattgccgcgctcggcagtggggaccaccatccatccaagccataccggtacggaggaaccaatgtcaagcgtctgttccttgggttgatatcccaacgcagaaaacggtataaaccagcgagaaacgcaatccagcacgcatcgttcacccgtgcaaccgctcggacgaacgatatacgttgatgttgaacattccgagcatgaatcagattgacgcagagcatcttcaacgtagaccaggtcgctccgctttctattgcatcgaaatcaggaggcctacgcagttgcgccaacaacatgtgcaattcgtcttccggaatcgtttgcgagggggccacggcttctaggtgaagaccaaaaccagcccgctcaagcccctcggccaaaacatcaaacaacatacctctttgcccacgcaatacgcgaccaattgcagaccgatccaaaccagtacgctgtgcaagctcataggcattccaaccagtctgcgacatcacttcattcagcacagccgcacacgaattaacagggcaaccagataccacaccgtgatgcacgacatcgcactgttctaacgctcgatgctctacagcgcgccgctctgatacgtcatcgttgcccgccgcgttctcatcattgagagtttcactcatcgaagtcaccttgcctcggccgatttcccggtcatttcatcaaaccgcaatcatcatatcccacaatcccatgacgatacgattcgtcatatcccacaattcagagacggtatgattcgtatcgcatcagttcacacgattcttcaacgattgctccgcaaacgattgctctgcacgcatcacggcattctatcggcacactattcctcccaatcagcccaacgcaacatcacacgcaacatcacacgcaacacccctcacgcaacacccctcacgcaacactgcgccatctctgtaacatcaccgacaacacggcaatcccacaacgtctcggtgcaatatcctctgaaatggtttggtttttcactccacctcgtcggcatcctgaccaggataggaatatgtgtcgttccgcaccatgtacaaaacgttgtcaactgacaacgttcttcaaatcaattggataagacaaatggccatttcccgccaattcatctgaatcaagacgttgtcaactgacaacaaaatgtacattgcaacagcatgcacatatacatatttccccggtgaacagtacccccccccccaaaaaaaacaaggggggccaccctcagctggaaccacgtccggcgaaccgggacgcagttcagcccgaggggacgcggccaatacagccccgggacacagccacagggggtgcaaacacgggggtgcgaccggggttggatctccccgcctcggcggcgaccacaggagtgcggccaacacagacagagggaagagtagccaatgtaaccaaagggatgcggccagtgagatacggtcagagaacctgagtctccgtaggaatcactggctcgcccttcatgaggctctgcgcggtgatgggcagttcggacaacgccttggcgtggtagtcgtgggcggccatgatggcgtcatggccctgccactgagcgtcgatctgcccatgatccacaaagtcgaccagcaggttcttccacgtcggttcaggcgtgaaaccgtccagcttctcctccgagccggaaatcacgtgttcggcttcggctaacgcgtattcgtaggagcggaatgccagtttgcgaccgggcactgtggccttgtccttggatttcttcatgaccggaaccatcgtgccgtcagcgccttcacgttcggtgagcttgtacaccatcgcacaagtgggagcgccggagccggtgaccagcatggtgcccacaccataggagtcgaccggcgcggtctgcaatgcggcgagcgcgtactcatccaaatcgttggtcacggtaatggtggtgttcgtggcgcccagggcgtccagctggttgcgcacacgctgggccatggcggctaggtcgccggagtcgatgcgcacgccacccagttcgggaccggccacctcgacggcggttttcacggcttcctcgatgttgtaggtgtccaccagcagcgtggtgttcttgcccaatgcctcgatctgcgattcgaaggcgtcacgctcggaatcatgcaccaacgtgaagcaatgcgcggcggtgccaatggccttcagaccatacagctgggcggccagcagattggcggtacccttgaatccgcccactacggcggctcgagcggcggccacggcggcccactcgttagtgcggcgtccgcccatatccatgcaaggacgatccttggctgtcgacgccatacgtgaggcggcggaggccactgcggaatcgtagttcagcacggatagaatcaacgtctccagtagcgtgcattcgccgaacgtgccttcgacctgcaaaatcggggagttcgggaagaacatctcaccttcgcggtaaccgcgaatcgtaccggagaagtggaagttctccagccacttgatggtctcggggcttaccacgtgacggtcggccaggaacttcaggtccgcttcgtccaagtggaaatgttccagcgcatccagaatacggccggtgccggccaccacgccatagcgacggccttcgggcaggcgacgcgtgaacacctcgaacacgcacttacggtcggcggtaccgtctttcagggcggcgtcgagcatcgtgtattcatacatgtcggtcatcagagccggcgaataatcgaccattgcaaggcctttcctacataagtggtgaagttgcacctaagtgtagtccgggcaaagccatacagcccactggcgaagcggtagactcgatgcatgagattcatcgtggcgttgtggcgctttgcgatcgccggtttctgcttcgtgggcacatatgaggcatggtccaaaccgcagttctgggtgtatttcacgttccagaccggtttcgtgctgggcatcgtgatgctgtgggccggcgcggccacactgctcaaaggtattcagccgcctgcatggcctaagggatgcctgactgtgtacgccatagtcaccgcactggtggcgttcttcctgatgcctccggacgacccggcatacgtgccacaggttattggcatcatgaccaatacgatgctgcacaaaatcgccccgattatggcggttatcgatttcgtgctattcgatccgcaccggcgtttccgctggcattacatgttctcgtggctggcgtatttccctgcatacttggtcttcgtgctggcccgtgcggcgatttggccgggttccggaccggcggccggcggcagtccgtatccgtacgacttcatcgacctcgacgcactcggctggcaagggttcggcattagctgcggcaagctggccatagcgttcttcgtgatatcgctcgttgtctggctgctcgaccgcgcactgccgagcaaggccttactcggatagacgcgcccacgatcgacgcacatcggtcttagtgcccagccggcatccagctcagcactcgatggcctcagcattcaatggaataggcgcggtttttgtactcgcgccaatccggccagtcttcaccggcgtagagggctgcatatggaactgcgtggccacctgacgaatggtgtaggacaccatgactccttactgcggcgacacgccgaagcgtcgcagccgtttgcattcaagttcacttgaactggaaccttagtatctaagaacacttacgaataccactcgatcggcgtcggtttgcccatcgcagaccagcattcgtaagaacaaaaatgacattgtaaggagactcaatgttcgagccaaccaccacctacgctcccaacccgcaccgttacgacacgatgacctacaaccacgccggcacctccggcctcaagctgccggccgtctcactcggcttctggcacaacttcggcgacatcacgccattcgaccagatgaagtccctggtcttcaccgccttcgacaacggcatcacccacttcgatctggccaacaactatggccccgaacccggccaggccgagaagaactgcggcctgctgctcgccaagtacttcaggcaccaccgcgacgaactcgtcatctccaccaaggccggctacgaaatgtgggccggcccctatggcgacctcggcagccgcaagtacctgctcgccagcctcgaccagtcgctcgaacgcctgggcctggattatgtggacatcttctaccatcaccacccggacccggaaaccccgcttgaggagacgatgggcgcgctggctcaggccgtgaactccggcaaggccctgtacgtgggtctgtccaactacgatggcccgacgatggagaaggccgccgcgattctcgccgacctgcacgtgccgttcatcatcaaccagaacaagtacaacatcctcgaccgcaccgttgaaaagaacggcctgaaagagaccgccttcaagctgggcaaaggccttatcaccttctgcccgctggctcagggcctgctgaccaaccgctatctcaacggcattccggccgacagccgcatggctcacgatccgcgattcctcaacgattccgcgctgaccgagaaactgcacagccaagtcgcggacctcaacaacctggcctccgagcgcggccagacgctggccgagatgagcctggcatggctgctgcacgacggcaaggtgacttccgtgctggccggtgcctccaagcctcagcagattctcgagaacatcggcgcgctgaaga

SEQ ID NO: 2465 - DNA, 6786 bp, Unknown
  R50_10m  MAG No. k141_16757
aatttgatgccgatgcggatcttgccggtttcgtccgcgccgcaggcggccagcgacattgtgcaggccacggcggcgagcgcggcgatcacgcggcaaaccttccgtttgaacgtattggtgaatgtcattggattgcgtacccgtctttcagtgggtgaggatcttcgagaggaagtccttggcacggtcggtctgcggatgctcgaagaactcgtcgggcgtgttctcttcgagaatctggccgtccgccatgaagacgatgcggtcggcggccttgcgcgcgaagcccatctcgtgggtcacgcagatcatcgtcatgccttcatgcgcgagttcgaccatcacgtcgagcacttcgttgaccatttccgggtcgagtgcggaggtgggctcgtcgaacagcatgaccttggggcgcatggcgagcgcgcgggcgatggccacacgctgctgctggccgccggagagctgggagggcatcttgctggcttgggagtcgacgcccacgcgggcgagcaggtccatggccagttgctcggcttccttcttgtccatgtgacgcaccttgatgagggccaacgtcacgttttcaagaatggttttgttggcgaacaggttgaacgactggaacaccatgccaacttcggccctgaggttcgcgagctccttgccttcctgtggcaggggcttgccgtcgatgcggatgtcgccggaatcgatggtctcgaggcgattgatggtgcggcacatcgtggacttgcctgagccggacgggcccacgaccaccagcacctcacccttggtgacggtcaggttgatgtccttcaggacatgcaaagcaccgaagtgcttttcgacgtgggtcagttcgactagcggacggttcaggtcctctttgccgggaaccagcggggtcaatttggccttgcttggtgatgttgtgcttgtcgtgcgcgaacgcactgctgtttcattgttcgtttcagacatgagtgggaggataacacaccgacgtttccaacgtgttcacagtatgtccacacagttgctcagtcgatgtctcatttccgcatcagacatcgtgaaggcggcattgggcatcggcatacattctcgctgagtcgcgcatcgctcggcgtctgctgtgcgctgattgcctgctgcgtggcggctgagacgttgctgcgacggcaaagcgggcacgtgttgtcctatctgctgattccatgtttggccttggtgtcgttggcgttgctgccgtgtatgccgcagtcgggcgcatggctggcggtcactttgtattgtgtggggctggtctcgccgtttcccatgtcgtattcgtataaatgtgctaggcattttgagcgtggctagctgttcgcacacgatgagtgctgttatacggtggacgacactcccgaagcgcggtggataaccgggcgcggcacacgatatgccggtggataaccggttcgcgccgcttaagttatccccatttttcggttttgcccctgtgccaccgtggaatgcgctacgctcggcgcatgaacggatacaacgaagcgccgcacaatggcgaaatcaacaactatctgcgcaaagatcttgacgccaaagccacggccaagaacacggcctgttggaatctgctgggcaaagtgcgcacgaaacgcacgttgtgtttctcgctgtataccgcattggaattatgcggcgtggagttgccgaggcacagcacgttgccgcagaaggatttttatgtgacggtgaggagcaaggggacccgctcttcattggacaatgtcgactatcgcatatggaatgcaaagttcaacagtatcgctttctcaaacggcgtaatctgcatgcatcccatggatgcgtggatacagtttgcccaatatctcaacctcactgaattagtggtgctggctgaagcgctcatcagacgttatggatatgccattgaacaattcactcaacgactaacggcctttcaccgcgttattggtcgtgcgcgttgtgaggcagcgctgaagctcgtaaaaccatcggattccgttcaggaaactcgtacacgcttggcgcttatgcttttcggcctgcccataccgcaaacacaatatggcattaccgattcagagaacggatacacctacaccgttgacatggcttatccacaatacaaagtcgctattgaatatgatggcgatcatcaccgtcgcttccgcaaacaatatgtgcgggaccagcaaaaacgtcgacgtctgcggcaattgggctggaccgtcatcgaggtgttcgccgatgacctgtggaacaccgccaaacaacgtgccttcgcacaagaggttgccaccgcgatgcaaataccgcttcctggccgtcctcaaccttcatgccgggtattaatagacggcagccttaccatcaatgcgcgcaaaggggaatacaggaggcggaaacaagcaaaacacaacaaagcatcacaacattaatcaaatacggagttgcgatcgctcctcatgaggcggtaatttgcccatggggcggtttgaagaaattgtaaaaccgcggaattaagccattttgacctaccgccccatggggttttcaccgccccatgggttgtttaccgccccatgaggaagttaccgccccatggaaggataatcggcaaacgccaagggggacaccgcatggtgcgaggtttgccgcatggcggaggtgccatcgggcggagtatttggcaccccttggcaggtatttggcacattgggccccacccgcaaaaagcaaatggcccttggaattattccaagggccatttgcggctaatagcaccggagcattactcctcgaaaattaatctacgcatgcggagaccgccgttcgaagccgaaggcgcactaaggtgcgtcgagtgctgaggaaaggcggtatacgctccgtagattagttttcgtcggcgtccgggtcgtagtcgacgccggtctcggcgcgctgctcgtcggagatcggggccggagcaccggtcagcgggtcgcggccgccgccggccttcgggaaggcgatgacgtcgcggatggagtcggcaccggccaggatggacacggtgcggtcccaaccgagggccaaacccgcgtgaggcggagcgccgtacttgaatgcctcaagcaggaagccgaacttctcgtcggcctcttccttggtgatgcccagcacatcgagcacacgggcttggatgtcgtcgcggtggatacgtacggaaccgccgcccatctcctcaccgttgcagacaatgtcgtaggaatcggacatggcgtgctcgggatccttgtcgaacttgtcgatccaatccttggagggcatggtgaacgggtggtgcatggaggtccacttggagtggccgacagccacatcgtcatcatccggatcgtcggtgggcttgaacagcgggaagtccacgacccaagtgaaagcgaacttcttcggatccagcaggccttcgcgggaggcgagctccacacgcacggcacccagcagcagctgggcggactcgcgagaaccggcggcgaagaagacggcgtcgccttcctcggcaccgacggcctcgcgcaggccgttgcgctcctcatcggacaggttcttggcgacggggcccttgagttcgccgttttcgccgaagaccacgtaggcaaggcccttggctccacgctgacgagcccaatcctgccaagcgtcgaactgacgacgcggcgtggcggcaccgcccttgaagaccacggcacccacgtacggggcctggaacacgcggaacggcgtgttcttgaagtactcggtcagttccaccagcgggttgccgaagcgcaggtccggcttgtcggagccgtacttgtccatcgcatccttccaggtgatgcgcggcagcggcagctggacctcatagccggcggacttccagatggcggcgatgaccttctcagtcatggccatcacatcttcctggtccacgtaggccatctccatatcgagctgagtgaactcgggctgacggtcggcgcggaagtcctcgtcacggtagcagcgggcgagctggtagtaacgctcgacaccggagaccatgagcagctgcttgaggagctgcggggactgcggcagggcgtaccaggaaccgggcaccagacgggccggcaccacgaagtcgcgggcgccttccggggtggacttaatgaaggtcggggtctcgacctcggtgaagtccatgtcttccagcgcgtggcgggcggccttagccatgtcggaacgcagcttcagattgtgctgcatggacgggcggcgtaggtcgaggtaacggtacttcagacgcacgtcctcgcccggcagcttgttctcggactcattctcgagagcggtggaaacctggaacggcagagcgtcggacttggcgaggatctcaatggtctcggccacaacctcgatcttgccggtggccagatgggtgttctcgttgccatccgggcgcaggcgcacttcgccggtaatctgaatcacgaattcactgcgcagcgggcgggccatatcctcgtcgtaaatgacgacctgcacgaggccggtcgaatcacgaaggtcgatgaaggccacgccaccgtgatcacggcgtcggtcaacccaaccggcgagggtgaccttctggccgaccagggcctcggtcacttcagtggcatgatgtgttctgtaagccgtctggctcattatcttgtttctcctcgatttttcgcgcgaatacgtcagatttcgacggtttgctgggcaaccacagtatccggctcccacgacgtgcaatcggcggcaacctgctcgcccgtgacgatgttcttgacctcgtcgccagcgggctctgcaccttccgcaccttcggcagcggtggccgggaaccacacgtacggaatgccgagtttgtccgcgtacttgatctgcttgccgagcttggccgcggtgggtgccacgtcggtggcgatgccgcgcgcacgcagttggttcgcaatacggttggcggccgggcggtcctcttcattccacacagcgaccagcacggcggccgggctgacgcggttggcgtgcgcgccggcagcgtgcagcatgtagctgaccagtcggctcaggccgatggacaggcccacgcccgggtacttgcggttgccctgggaggcgagattgtcgtaacggccaccggaacagatggaaccgagtgatgcggcaccgtcgaggaaggtctcgtagacggaaccggtgtagtagtcgagaccgcgggcgatcttcaggtcggcgatgacggaaccggggcggatgacggcggcttcgtcgacgatcatggccagggtatcgagtccctgacgagccagcgtgtatgcctcggaatccttggcgatgccgtgagactcgcacagcgcatcgaacttggcggcaagctcagcaccgtcggaggcggtgagctcggccaattcgaggcaggcgcgtgcctgtgcttcggtggcgccgcaggtctcggtgagcagtcgggccacctcatcggcaccgattttgtcgagcttgtcgatctcgcgcagcacgccttcgacgtccgtcaggccaaggccgcgatagaagccttcagacaacttgcggttattggcgtgcacggtggccttggggaggccatacgcgcgcagctcttccagtgcggagaccatgaccagcggcagttccacttcatagtggtcgggcaggtcgccggcgccgatcacgtcgatgtcggcctgcacgaactcgcggaagcggccttcctgcggacgctcgccacgccacaccttctgaatctgccagcgcttgaacgggaacgccaacgcacccgagtgctcgaccacataccggctcagcggcacggtcagatcgaaatgcaggcccaaccgctcttcaatcggagtgtcggattcatgaccgacctcctgcaaacggctcagcaggtagatctccttgctggtctcgccctttttcaacaaagaagcgccggtttccaccgctcgcgtctcaatgccgatgaagccgttgagctcaaaaaccttacgaagcgtatcgataacacgctgctccacaacacgttcggaggggagccactccgggaatcctgatattgatgcacctttagccacgaaatcaatataataggtgagggttgcgtcaaaacttcctggttcgcccgggatgggagacgctcccgcttatgcattctacgctttaaggagctggccatggccgacgaaactgtcaccgaacccgtaaacaccgctgcgcccgaagagcaggcaacgacacccgcacccgaagccagcgcggccacgccggcgccgactccgtcccccgcttccatgccgaaaccgcacgcgccctcccccgccgccttcgccaagaagactccgtcggccaagccgcgcgctgccgccccggccgccgccaccgccacctattccgaggctgatgtcaaggccgccgaggccttcggccgcgtggatgacaacggcaccgtcttcgtcaaggatggcgacgccgagcgcgaggtaggccagttcccggatgtctccaaggaagaggcgttggcactgtacgcccgtcgtttcctggatctcaaggccaagctcgatctgctggccacccgtctggcttccccgaacatcaaggcccgtgaaatcgacgaatccgcgaagctcttgggtgaagaaacctccgagccggcggtggtgggcg

SEQ ID NO: 2466 - DNA, 11152 bp, Unknown
  R50_10m  MAG No. k141_17187
acaattttcgaatatgtggattcctccttgccgtccgcaccgtcagaagaccccgagcatccagcaagcacaagacccagaaccatcataagaatcacggtcaacgcccaaaccgcacgattgacacgcttcatgttcccgaaacgaaccctgttgttcaacattattctctcccttgtagtcgcagatctgcggatggtcggaaccacgtcaatgtgaatccaaccatcctgataattactgcttattcaatgatatattcatccattgttttcgccgatatatcgcaccagcgtttccctcattatcaactatttcgagttgcatgaatgcgccgtttataggccaagaatttcgtgcttttttgcatcaaattcttcttgggagagaatgccgatatcaaccaattccttcaattttttcatcgcctcgacttgttcttccacagacatggatgccgtgtgagaggcaggagcagcggcttccggtgccggcgcaggcgccggcgcttgaaccggggcggccgtcataggattaatggcttgtgccatattcatgcccagcaacatgccaccatcgccaaagccgttgtcttggatgccttgcgcaatgcgctgctgggcagccatattgccagcttgctgggaaacgccctcgtatgcggcaacattcatcttattcgaggcgaactgctgcacgagttgacgtgattgctcggtgaactcgatactttcgatgcccacactggacacttcaaagccaaaacgatcattccacgtacccgcattggcccgatcgccacgcacgcatgccgcgatgtcattcgtcttgccgggcaattgcgaaatacgatattcattggacaacgaattgatggccacaataaacgactgtacgaattcagacagaatctgcctacgtggcccttcatcatcgaatgaatacgacacggtagtggcaggcacaaagttacgaacgaatcgaactggatcagtgacctttagcgacatggatccgcgtgcgcgaatttccaaatcgacgccatagaaccggtcgttatacaccagcggcgcagaagtgccgaatttgatgccacgaatctcacgcaggttgacgaaggccacatatttggtgcggccaggctgacctccgaaggtgaatcgatcggcaacctgattgaagaacgatccgatgccgtctccggcgagcacgctctgctccccgttgcgatattcataaccgcccgactcggtgatgacgttttcgatacctgtttcagagaaaatgaacgccgcagtattctctggcacatagatacgcgaaccattggtgattattccctcggaaccgtattcattcgaaccgcgatcgttgttgcttccgcggggaatgcccggcacaacgacggtgtgttccgtgaacggaccagcggtgatgatatcacgccacaggtccgcgaatgtaccgccgagcgcgccggcgaacgccttaataactgccatctgttttttcctcgatatctcatgcatatggccgatcttgcgactatgcaatcgcaagaccggccgttatgctggcatgttggttatagctgcgtttcgcgatcgcagtattcgcatcgaacgacttctttgcgatgaccggaaagcggagcgccacaaccttcgcaattcaccgaaaccacaggttcggtaataccaagcccactacggaatgcgccaaaagtgtccttcagcgccccggccagagcctccgttccggggatggccttgttgaaggccggctcatccattggcgtatactgtctgccgcgtatacccatataccgtcatcgttcctttcttggaaaaccgtcacctcgatacgccagtctgatcactggcccaccgatgcgagcttctgcgcgcatcgagtcatgacctcggtgtagtaggccgaatcctcactgctgagggagttttcgtcaatggcgtctaccttctgggagaactcagagtaacgcttcatcatgccggcatagtcggtagccatgctgaccacgttgtcggatttctgatatttgttcatgaagtcaacatactcatcgataaaggcctcgtagctgtccatcgtggacttgaagtcagcactgtcattggtgttctgctgcgccttctgatccgaagactggtcgctctgcttgttggcatcgctggaatcagtgcccgtatcagtgctcttatcatcctgcttcgcggcgtcgccgtccgtagacgtatcttccttcttttccggaacctggatagtgatggacatgatggtctcgtcgtcagtgttacgagaaacgctcacactgtatccatcggcgttcttggcattgaaactgtcagcggacttgctatagtccacggtgaaaccgttgtcttgcacggacttgacgtagtcggcatactgcttggcgtcggtaccgcacacctcgatggagaaatagtccgaagactcgcttttaatttcaccctttgtggatttcggctgcggcagcagcgccgcgatatccgactccggccatgaatatgcttcgcacttggtggcgagcgatgcttccaattccgcccgatcagccttggccttcgcaccgtcacgaattacaaacacgccaccgattaccagacccacaacagtgataccgactgccacccaggccagcactcggccttgcaccttgccactcgggcgggtcacgtagaccgagaagcctgagagcagtgccggaatcaccgtggcgaacagcagtccgccccaggatcggccagaaacatccacaaattgggcgagtacgaacaacactccccaaataatggcgaacacagccagcttggaagtcttcttcaccccttgtgcattcggagcaagcacggcaggcgcagcggcaccagcaaaaccagtggcagcaccggcaccatgtgtggcgggtgcaggagccacaccaatacgcttgtccagagcggcgaggaactcatcaacgcgcttggcgctttcgtttccagtcgcctccagacgaatggcggcccctgccgcaccctgcgggactacggttagcgtgcagttcaccccatcataggagtggaaggaaaacgctccggtctgggtgttttcgttatccaaggtaaacgtggcaccagtagtcagctggtcgtgaataacttggaacagctgttgcggactgaccgcatatacacgatcaaatggcgcgccggcgggccgctgcgatgccgtagccggagtcatcggagtagtggtggcaccatcagacgctacgttcggttggccaaccggtacagtattcggcacggtaggcgcattcgcgcgatcttccggtgcgtcattcgtgccttcggacggtggaaccggctgaggttgttgatcaaacggcgttgtcatgattccttctttccttgagcagcagcattaccagcacagaagaggcaagcccggcaaccgttacggtcaatccgactgccatggcaagccggtatcgttcgctcatcattgcgtcccttcttattgctcgcgttgctctgcgatacatcgaaaccagtgtatggcgttgttattatgtacgcaaattagcattttgtatgcatattagctttattgtcgatgcttgataccgcgcatgaacatcctttccgccaccgcacctacacggatggcatcgactattgtcggcgacacgcgcgggccatacatcagctgacaactgaatttttcggcgtgtttccgaaaagtcggcgtcctgtacgctgggaatcgagcaaccgcgtacgatggcgcagcacagcacccgcaacacagcgacaaggagcatgggcaatggcagacatccccgaagaacatttgaccgaggaactgttggatcggctgctcgccagcgccagcattgagcagtatctcgatgagggacttgtcagcgcacgcacgctgaccgactatctgttcgaccgtatggaagcccatggcctgaaacgagccgacgtggtgcgggcatccggcctcaacgccacagtggtttatgacattttctccggcaaaagccgccccggccgagatcacgccattatgctggcttttggtctcaagtgcacattacgtgaaacccaacggctacttcgtcttgcaggcgtttccgaactgtggtgcaaacagcgacgcgacgcgattatcatctggtgtatacgcaatggattcgaccgcattgccacggacgacgagttgtatcgtatgggagaggcgacgttgctaccggccgattgacgacattcggcccaacaacactcaccagtgagacgcaagtaagagggcatcaaggagagacatggacgataagcaggcgatgcatgcgatgagcatcgacgatgcgtaccatgtcgagcgtacgctcgctcgcggaccttccggcgtcaccgaactggtgagcattgacggcaacggcccgttcgtacgcaagaagattccctctcctctagcgcaacgcaatgtgtgggcggcgctcagcgcctgccagagtaatcgtctgccgcgtgtggaagcgacgtacgagctgcccgaccggttcgtcatcgtctacgattacgtgccgggcagcacgcttgcgcaaattgcggaggaaaacgggcggcttgcaccgaatgtggccgtgcagcttatcgaccaaatttgcgaagccgtgcaggagcttcaccagcacggcgttatccaccgcgacatcacgccggccaacgtcatcgcggcccaggatggcgcgcatctcatcgatttcggcatcgcgcgcatccggtcagaggcaagcaaccgttcacgggataccacggcgcttggcacctacggattcgcctcgcctgagcaatatggctttgccaaaaccgacgcgcgttccgacgtattctcgctgggccggctactcggattcatgctgaccggcgtatatcccgatgccagcgactacgagcagcgacttgccgatgatgccgcagtaccggctcgactacgcgccgtcatcggctatgcgtgcgcattcgagcccagcaaacggccacagagcgtccaagagtttcgccaggcgctgttctcccagtccaatccgcccataccgaacgcatcatcggcaaatccgccatcaacgagaacaacgaacggcagcgcgtcggcgtctcgactattccggcgtctgcacttgagcaaacgcgccatcgtgctgtggtccattgccggagcggcactgataatcgccgccattgcgggaggcattgtgttggcaggccaacttggcattatcgggtcggcaacatcacccgattcctcgacacaatccagcagccaatcaaccgataaggccgatggcgggcactcctcgaacgggtcaggaaccgacaatgccaatggcacgggcggagtaggcggcactgacggcgctgatggagacaatcaagacaccgtcaccgacaatcctctgaaaatagtggaatccggctggtcggcggaccagcaagggtatgtccactacgctttcgccctgcacaacaccagtaagacccagcaggtgcagtatccgcagattaccattacggggcgggccaaagacggttccatcgtgttctcgcagacgcaagcactgaatatggcattcccgaatcagactgtatatgacgccggtcaagcaggcgaaggcaccgccccagaaacggttgattttactgtgctcaatccggatacatacaacgtcgccaaggctcagggaaccgccgccttccccatcagtggaatatccaaaatagacaacagggacggcggcacgacgttcaatggcgaggtccgcgccgtggcagatggattcaagccatctgatggacagcaaatcaagatttccctagtactgcgtaacgcacagaacgcaatcatctatggagatatcgcattcgtggattggccgggcaatggccgatccacgccattctcgattaccgtctacgatctgccgaagtatgtgtcttacgatctgtatgcgcaaatctggtagttgactttacgtctggcagatggccgtcaggtgcctgtcaggccgctgttcgcgtcacctgcgcactgacgttacggcgcgcctggccgaacagatagatgccgatgggcagggtcagaacaccgccgatgatgaacaccagcgaaatcgggatcacgtcggccagtggcgcgaagatcaacatgccgagcggcattccgagcgtgctcagggtggtgtcaaggccgaatacacggcccaccatcttctcatcggcctcggtctggatgatggtgcgcatcgggcccgtgcagatggccgaagccaaaccgttcaccacatcaatcagcaaatacgccagcagattgtgaaccacgccaagaccaacgacggagacgcccaccagagcgatgccgaaggcgaccacgcgcatgttgttgcggatgagcttggcaccgatggtagacatcagcgcgccgccgagcagcataccgatgctccatcccagctcgttggcggcgagtttatcggaggcggtggtcaggttgatgaatccgagattcaaatcgatgccctcatattcgcgggtcatgagcaacagcgtaaggttcatcggcgccacggccacgaagcacaccaaggcgccaccgagcaccacgttgcgcaggttcgcccggcgccatgtgtagctgaagccatctttcaagtcagcaaacacacgacggacgctggcaatcagcgaacgatcagcattggcatccgacatcggttcgagtgcgggttgcccgctattctccgcttcagccatacgcctcgcaacatgttccgcgctcttcttcggcactttgatcaacgccacaaagccgacgccgataatggccgtggtcacatcgactaacagaatcgaccacagcggcactgtgttgataagcacggcggccacagccggtgccacaatcatattcgccgaattaatcacgccgtatattgagttgacgcgcaatagtttgcccgagggaacaacatccggtatgaacgactgcacagcgggcgtctgcaccccgcctcccgccgaacgaatgaacagcaccacgaaaatcatggtcagactcgcccatcccatcgcgaagctcagcgacagcacgacggtgaccacagcaatcaccatatccggcagcatgatcagcagtttgcgattatggcggtccgcccatgagccgccgaagatcgagaccacggcctgcggcaccacgccgaacagggtggccagcagcatcgccgaaccggttctggtctgcaatacgatccaccaccagatggcgtactgcacgatgctggagcccaacagcgaaaacgcctgaccgacgagcagcaacgccacacgccggatccacgcacgctcggattccccgttggccactgctgcggcataggcggcaccgggtttgttcgcgctatggaccgctgcgcgcgcattcgcattgtcatcgccggaaacctcgggtgtttcgcgcgcagttggttcagttgttgtactactagaagacatacgagtgttctccattcttcaattccactacaaaggtcacatcacggcatacgcacgccgacgcgcgtatgcgtgcacgactccagcaacgagccgtacccgccgttagatggcaggcttcagtattgtgacgccatgcgttagcgtcaccatgcaacgagaagaacacactattcaatagtatatcatgaagacgtgacgttgcccttgcgcaggtgccgtaagactccgcggacaaagcaatgaggcttcccccgcgagaagggaagcctcatattccattcattctattcagcgatgatggcgcctaatcaccgatcatcctttgggaacagcgcatcgaaggcatgttccatcacggacttacggcggatcacaccgacgagtctgccatcaccatccaccaccggcagtttcttgaactgcttcttggcgaggattcgggccacctctccaacatgctggtcgggcgtggcggcaacgaccttacgcgtggcgatgtccattaccttcttgccggagagcgcctgcaccttggaggccacggtctcgtcgtcgaacaccaccatcgtcgaaccggtgccggtggagaccgtacgggattcataggtggcaatcgatttcatgacatcgccgtcgctgacgaagccgacgagcctgccatcgccgttcaccacgggaaggctggagacgttgaggcggatgaactcgcgcaccacatgcgtgatgtcatcgctgtccaggcagctgtagggctgatcgtccatgattccgccgatggactgttcctgggcctgcttgaacagggaggcggcgggggccacgtatgcgccggcgtagtgatgctcggcgggctggccttcagtggtttcggccgcgacttcggcggaggcttgcgcctcgtaggccttggcgttgcgtgcggccttctccttggcacggctggtgacggtgaagatgcagatgatcagggcgaccagcgagatggcggcgcacagcaggtaggagaacgcgatgccgctggccgtggcggacttcacaccctgggacatgtgcgaggcggtcatggatgtttctgcggtgaccagaagcgaggtcgcaatggctgccgcgatctggcggccggtgttggcgatggcgttgccatgggcgatcatgtcgttcggcaaagcgttgacgccccaagtgttgatcggcatgttggcgatagcctgaccggatgcctgcaatgcgcagaacacggcgacaaacagcactgatgtcctggtgttgatggtgccgagaagaccaagagagatggtcatgagcgcaaggccgccgatgcccacgccgcgagggccgaatttgtcgaatgcggcgccggcgaccggactcaggatgatgccgaccgccgcggcgggcagcatgaccatgccggtgacggtggcggattggccgagcacattctggatgaagataggcaacgtcacgttggttgcggcgactgcggcgttgatcagagtgaccagaatcacggagttgcggaagttgcgggtggcaagggtatcaacgcgcaacaatggctcatcgagcttgacttgcttgtatacgaatgcgacgaaggccacaagaccaacgacgatcgagataatgacgaccggactggtccatcccatcgtggaagcggacgagaagccatagagcaggccaccgaacgcgatggtcgaaaggatcacggacaggatgttgagctttgggttcttcaactcgctgacgttcttgagcatcatcgtgcctccgacaaggatgaccagtgccacgactgcgatgccaatgaacatcgggcgccatccgaaactgtcaatcaccagaccaccgacaaccgggccgatagccgggccggcggccatgacgataccggccatgcccatggcggtgccgcgcttatccggcggatagacgagcatcggcactacggcgaccaatggcaacagcacgccggagccggcggattgcagtatgcgtccgacgagcaacagcatgaaattcggcgcgacggcacacagcagtgtgccgaccatgaaagtggcaagagctccggcgaagagctttcgggtggagaatttatcaatcagatagcctgaaatcggcaccatgatgcccgagaccagcatgtagacgctggtcacccactgcacggtgccggtggtgatattgaaatcacgcatcagtgccggcaaggccggtgacatgacggtctggttgagcagcgcgatgaacgagccgacgacgatcacacccacaacgatgaatcgggtgtgcggatcaataggctttacggaactggtggcggacccgagttccgcgtttttctgtgaggtcacagcatttccttctgttggtaacgtcatgtgtggcgatccggccccatgcttgtgtcaagacgcgaggacaccgatgagtccggacgtaaaggaaaagccgccatccgttccgcattcatatacggcaaacgattcgcggctttgcgtaagttgatggctatggtgagcgattcatgcgacgtcgactgcggatgggccatcggtacatcccggcataaggcgtgtccccgctacaccagcatcgagaatagggccattcgtggattggcaaacagaacattgccgacgaacgacccacggcaggcgcgtgcgatgaacatcgcgtagcgatacaggttcatggcatctccttgatggggtcttcgtacggcagacatcgagaagcctatcatcattcaaatcgacggtgaaacccacgcatgcctgacaatacacaaaatcttcacaaaaggattgggcttaccgcatacgctccgcctgaataacggtccggggatgaatcaggggcgagccaagggttgcatctcgtgtttccgtcatgatttctggcgaagactcataatagaacacacattatgctgctgcagcagccagtccttgcagaacaatgtcatgacaaaggcctgagaagacgacttctcaggccttatccgcaccgctcccccagtcgcttgcagcgacagctcccctcgaagagggaagccagagaaacacttacttggagacgttgaacttgaactcggcgtcttaccggtcttcttcgtcccgccttgccgcggatattcaatcgcatcgcaggggtgacttcctcgatcatttgacagaccgaccgacggtctgtatgcttgacggggacatgaacgaaaggcaggccatccgcatggcgcacgatatacattccggagacaccgaacgacgaatcctcgattccgcccgcaggctcttcgctgaaaagggctacgagaagacgtccatccaggacatcctgaacgacctgggactgtccaagggcgggctctaccaccacttcaaatcgaaggaggcgattctcgaccggctgaacgccgacgagtgggccgtcaccgcgcgtcttctcgacaaactcatcgagcgcaaggacatgagtgcgcttgagaagctgcgcgtgctcatcgtttccgccgtggacgcccccgatcatctggacctggtccgttcccagctggc

SEQ ID NO: 2467 - DNA, 16237 bp, Unknown
  R50_10m  MAG No. k141_17350
ctcccgggcgggcggtctcgtccctgatcctgccggcgctcgccaccggattcgtgtccggtgcgggcatcatgcgttacacgcgctccattctggaaggcatcgccgatgagggaggtccgattgatatggccatgtcctgcggcatgacccgcacccaggcgttggtgcgcgtgggattgcggttggcggctccgcaactcgtctcggtggtgggactggcgttcgcctcgatgatcaccggcgtgatggtggtggagaacctgttcgccctgcccggtctgggcgccctgttggtgggcgatgtcggcaaccgcgatctggtggccgtgcaaagcgagttgttcctgctcgccgcgttcttcctgctgatcggcctggcggtggatctgctgcacgcgctgcttgacccgcgtctggccgccggaaaggaggaatgatggttgatcgcaatggtcgatggcgtcgttcgggcgtggttctgggcaccatctggtcccgtggcaccggccgctactcgctgatcgtgctggggttgtggatggtcgtcgccctggtgtcgttgttctggaccccgcagtcgctgctggccaccgacggctaccacgtgtgggataagccgtcgtccgcgcattggctgggcaccgacggcaccggcgcggatgtgctgagctggctgatggccggatcgcgcacgaaccttgccatcgccctgctcaccgttgtctgctcggctgccatcggcatcctactggtcgggctgatggtcgcccgttcttcggcgctcgcttcggcgtcggtcgccgtggtcgacgcgctgatctccatccccaccgtgctcatcgccctgctgctcgccgtgccgttcggcgcatccgcggccgtggtgatcggcgcgtgctccatcggctacgggctgcatctggcgcgcgtcgcccgtccggccgccctgctcgccgcccgctcgggatacgtgcagtcggcccgggcgaacggtgccagtgggttcggcgtactggtcagacacatcgtgccgaacatcacgccggtgctgatggtgcaatcgtcgatgtcggcgggcacctcggtgctggccgaggcgggcctgacctatctgggcgtgggcgtcggcgcgggggtgccgagctggggccattcgctggccacctcggtcaaactcatcaacgtgtttccgttgacggtggtgtggcccggtctgatcgtcaccctggtggtggtcgcgctgaacctgttcggcgacgcgttgcgcgacgccaccgacccggtggctaatcccgcgttgcggcagatgactgtgcccggtgcggttgtgccggtggctaggggagccggtgacactgcggcgcagtccgcagtggcagcgccgaaggagacggatgatgagcgttgaaattcacgggctgaatattgctatcggcggcaaaccgattgtcacggatgtcgatctgtccatcgcggacggcgaacgggtcggcctgatcggttcctccggctccggcaaatcgatgatcgccaagtcattgctcggcctgttgccgcgcgaggccgtgctgtccggcaccatcacgatgggagaaaccgccatcctgtccggagaaaccgccgagtcgcggcatgggcaggaagatgactcaggatctgacgaagaacgcggcgcggcagataggcaccatgttgccggtgaacgcagggttgccacctcgggccacgattccgctgcgtacgccgacgagcatacgcttgccgatctgcgcggccggtatgtgggtacggtattccagaatccggcccatgcgctgaacccggtgatgaccgtggcgcagcagattgcgttgccgttgagactgcactacgatctgaccaaggccgaacgtgctgagcgagtgaataccatgctggacaaggtcggactggaccgtgacgtggccggcacatacccgcacgaactgtccggcggccaacagcagcgcgtgggcatcgccacggcgctgatcacctcaccgcgattcatcatcgcggacgaacccaccaccgcgctcgactccatcacgcaacgtcagatcgtggacctgctgacctcgttggtggacgacgccggcgcatccatgctgttcatcacccatgatttctccgtactcgcgcgtgccaccacccgctgctacgtgctggacgccggccgcatcgtcgaatccggacccaccgccgacctgcttgctgcaccgaccacgccgcaagcccaacgcttggtcgccgccgcccaaaccctcaccctccacacccccaaggaggattcgcatgagtaacagcagtgtgccactcctctccgcccactccatcaccaaatccttcggaccgcgcaccgcacgccaccaagtcctcttcgacgtctccgccgacgtccacgccggcgaatgtctggccgtgatcggcggctccggatccggcaaatccacgctgacccgcattatgctgggcttggaatccgcggactccggcagcgtggaatacgagagccaatccattgtcggcggccgaaaatcgccgggattcgcgaccctgcgccgcgaatcgggactggtgttccaggacccgttctcatcactcgacccgcgttggcaagtcgccaaatcggtggctgaaccgctgagtctgcagcgacgtgatctgaacaacaccgatatcgacgagcgggtggtcgcggctctgaccatggcgggtcttgaaccggcggacttcctgaaccggtacccaatcgacctgtctggtggccaggcgcagcgtgtggtcatcgcccgcgccatcatcaacgagcccaaggtaatcctcgccgacgaaccaatgagcgccatcgacgtggccgcgcgcatccagatcctcgacaccttcgccgctatccgtgaggcccggccgagcaccgccatcatcatggtctcccacgatctcggcgtggtgcagcacatcgccaaccgcatcctcgtgcttcacgacgggcgcgtcgaagagacgggtcccaccgccgaagtgctcggcaacccccaatccgattacacccgtcagctcatcgaggcagcctcgttatagatctttttggctcccctccctgaggggagctgtcgaatgcagtgaggctgaggggagttacgggtgccgtcgtactcccctcagtccgccggcgacacgcgcttgtcgcgggttgtgctatggtgtgaggcatgcagattatctcatgttgttgtcgctaaccgacgcccctgggcgagcggtcagtgacgcataacttgagatggagcattcgaatcgcggcgaatctgccgcatacttttcatgtatccgatggcacaagcgtaatcgtgtaatgcgcgagccgtggttaacatgaaaaaccggttcacttttcggattcaccgtacagtgagcgggaatactcgattttcaaaccaaagccacagtccattcgtctgggaacgtcggttcacgaacgcaacgcagcaaaacccccacaaccccagcaacgaaggacttcacatgaccatccacaacagcctcgcagaactcatcggcaacaccccgctcgtcaagctcaaccacatcccgcaggcggccggcgtcaaagccaccatcgccgtcaaagtcgaatacttcaaccccggcggctcctccaaggaccgcatcgccgagcgcatcatcgacgccgccgaacagtccggccagctgaagcccggcggcgtgatcgtcgagcccacctcgggcaacaccggcgtcggcctggccctggtcgcccagcagcgcggctaccgcacgattttcaccctgccggacaaggtttccgaatccaagcgcgcggtgctgcgcgcctacggtgccgaagtcatcgtcacaccgaccgacgccggcccggacgacccgcgctcctactaccaggtcgccgaacgactggccaacacgattcccggcggcttccgcccgaaccagtacgacaacccgaacggcccgctgagccactactacaccaccggccccgagatctgggaggctacggaccacaaggtcacgcacttcgtggccggcattggcaccggcggcaccatctccggcaccggcaagtacctcaaggaagcctccaacggcgcggtcaaggtcatcggctccgacccggaaggctccatctactccgcttcctcacgcgacgaagtccaccagtacgacatcgagggcgtgggggaggacttctaccccaaggctttcgaccggaacatcaccgacgacatcgtgcgcgtatccgacgccgaagcctttgaaatgacccgccgtctggccggcgaggaggcgttgctggtcggcggctcgtccggcatggccgtggccagcgccatcaagtacgcgcttgccaatgatttggacgagaaccagattgtggtggtgctcgcccctgattccggccgcagttatctggagaagatcttcaatgacgactggatgcgtgccaacggctacggcgacatcgtggaacgcaccagcaagccctccctcgccgagcagtaccttaacggaactccctctgatgagggagctgcggatggactccataactagctatcaaaagaatcaataccaacatccgcactaactaaccgcacctgttttaccttcgaatacggaacaatcccgaaaggaacccaatatcatgtccgctgaatacaacgccaagttcgccaacaccgacatcgccactcgcgccatccacgccggccagaagcccgacccgaccaccggtgcggtcgtcacgccgatcttcgccacctccactttcaagcaggatggcgtgttgggcctcaggggaggccacgactactctcgctccatcaaccccactcgcaccagcttcgacgagcagctcgccgccgtggaaggcggcaagtacgcgctgagcttctcctcgggcttggccgccatcgacgtgctgctgcgctccaccatcaagcccggcgacaacatcctgctcggcaacgatgtgtacggtggcacctaccgcctgctctccaaggtgttcgtgccgtggggtgtgggcctcgacgtggtggacatcaccgatctgaaagccgtggaaaccgcattggcctccaagcactaccagtatgtgtgggtcgagaccccgtccaacccgctgctcaacatcaccgacatcgcggccaccgccgaagttgcccacaagtacggcaccaaggtcgcggtcgacaacaccttcgcctcgcccgcccttcagcacccgctggccgatggcgccgatgtggtggtctactccaccaccaagtacatcggcggccactccgacgtggtcggcggtgccgtggtggtcaacgacgaggagacccgtgagaaggtcgccttcctgcagaacgccgccggcgcagtgccctccccgttcgactcctggctggacatccgcggcctgaagaccctggatctgcgcgtcaagcgccacagtgccaacgccctgaaggtggccgaatggctcgaatcccagccctctgatgtgattgagcgcgtctggtacccgggcctcgagtcccacccgggtcatgaaatcgccgcccgccagatgcacggcggcttcggcggcatcgtctccgtgcagctcgcggccggtgccgaggcggccaagcacttcgtggaccacacgcagatcttcacactggccgaatcgctcggcggtgtggaaagcctcatcgaggtgcccgccgccatgacccacgcctccgtggccggcaccaccctgcaggtgcccgccaatctggtgcgtatttcggtcggtatcgagaacgccgacgaccttatcgccgatctcaagcaggcgttggatcgtatctgaccgtactgacggtactggtgacaccgtattgacggtgccaccacgcttatcggcggactcgctatcgattggtacctacaaaaaatccccggcccacaagggtcggggattttccgttatcgattaaacatggattgaatcagctggcgttgccgccctgccatccggtggcatccgcaccagccgggcgcaacgcctgaccggaagtcggtgtggtgccatcaacgaccacacgagtgccgatggtggcgaagtcgtacatccacttggcgtcggccacctgcatgttgatgcagccgtgcgagcctgggataccctgctgcacatagatggggtgctcgccccacatgtatgcaggaacaccgtgcagggcctcgccgccgttatagtaggaaatccacggcgtgcctggctggttgtagccttcgccaaccatggtctgcgattcgtacttgagatacacgtagaacgtgccggtatcggacagcatggaaccatcggcggtgggcttgccagaagcgatgttgaacttcttgaccaccgtggtgccctgatatgcagtggcagtctggttcgtcagatcaacatgaacccacttatcgccatttgccgtatcgaagttatgaggcacctcgacctgcttgacatcatatgggctgtctttcacagccacagtggaatcagtggactggttctgctcgatggcggtagccagacgttcgggggcgtccccggcaccagtcacttcaataccatccacaccgagtgtcttatcggcaccaatttccacgccgccttcgtctttcggcgtgatgtagacctcgcgtgtcaccttgggaacagtcagttccttggttacgctgtcactggtgacgtacttggtgatggcatcgcggtcgactaccaggctcatggtgccacccgccttattcaccgtgggcttgaggaatgaggcaatggtatcggccgggatggtgacgctcttgttcacgccgttgtccacggtcagtttgaggccaagcttggcattggcgtcaaactgtgtttgctgtgcgctcgcgtcatcaatcggattctttgcagtctgtagcttgaccggcaccgtcgcattttcgcccggggtcgcgacggcctccttgactgcagcattgacaacattgatatccggacccttgccatcctgacctgcggtgtaatcgaactgcttggtgctcttgttgtagacaacggtggcaatctgcgctcggtcggcctcatcgaccaggccggcggtgacgaattgttcggcagtctctttgtccctggtggcggtcagagcgatatgcggctgatcgaaaatattgagcttggccacgtcgccggtcttcgcgttcaacagcgcatctacggttttatccgtgtcgacggtgacgccaaggtccttcagcgaggctttgacgctgttgccttcggcggtgaacgtcactgtggtgttattcagctgctgcttcacagtattcgcaagttcttcgcgggtctggcccatgacagagacattgcccaaatgaacaccgggcgcagccttgtcttggaagtaccaacgtccgacgaagaaataggctattaatgcggcaagcaacactgcaaatatggttatgatggcaatccgtgcggccttgccatgtgatttagcggtggtagatgccataacatgttcacccacataggctgtattgtcggcatggttattggtgccattgtcgctttgctgtggcgtggcggtacctgtggccgcggctgcgaacagcccatcggcggccacaggctgcagcaccgccgtctcctgatcgtcaggagaggagaaggaaaatgtatcgttggccataaaatgccccgtcttagttctctcaaagcggcatatcgtgtgatatgccgggaataacgtttcttgacgcataataatacggaagggctacgtacatcgttacgaggtattccgttatacgatgaaatccatccgcggtcggcctacactggtcgtttatgacagcacatcaggcggcgctggaggcgctcacacgatacttcggctatgactcgtttaggcccggacagcaaggaattgtcgaggctttgcttgccggacacgatgtcttgggcgtgatgcccaccggcgcaggcaagtccgtgtgctaccagattcccgccgcgctcagcccgggtgtgactctggtcgtatctcccttgatttccctgatgcgcgaccaggtcgatgcgctgaacgacctcggtctgccggccgcgttcatcaacaccactcaaactcccgacgagcaggcgatggtgttcgcccaagccgccgccgggcagatcaaactgctgtacgtggccccggaacgcttggaaaccgggcgattccgcgactttgccgcccgtacgccgatctcgctgatcgccgtggacgaagcccactgcgtctcccagtggggtcaggacttccgctcgtcgtacttaggtatcggcgatttcatcgccgggctgccgcagcgtccaccggtgggtgcgttcaccgccaccgccaccgaacgggtgcgccgggacatcgtgggactgctgggattgcggaatccggccgtcaccgttaccggattcgaccggccgaacctgtattttgatgtggtcaaactggagaccaaatacagggccgcatgggtggcgcggtatgtggccgaccatccggacgaatccggcatcgtctactgcgccacccgcaagaccaccgaagcgctcgccgacacgctgaaccagatggggcatccggccgtcgcctaccatggcggcatgtcgccggacgcgcgtgaggtggcccagcgcgacttcatcaccgacaaggtgccggtggtcgtggccaccaacgccttcggcatgggcatcgataagtccaacgtgcgttacgtcatccaccacaatctacccgaatccattgaagcctactatcaggaggccggccgcgcgggccgtgacggcgagcccagccgatgcacgctgctgtggaatgagtcagacatcgtcacccggcgtcggttgctggataacgattatgagaacgagcgattgactcccgaagagcaggagatcgttcgccagtccaagcgccggctgctggacggtatggtcggctactgccgcaccaccgactgcctgcaccggtatatgacccggtatttcggtcaggaattgtcgccgaatgctggttccgcggcgggtgaagacattgcggcggactcttcgcagtccggcagatgcggtgcctgctcgaactgcgaaagcacgttcgagaccatcgacgtgacccgcgtggcgcaggcgatcagccgttgcgtgcatgacgtggggcagcgcgtcggttccggcaagatcgtcaagatcctgcgcggttcgcgggcacaggatctggcatggctgaacccggagcggatgcccaccttcggcatgctcaaggacgtgaacgaggctcgcgtgcgcgacgtgttgagccagatggccacggacgggtacctgtcaatcgccgaagggcgtatgccaatcgtcatgttcggtgcgcgggcggccgaaaccgccgctcccgacttccactatgagatcaaacgggtggaacgcaagtcggcggcggccggttccggtcggagcgggggagtggctgatactgccgattccgccaatgttcccggcgatgcgctgggctcgtatatcccggacgatgacgaggaatcgctgttccagaagctacgcgaactgcgacgcaccatcgcccaggaaatcggcaagccgccgtacatcgtgttctccgacaagaccttgcgcgacatggcccgcatcaagccggttaccaacgcgcaatttctggcggtcaacggcgtcggtcaacacaagctcgacctctacggccagcgcttcatgcaaaccatcgcctcgttcaatgccgggagtgcgtcataacaatctcctatagcgaaccgcggagtatttgcgggcgttcttgggctggcgcgactacgatgactgttcgatacttcatgaccgaacactcagcaagtagaaaggcaacagcatggcagaagacaaggccgaaaagcccgtcgtcgaatcattccagcttgatcacaccaaggtcaaggcgccgtacgtgcgttacatcgacaccgaaacgggccctcacggcgacgtgatctccaattacgatctgcgcctgacccagccgaacgagcaggccatccccaccggcggcctgcacaccatcgaacacaccatcgccgtgctgctgcgtgaacgcattcccggctacatcgactgctcgccgttcggctgccgcaccggcttccacctgctgacctggggcacccactccaccgaggatgtggccaaggcgttgaaggaatcgttggagttcatcgcatacaaggccacatgggatgacgtgcccgccaccaccgagaagagctgcggcaactatcgcgaccacagcctgttcgccgccaaggaatgggccaagcagatccttgaggaaggcatcagctccgacccgttcgagcgcaaggtcgtctgattcgtctgattcgattcaattctgattcggctcccgctggcgggagccgggggcgaagccgactgagggtggctgtcctcaactcggctggactgtccggctcctgcggacggaagccattgtttattagtgtccgtcatgcaacgcggacgggatttcttgtgcctacggcatggtaggttggccgtcagttagtcgccggtcaccgtgccggcaacccggcatgtcggagaggtgagaagtgactcagtcgaacgctgcaaacaaggcgacaggccgccgtttccgccacgccaccatgcgcgatctgccgcagatgcagaaaatctacgcacgcgcacgcgcgttgatggccgccaacggcaaccccacccagtggggcaacgaatttccgcgtgaatcggtgattgaggacgacatcgccaaccagcgtacgatgctgctggtcgacacctgcaatggccacgaacgcattctggcccagttcgccctgtgcccgggcaaggatccgacctacgccaaaatcgacggcgcctggctggacaacgacacctatgtgaccatccaccgcatcgccgcatccggtctggtgcgccacgcggcccgcgactgcatcaggtgggccctgaagcactacggcaacgtgcgcgccgacacccaccccaataacaaggccatgcagcacgtgctcgaaagctccggcttcgcccgttgcggcctgatccagctgctcgaccggccggtcgacaccaccagaatcgcctatcagcgccacgagtggtgagtgtggctgtcgccagcgtgttcggttccgcggtggagcaggtcaggtaaggtccacgtcgtcgcgcacgtacggtccgtcggccgcccgttcaaactcgtgcatatcgcaaaaaccgtacgctgaaagtaactcagcgtacggttttcacgaaagcagccatcgactatcggtcagccgatagacctcagtcctcagtcgcagcgaccttggtgtcagccccggccttctgctcaaggccgagcttggagcgcttgcggctgtagccgaagtacacgatcaggcccagaccgaaccagatggcgaaacgcacccaggtctcccagttgagaccggcgatgagcacgaagcagaatacgatggccagaatcggggtgaccggcacgcccggcgcgcggaagccgcggggcgcattcggctgggtcttgcgcatccatagaataccggccgacacgatgatgaacgcggacagcgtaccgatgttcaccagctcgaacagcacgttgatgttgatgaagccgccggcgaacgcggtcagcagaccgaagaaccaggtgcccttgaacggggtgcggtacttctcgtgcacgtggccgaagaacttcgggaacaggccgtcacggctcatggcgtagcagatacgggactggccgtacagctgtacgagcatcaccgtggtcatgccgatgagggcgcctaggttcacgatcaccgcgagccagttcatgccggtctccagaatcacgccggccactggggcgtcgatgtacttggcgaactccttgtagggcaccacgccggtcatgatcatggtcatgacgatgtagagcacggtggaaacggccagggacagcaggatgccgcgcggcagtgtcttgttcgggttgatggtctcctcggcggaagaggacacggcgtcgaatccgatgaagctgaagaacacgatggatgcggccggcacaatgccgtacggctgggtggagccgggctggaaagtgtagatgccgtacggggagaacggctgccagttggacggcttgacataccacacggcgcacacgatgaacagcacgatgatggcgagcttgatgagcaccatcacgtcattggtgcgcttggtctggttgatgccgatcgagagcacccacgtgatgatcagcacgatgacgaaaccgggcaggttgaagtaggtggtgacgtccgggttggtgccgtaggcggcggtcagctcgaccggcagatgcagtccgaagccttccaacaacttgttgaagtatcccgaccagccggcggacacggtggccgcctgcagagcatactccagaatcagatcccagccgatcacgaaggcgatgagctcgccgaacgccagataggcataggagtaggccgagccggacaccggggccatggcggcgaactcggcgtagcacaggccggcgaaaccgcagcagacggcggccagcaggaacgatacggacagggccgggccggcggtgagcgcgcccttgccggtgagcacgaagataccggtgccgatgatcgcgccgataccgagcatcgtcagatcgaaggtgcgcatcgtgcgcttcaggggagtggattcggcgacaagctgatccacgcttttcttacgaaacagatccatgttcttctctcatgaaacttaagatatggggctagaccggacggatttccgggatcccggcacgcctcaacgccgggaatcaaaggcggcttccgagaaaccgcatatcggtcattagtgtacgactgccgggcgaaaacaaacgattgtgaccacacgtcacattcctgcgcaacaataggtgcctatgagcatgaacgcagcacccgaaatcgcattctcgtccgagcagggcaaggccaactatgcggccgcccgccgccaataccccgcacaggccatcgtgaacctcaaaaccatgcgcgacaacatggcccacctggtctccgtggtcggcggcccgaactccggcacggcggtgatgggcgtggtcaaggccgacgcatacggccacggactgctgcccgccgcactggccgcgctcgccggcggcgcgacatggctcggcaccgcgcaatcgcatgaagcactgctgctgcgcaaactcggcatcggccccgaccgttgccgcattctgacttgggtctacaacggcaccgaagtgccattcgatgagctgatcgctgccgatatcgacgtatcggtcggctccctgcccggcatcgatgccgtggccgccgccgcacgcaagctcggcaagcccgcccgcgtacacgtcaaggtcgattccggcttcggtcgcaacggtttcacgccggccggattcgacgccgcgctcgccaaactcgtgccgctcgccaaagagggcgtgttgcatattgtgggtcagtggagccatctcgccgtggccgattcgcccgatgtgcccgaattcgtgtcctccaccgaccgccagatcgaaacattcaaggacttcacgcgccgcatggaacaggccggcattccgccggagatccgtcacctggccaacacggcggccactttggaccgcccggagattcacttcgaacttacccgccccggcatcggcctgtacggctacgagcccgatcccgcgatgggcaccccgcgcgactggcatctgaccccggccatgcgcctgcaggcgcagctcggcacggtcaaggatgtggaggccggccatggcatctcttatggccgcacctacctgaccccggacaacacctcgaccgctattgtgccgctgggctacgccgatggcatccaccgctccgcttccggtttcgatatggaaggtgccaagcacgtggagaagccgggcggcccggtgcgcatcatgaccactgaaggtccgaagctctaccgcgtgtgcggccgcgtgtgcatggaccagttcatcgtggacctgcacggatccgccgccgaactcggcgttcacgagggcgacacggtcgaactgttcggcccgggccgcggcgaggattacgttgagcctaccgccgacgattgggcccgcgccgccgacaccatcagctacgagatcttcacctgcctgcgcaaccgcatcccgcgcctttacgagcatgccgccgaagtactgcccgccgccgacctcgccaagctcgaccccgccacgctgctataaggtgcattaccgccatacggtggcaccccgtaatcccttcttcccgaatatgtaccactgacatgtgctgagcgtcacatattcgggaaatcggccccaatctcccgaatatgtgccgttgagttgacgtcagtggcacatattcgggaagtcgggattactgcggccgatatgtgtgcctatgcttggaatatggaaatgacgttggatggggaacaggtgctgagcgatgagggctacaacgccttcgacgaggagcgatgggcacccgagccgcccaaatccaagtcgcgcacggctttcgaacgcgatcgcgcgcgactgattcattcgtccgctttgcggcgtttgggcgcgaaaagccagattctgattgccggtaccgacgatttcgcccgcacccgactgacgcatacgctggaagtcgcccagatcggtcgccaaatcggcgcattgctcggctgcgatccggacgtggtcgactgcgcctgtctggcccacgaccttggtcacccgccgttcgggcacaacggggagcgtgcgctcgccgacatcgccagcaatatcggcggcttcgagggcaacgcacagaccatgcgtatcctgacccggctcgaacccaagatctttcacccggacgggcgttcggccggtgtgaacctgacccgtgcggccttggatgcggccgtcaaatacccgtggaccttggccgaagccgaccaacaccccaagggggagcggtcgaagaagttctgcgtctacccggatgacgaaccggtgttccgctggctcaaaatcggcgctccccaggccaccaagcccatggaatgccagatcatggacctttcggatgatgtcgcctactccgtgcatgatgtcgaggattccatcgccaccggcgcgttcgatccgattgtgctcgccgatccgaagatgctggaccacatcatcgagcagacgcgcgcatggtatggggcgaagtgggatgccgacaagctgctggccgcgttcatgcgattgcgccgagagcatttgttccctgcacatttcaatggttcgcgcgaatcgttggcacagctcaagaacatcacatccgatttgatcggtcgcttctgctggtcggtggaaaccgccacgcgcgacacgtatgggcccgggccgttgacccggtattccgcgaacatcgtgattcccgaggacacgaattacgagatcgtggcgttgaagggcatcgccgtgtacttcgtcatggcgcctcgcgagcgcgagccattccatcaggaggagctcaagatcgtatcggatttggtcgatgtgcttatggccgattcgccgctcccctccgacgctttggaaagccagttcctggccgattggaatgaatccaccaatgacaacgagcgcctgcgcgtcgccatcgatcaggtcgcaagcctgaccgacaactccgctctggccctgcactccatcttgtgctgagggcgtgttggacgggtgcttccctcagtctcgctgcgcgagccagctcccctcgggtgaggggagctgtcgctgtaggcgactgaagggagtttcgcggaagaaatgataaccgacggtaaaaatttaccgtgtctcaggtgaggcggtactctagagacttatggtcggaatgattaagaaagaggatgtcgagaaggtgcgcgccgccgcggacctgtatgacatcgtatccgcgaccgtaacgcttaagccctccggaaccggcacattcgtcggcctatgcccgttccacgacgagaaaa

SEQ ID NO: 2468 - DNA, 6170 bp, Unknown
  R50_10m  MAG No. k141_17703
ccgtgtgcaggagctgggcggcgaactgaccgcccgttcggatgatggcacgtggatgatctacgtgcgcagtccatgcgtgcggggctgattgtcgcatgtcctcacaaatgaggactactaccaagtctaagtcatcgtatctgaggaatttcgtcgtccgattctgtcgattgccatctatggtggtggatgtccgtaaggacaagtctaggaggcaaaaatgcaaattggaacagatccaatgattagtacgggagtcattgacattcacatccatattaagtggtgatgtttcattatgtcgacgtggatacgatagttggaatctgtcgtatccacgctattattctttgtcaaatttgcgataaagtaaggggcgctagatgggacgaaatatgaataaagatttatggcggggaactgattacggatggtggctggctgcggacacgtccggtgcggtcggtgccagtctgatcgcgttcgcggtgccactgatgatgctcgccacgacaggatcctctgccgccgccaccacgacggaaagcatctgcgtggtggtgcagacggtgctgggccttgccggcggcgtgattcaggaccggtatgatcgccgtacgctcatgctgatctggggtgcgtccggtgtggtgctctcggcggtggcggcggcagcggtgatgctgttcggcaatgcgccgaagacgagcggccatggggttaacggggcaaacgctccggcattcggcggaccgtatgcccacgtgcttccgatcgtgctgctgtgtatcgtcgtgctgttttcggtgcgcgatgggctgttggagaatacgtcgaatgccatgctgcgtggcgtggtgccggatgagcagctaccgcacgcgatggcgttgaatgatgctcgtgattcgacggtcacgttggtgggtggtccgttgggcggtctgctgatgaccgtgggacatgcggtgccgtttctgaccagcgcggtgctgagcgtgctgggcatggtgtccgcatggcgtatccgccgctattggaaacgtgcgactgtgagcgatagcggccgtccgggcaatgttgataccggttcggaggtcggggccgtctcggacgccgatgatgccgatgactccgccccacgctggcgcgacgcactggacggcatgatctggctgctgcgcgaccggttccaacgccatctcatcatcgcagcggccatggtgaccggtgccagcaacgccttcctactgctgaccgcgctggacatctcccaaggtggcagccagctgatatccgccggatccatcaacgccgcctccgccgttggcatgttgctgggcgcactgatggcctcgcaactggtcaaccgtgtgcccggcggcgtactggtgggcgtgatgttcgtcttgctggctgtaggattcaccggtgccgcgttggtgccctccatggttggcaaggccatatttgtggcctgctcggtactggcattgcccgcgggcaacgcggtgcttggaggcctcagcaataccttggtgggcaaggacaaactcggccgcgttggagcgggcagcatggtgttgcagtacggtgcctatggcgtggccgtggcactcgccggctggggtatgcagaccatcggctacgggccgacctgcctgattctggccgccgtgctggtggccgccgccctctatgcgctgacgatgcgcagcctcgtcaccctgcccacgccggaccactgggccgagcatatccagcgctggggcatcgcccagttctgatgggcggcctgcggcggcgattacagcggcagcaggtcgcttaggtcgtcgcgctcgccgaccgcgctgatgtggccggcgtccttttcctctgcccacgtggtgatgccgcaggccagtcgcagccagacttccgggttcagttcgatgacgtccggcggggtcaggttgtgcgggtccgattccggtccgtccaggatcttgaccgcaccccacggcgcaacgcgcacctccacgccggggccgggcgcgcgccgctccagcaggaacagcgagtagcgcacggccatcgcccataccgggcgcggcagaacgggggaggcggtcaggcgatgtggcgtgttgtcggccagttccagggctgcggcacgccattgcaccagtgcgtcgtgccctcgtttcaagtctttttcgagaattactgccatatgctccatcatggcaccggatccggaagatcttccgtaatgcaaacgatggcatacggtgtgatgcggaactgtgagacatgtgatacgcttctcaatgagaacgtatgcaagagcgctccgctatcgtcgttacggagagttcatgcttacgtttgtgagacgatacctatcgcgcggcataataattacgggcacttatcccggaaggaaagtcagaatgaccgaaatcaccgcaccgaagtctcccgtcacggcggaacaattcgccgacgagattcgtgaacaactgaaatacactcaaaacgtcaccgccgagcaggccacccctgctgacgtgtatgtcgccgcgtccaaagccgtgcgcaaccacctcgccgactcctggttcaagacgcaggccgacaccgtcaacggcaacaccaaggccgtcggctacctgtccgccgagttcttgatgggcaagcagctggagaacgcactgctgaacgctggcctgaccgaccagttcgacaaggctgtggaagcccttggcttcaagccgaaggacatcgtggacgccgaatacgagccgggcctcggcaacggcggcctcggccgtctggccgcctgcttcatcgactccctcgcctcgctgggcgtgccggccttcggttacggcatccagtacaagtacggcatcttcaagcagaagttcgacgagaacggcaagcaggttgagaccccggattactggctggccaacgaagagccgtggggccacaccgactacaaccgtgatcagaaggtttccttcggtggcaaggtcgtcgaaaacgccgacggcaccaagacctgggaaccggcctggtccgtgcgcgccgtgccggtggactacatggttcccggctacaagtcccagcgtgtgaacaccctgcgcctgtggaccgccaagagctacgacgagttcgatctgctcgccttcaaccgctccgagtacatggacgccgtggccccgcaggtcaaggccgagaacatctccaagattctctacccggaagactccaccaaggtcggtaaggaactgcgcctcgagcagcagtacttcttcgtctccgcatccttgcacgacgccatccgcgtcttctacccgggccaggacaagccggacctgacgaccttcccgaacaagatcgtcttccagctcaacgacacccacccggtgatcggcatccccgagctcatgcgcatcctcatcgatgagtacggctacgactgggataccgcgtggtccatcaccaccaagaccttcaactacacctgccacaccctgctgccggaggcccttgaggtctggccggccagcctgatcggcgagctgctgccgcgtcaccttgagatcatcgagaagatcaacgcgcagttcgaggccgagctcaaggccaagggcgttgccgccgacaccatcaaggacatggccatctacactggcgacgccgtgcgcatggcctacctggccacctacggcggctcccacgtcaacggcgttgccgagctgcactcccagctgctcaaggacgtcaccctgaagaacttctccgacgtctacccggacaagttcaccaacgtgaccaacggcgtgaccccgcgtcgcttcgtcaagctcgccaacccgcgcctgtccgacctcatcaccgagggcctgggcaccgacaagtgggtcgccgatctggaactgctcaagggcctcgagccgctggccaaggacgatgagttcgtcaagaagttcgccgccgtcaagaaggccaacaagcacgcattcgtgggcttcgccaaggaccactacggcatcgatatcgacgagaacaccctgttcaacaccatggtcaagcgtctgcacgagtacaagcgccagtctctgaagattctcgccgtgatctccaactacgccgacatcaagtccggcaaggtcaaggccgaggacatcactccgcgcaccgtgttcttcggtgccaaggccgctccgggctactacctggccaagatgaccatcgagctgatcaacaacgtttcccgcgtgatcagcagcgatccggccgtcaagggcaagctcgccgtccacatgctgccgaactacaacgtcgagatggctcagaacctcatcccggccaccgagcttgacgagcagatctcccaggccggcaaggaagcttccggtaccggcaacatgaagttcgctctgaacggcgccctgaccgtgggtacgctggacggcgcgaacgtcgagatccgtgagcgcgtcggcgccgagaacttcttcctgttcggcatgaccgtcgacgaggtcgagaagaagtacgccgaaggctacgatcccgcctcctactacgaggccgatccgcgcctgaagcaggccatcgatctggtggccgacggcaccttctccaacggcgaccgcaacgcctactccccgctcgtggccgactggctgaccaaggactggttcatgaccctggccgacttctccgcttacatgggcatccagtctgagatcgaggccctctacgccgatgagctcgaatggaaccgcaaggccctgctcaacgtggccaactccggctacttcagctccgaccgctccatggaagactatttggaacgtatctggcacactgctcctctggcctgacggccgccggagcagcgcgccggctacgtgctggtttctacctcgcggctgtcgccgctcggcgtcgcctacgggaagcccaccgggcttcccgcttaacggctccgcacatctggcacactgctcctctggccgactgagtcggtggggcggctcccctcagggaggggaaccagaacataagaagccccgcaaccgacatccatcggttgcggggcttcttgcgttgaaagaccgccctatcaggcttcggccggggcggcttccgcctcgccatcggcctcatcctcggccttgttcagacccaggtcgaccggcgaggagctgttctcccacggctcctcccacggatcgtaatctgggttctgctgcttgtagatgtacaaaccaacaagcgcggcgagcaatccgccgaacagcagcgcgaagaacttccaaccgttagaagacttgttctccatgacggctcctttccctagggatcgtctggtcggtatgcccattcagaccgactctgctccctattctaggccgctgtttgtgacgattgggtggaatgacattcgtgggcgattcatccacgcccgcatgccctcggtcggctcagcatcttcgcggcgcgtggaacgcatccgagaccttcgatacagtggactgcatgcatattcctacacagcgggagattcgataccagtgggagcgcggtggtccggtgatgacctgggcgctgattgttgcgtgcgtggcagtgtggctactggaggtattgctgggatttattgccccgggcctgagggcttggttgatgtacctcggcatggcggctccggtcagactggtggctgagccgtggacgctcatcacttcgatgttcctgcatgcgccgaactcgctattgcatatcctgttcaacatgattgccctgtattccgtgggcccagtgctggaacgaatgatcggccactggcggttcttgggactgtatgtgatttccggccttggcggctctctgggacttatggtgtgggctgcggtggctccgggaggcatcggctggcagatggcagcctatggggcttctggagccttatttggcctgtttgcatcattgctggtggtatatcgccgtatcggcgccgatatccgctccatgttgatctggatggcggtgaacttcgccttgccgttcgtggtcggtggcgtggcgtggcaggcgcatgtcggcggctttgtagtgggtggaatactcacatggctgctggtgggtggtgtgccggcgtggcg

SEQ ID NO: 2469 - DNA, 12976 bp, Unknown
  R50_10m  MAG No. k141_17794
agccaccaaccgcggtgttgcagcttagtgtctgcatagcgcgacacaaggagcccgaccccattacaggggccgggctcctttgcatatgtggcgctccctcagccggcaggtgcctccatggggcggtaacctactcatggggcggtaacttgcccatggggcggtgaaaaccccatggggcggtaacttgcccatggggcggtgaaaaccccatggggcggtgtacgaaaacggctctattctgcggaaggtaaaattttaccgtccgccccatgggctaattaccgccccatgagggaattaccgccccatggaatcgctgagcgtcgctaaatcaccgcaataatgcagccaaaagcaataaagctggcaaacgcctcggtaatgccggtcaccacgggcttcaaggttgtgcgccgtgtaaccaccggcaacgcaacggcgcgggccaacagcagcacagtcatcgcaatcagatacgggctgcgtccagccggcacggcggctagcagcaatagcgccgcatgccatacccacgaagccgccacgtacgaacgcttcccgcgttcccggatcatggttttgaccaccaaaaccgacccatactgcgtcagcgcaaacagcacggtggcaatcagcccgttcacgggcaatgaacccgcaggccaccaggcgtgaaggtcgaatatctggctcaaatctggcatattccgaatcgcggcgcgtgcggcggtgacatcagcggctgcgcacgaggcatgtgctgcgttgatgggcataacacatgccgtctcaacagtgctgccaaacgacgcgatcaccgtggccatggccgatgcggcaatcaccgacacggcattgccccacagcgagcgctccttcctcagccacgaggacagcatcgacagcgcaaccagcactatatataaaggagcccaacgcagtatgccggtatgcgtaatcaggaatggcaagccgatgacgatgagcgctacggcataagtgagcatcggcggcagataacggcgtgaaaagtgtgctttgaaccagtgcgcggcgctgaactgcacgcaatagcacacggcccacgtcgccaacagccaaagcgtatcaagattaggcccgccgataaagaagccagccacagcgggcagcataaccattacccatgcgccaggttggttgtcgaaccaatcgcgtttaagagtcttgcggcgggaagccatatctgtcatgatatcgcagcgaatggttctcaataagaaagatgtgagacctgcattgcgacaatcgaacataggaagtgcgagaagccagtgcttccgccattatgcaacatgtgcgattgttcggaaatgttcatttggctcacattgtgtttatgtgagactaatctcgttgagtatcgccctcggcgctggaaatggcctcggctatcggatcttggctgaagtcgtggttgcgataatcagggtcgtccaccggcagatgctgcaccaaggtatcgaacacctgactgtagattttgccgcgctcgagcaccgcatcgagcacatggccgccgaacgtcttgtcgtcggacaggaagtgctcgtggaatccggccacagccgcgccgtgaaacatcacgggggagaagtacccgagcatggtgcccttgacgtcgtggcgcaggaacacggcctgccggtcggccacctctaccagcgtggggtagggtgcctgctgcttgatgaccgcgcgtgtcttgatgaagctgaacgtgccgcgcacaattaccgaaaagaacgtgttcgcgcggccgttcgccttgacgatcttttcgttgagctcttctaggccgatatcatgacgctcgcactggtactggaaggccgcgcgatggctattagcgaatggcatggtgaagtcgtccggcacgcgttcggccacaccggattggcctatcttgtatgccacgccatccaggatgatgagctcgccgtccaagccctcgccggtgccgatgccggtgtcgccatgcttgagcaattcgccgatggtggtggtgccttccagcagccccggcacgagtaaggccaaagtgccgtgctgatataacacgttggcaccgtgctcacgaataggtttgatgttctttgccagtgattgtgtcacgagccttaagagtaattcgcgttaccgtccaactcaattaatcaatccatattcgccaacgtgagctgtgccactatatataggtaagtctcagaaggatgttggtaggcgacgccgagcggctatgccgcgaggtaatacgaacggcctgagcacgacacgcgcgaattcctccgcactgtcccacctcaatgcttgaataaacaagttgcctgatttgggctcgcaaattggaattaaaaaagcgagcgcgggccgggagccacttcaagtgaagtgacagccggaaaccgcgcactgatgtcggatgaccgccagaggacgtatgtccaagggaggccatgcgcgccggtgccctagaagcaggttggtaaacagtacaacgaacatcgctagaaagggcggacggcaatggcgggacagaaaatccgcatcaggcttaagtcctatgaccacgaggtcatcgaccaatcggcgaagaagatcgtcgaaacggtgacgaacgcgggcgcaactgttgttggccccgttccgctgccgaccgagaagaacgtcttctgtgttatccgttctcctcacaagtacaaggattctcgcgagcacttcgagatgcgcactcacaagcgcctcatcgacatcgtggacccgacccccaaggccgtggactccctgatgcacatcgatctgcctgcggacgtcaacatcgaaatcaagctgtaagggaggaggaagcattatgtctaatcgcaaggctctgctgggcaagaagctcggcatgtcccaggtgtgggacgagaacggcttcttcgtgcccgtcactcttgtcgacgtgtccaccaacgtggtgaccgccgtgaagaccgaggagtctgacggctacaaggccgtccagctcggctacggcgccatcgaccccaccaaggtgaccaagccgctggctggccactttgccaaggccggtgtcaccccgcgtcgccacctcgtcgaggtgcgcaccgacgacgtcgatcagttcgaggctggccaggaactggccgctgacctgttcgaagagggtgctgaggtcgacgtgaccggcaccaccaagggtaagggcttcgccggtaccatcaagcgttggggcttcaagtcctaccgccgtactcacggttctcacaagaacgagcgccgtcccggttctgtgggcgcatgcgccactccgagccgtattctcaagggcaagcgtatggccggccgcatgggtcatgtgaccgccactacccagaacctgaccgtcgtctccgctgatgtcgagaacggcatcctcgccatcaagggtgccattcctggccccaagggcggcatcgttctcgtccgctcggctgtgaagggagcctgataaaccatggcaaacgttactctgaacgtcaccgacgccaagggccaggccaccggcaccgttgaagctcctgaggctctcttcggcgtttccgccgaggatgtccaggctcacatcccgctgatccaccaggttgtcaccgctcagctcgctgctgctcgtcagggcacccacgccaccaagactcgtggcatggtttccggcggcggcaagaagccgtggaagcagaagggcaccggtcgtgctcgtcagggctccatccgtgcaccgcagtggtaccacggcggcaccgtgttcggcccgcagccgcgtgactactctcagcgcacccccaagaagatgaaggccgcagctctgcgctacgccctgtccgatcgcgccaacgccggtcgcgttgccgtggtggagttcggtatcaccgagccgtccaccaaggccgctgtcgccgccctggccccgatcaccgcggacaagttcaccacggtcgtcttcactcgcgacaacatcaacgagtggctctccgtgcgcaacatcccgaccgttcacccgattttcgtcgatcagctcaacacgtacgacgtgattacctcgcagtacgtggtcttcaccaaggaagccttcgaggctttcgtggctgccaagaccgagccgaaggaggcctgatttagatggtcgctattcacaagcccgctcacgacgtgattcttaagcccgtcgtctccgagaagagctacgccgcttccgaccgtggccagtacaccttcgtggtggctccggatgcgaacaaggtgcagatcaagcaggcaatcgaagagatcttcaaggtcaaggtgacgaacgtcaacaccctcaaccgcgctggcaagaagcagcgcactcgcaccggtttcggccagcgcgcttcccagaagcgtgcgatcgtgaccgtcgccgagggccagacgatcgacatctttggtaactgaaggctagccgagaaaagttaaaggaagaactacattatggctatccgcgtttataagccgacgaccgcaggccgccgcaacgcgtccgtctcggatttctccgagctgactcgttctacgcctgagaagtcgctggttcgcaagaagtccaagaccggcggtcgtaactcttacggccgtatcacctcccgtcatcgcggcggcggtcacaagcgccagtaccgtctcatcgatttcaagcgttgggacaaggacggcgtgcccgccaaggttgccgagatcgagtacgatccgaaccgctccgcccgtatcgccctcctgcacttcgcagatggcgagaagcgctacatcatcgcgccgaagggcatcaagcagggcgacgtcatcgagaccggtgctcaggctgatatcaagccgggcaacaacctgccgctgaagaacatcccgaccggtaccgtggttcacgccatcgagctccgcccgctgggtggcgccaagatcgctcgttccgctggtgctgccgttcagctcgtcgccaaggatggcgcctacgctcagctgcgtatgccgtccggcgaaatccgcaacgtcgacgcgcgctgccgcgctaccgtcggcgaggtcggcaacgaggaccacgccaacattcagctcggcaaggctggccgcgcccgctggatcggccaccgtccgatcacccgtggtgagtccatgaacccggtcgaccacccgcacggcggtcgtacccgcggtggtaagccgccggtctccccgtggggcaagggcgaggttcgtactcgtcgtccgaagaaggcttcgaacaagatgattgttcgtcgccgtccgtccggcaagaaccgcaagtaagggagtatcgagaagatgactcgtagcatcaagaagggccccttcgtcgacgcccacttgcagaagaaagtcgacgagcagaacgagaagggcaccaagaacgtcatcaagacgtggtcccgtcgttcgatgatcacccctgatttcatcggacacaccttcgccgttcatgatggtcgcaagcatgtcccggtgttcgtcaccgaggccatggttggtcacaagctgggtgagttcgcccccacgaagaccttcaagggtcacgtgaaggacgacaagaaggcccgtcgctaaggataaggaatagaacatggaagctaaagcaatcgctcgtcacgtccgcgtgacgccgcgcaaggctcgccgcatggtcgacctcatccgcggcaagaaggcgaccgaagccgtcaccattttgaagttcgcccctcaggctgcggccctgccggtccgcaagaccctggagagcgccatcgccaacgctcgcgtgaaggccgacaaggccggcgagccgttccgcgagaacgacctgtacatcaaggagacctacgttgacgaaggtgtgaccctcaagcgcttccgcgctcgtgcccagggccgcgccgctcgtatcaacaagcgcacctcccacatcacggtcgtcgtggctaacaaggaaggagcccgctaaagatgggtcagaagatcaatccgtttggctaccgtctgggcatcactgagaaccaccgctccaagtggttctccgactccaacaaggccggcgaacgctaccgcgacttcgtgcttgaggatgatcagatccgcaaggagatgagcaaggacctcgagcgcgctggcgtgtcccgcatcgtcatcgagcgcacccgcgaccgcgtccgcgtcgacattcacaccgcccgtccgggcatcgtgatcggtcgtcgtggcgccgaggccgagcgcgtccgcgccaagctcgagaagctgaccggcaagcaggtccagctcaacatcttcgaggtcaagaacgccgcgctggacgcccagctcgtcgctcagggcatcgctgagcagctgaccaaccgcgtcaccttccgtcgtgccatgcgcaaggcccagcaggacgccatgcgcgccggtgccaagggtatccgcatcaagctctccggccgcctcggcggtgcggaaatgagccgttccgagttctaccgtgagggccgcgttccgctgcagaccctccgcgccctcatcgattacggcttcttcgaggccaagaccacgtacggccgtatcggcgtcaaggtctggatctacaagggcgacatgaccgaatccgagttcgaagagcagcaggctcagcagaacaaccgtccgggccgtcgtggtggcgatcgccgcccgcgccgtggcaaccgttccgccgccccgcaggccgtcgaagcccccaaggctgaggctcccgccgaggccgctccggctgcagaaacgaaggagtgagcaagaatgcttatccccaagaggactaagtaccgcaagcagcaccgccctgtgcgttctggcatgtccaagggcggcaacgagatcaacttcggtgatttcggcatccagtccctcgccccggcctacgtgaccaaccgtcagatcgaagccgcgcgtatcgccatgacccgctacatcaagcgtggtggccgcgtgtggatcacgatcttcccggatcgtccgctgaccaagcacccgctcggtgcccgaatgggttccggtaagggtgccccggagttctggattgcgaacgtgcgccctggtcgcgtgatgttcgaaatcggtggtgtgtccgaggacgtcgctaaggaagccctccgccgcgctatcgacaagctcccgatgaagtgccgcattatcgcacgtgaaggtggtgatatctgatggcagtcggtaccgctgattactccatcaagaatctcaacgagaagaccaacgcggaaatcgaaggcttcctgaagaagtccaaggaagagctgttcaacctgcgcttccagcacgccaccggtcagctcgagaacaccgcccgtctcaaggctgtcaagagcgacatcgcccgcatgtacaccgtgcttcgcgagcgtgagcttggcatcagccaggagccggccgctaccgaatccaaggagaagtgattatggctgaagagcgtaacttccgtaaggttcgccgcggctacgtcgtgtccgacaagatggacaagacgattaccgtcgagctcgagcagcgttcgacccacccgctgtacggcaaggtcgttcgttccaccagcaaggtcaaggcccatgatgaacacaacgacgcccacattggcgacctcgtgagtattatggaaactcggcctctgagcaagaccaagcgctggcgtctcgaatccattatcgagcgcgccaagtaagtaaagttcggcaaggctcgccatttaccggggcattatgggcaaccacgatgccccggtaaatggggagaaccagctcggctaaggagaatcaatgattcagcaggaaacgcggcttcatgtcgccgacaacacgggtgcgaaggaactcctcgccatccgcgtgctcggcggatcgaagcgacgctatgccggcatcggcgacgtgatcgtcgcctccgtcaaggacgccattcctggcgggtcggtcaagaagggcgacgtggttaaggccgttgtcgtccgtaccgtcaaggaatcccgccgtgcggatggttcctacatcaagttcgacgagaacgccgccgtcattctcggctccggccgtgaaccgaagggcactcgtatcttcggaccggtcggtcgtgaactgcgcgagcacaagttcatgaagatcgtgtccctcgccccggaggtgatctgacatggcagccaagatcaagagcggcgacctggtcaaggtcatccgcggcaaggaccgcggcaaggaaggcaccgtcaagcaggtgctctccaacgatcgactgatcgtcgaaggcgtgcagatcgtcaagaagcacgtgcgtgcaacgcagcagggccagcaggctggcatcgtctccactgaggctccgatccatcgctccaacgtgatggtcatcgacccggagaccaagcagccgacccgcgttggcatcaccgttaaggaagaggcgcgtgacggcaaggtgaagaccgtgcgcgtgcgcgtcgccaagaagtccggaaaggagctggcatgaccgatactactgtcgaagcgccggccaccccgcgcttgaaggtcaagtacaacgagcagatcattcctgagctcgagaaggagttcaagtactccaacccgatgcaggttgcccgtgtccagaaggtcgtcgtctccatgggtgttggtgccgctgcccgcgactccaagctcatcgaaggtgccgtcaaggacctcaccctgatcaccggccagaagccgaagatcaccaaggccaagaagtccgtcgcgcagttccacctgcgtgaaggccaggccatcggtgcgtacgtcaccctgcgtggcgaccgcatgtgggagttcctggaccgtctgctgaccctcgcgctgccccgtatccgcgacttccgcggcatcaacggccaccagttcgatggccagggcaactacaactttggtctcaccgagcagtccatgttccacgagatcgatcctgattcgatcgatcacgtgcgcggtatggacatcactgtggtgacctccaccaaggacgacaaggaagcttacgcgctgctgaagcacctcggcttccccttcaaggagaactgatatggcaaaaaccgctcttaagaacaaggcggccggcaagccgaagttcaaggtccgcgcttacacgcgctgccaggtctgcggtcgtccccactccgtctaccgcaagttcggcctgtgccgcatctgccttcgtgagaaggctcaccgcggtgaactgcccggcgttacgaagtccagttggtaaacatcgacgctgaaggtccgcggcccgaacgcttctagaagaagcgtgagggcggcggaaaccatagcgagaaagggcaacaagcccaaatgacaatgacagatccgatcgcagacatgcttacgcgtctgcgtaatgcgagcgcggccaagcacgaaaccgtggatatgccgtactccaagttcaaggcgaacatcgccgagatcctgaagcgcgaaggctacatcaaggacttcaccgctaaggaagccaaggtcggccagactcttgaggtcaccctcaagtacggtccgaacggtgagcgttccattcagggcatcaagcgcatctccaagccgggccttcgtcgttacgcgaagtccgactccctgccgatgccgctcggtggcctgggtatcgccatcatctcgacttcttcgggactgctgactcagaaggaatgcctcgaccgaggcattggcggcgaaattgtcgccttcgtgtggtgagaaaggagagctgaaacatggcatcgcatattggtaagctccccatcgccatccctgctggcgttgaagtcaagattgaaggccagaacttctccgccaagggcgctaagggttctgactcctacgtggttccggaaggcatcaccgctgccgttgaaggcaacgagatcgtcctgaccgccgctgatgacctgcgtccgacccgtgccaagcacggtctggcccgctccatcatggccggcatggtcaagggtgttcacgatggctactccaagactcttgagatcgtcggcaccggttaccgcgccgtcgccaagggcaagggcatcgagttcttcctcggctactcccacaccatcaccgtcaacccgcccgaaggcatcaccctgaaggtgaccgacgccaaccacgtggttgtcgaaggcaccgacaagcaggtcgtgggccaggttgccgccaacatccgcaagctgcgcgctccggaaccctacaagggcaagggcatcaagtatgccgatgaacgcatcctgcgcaaggctggaaaggctggtaagtgatatgagcgttgctattctcggaaaaggcaagaaggtagctctcaagcgccgtcacgcgcgtatccgcaagcgcatctccggtacccccgagcgtccgcgcctggtggtcacccgctccaaccgtcacatggttgctcaggtggtcgacgataccaagggtattaccttggtgtccgcctccactcttcaggccgacttcgccggtttcgaaggcaccaagactgaggccgccaagaaggtcggcgagctgatcgccgagaaggccaaggctgccggcatcaccgcagtcgtgttcgaccgcggtggcaacaagtacaccggtcgcgtcgcagccgttgctgatggcgcccgcgagggaggtcttgcactgtgagcgacaacgaaacgaaggaaacccaagtggctgaagaaactcagaacactgtggcgaccgaatccaacaacgaggaccgcaagggtcgtcgtggccagcgcggtgaaggccgtcgcggcgagcgtcgtaaccgtcgtgaagaaaaccacggcgacgagctgctcgatcgcgtggtgaccatcaaccgtgtgtccaagacccacaagggtggccgtaccttcagcttcgctgcactggttgtggtcggcgacggcaacggcaccgtgggtgtcggctacggcaagtcccgtgaagtcccggccgccatcgccaagggccagctggacgccaagaagcacatgttctctgtgcctcgcgtccgcggcaccatcacccacccggttcagggtcacgacgctgctggcaccgtcctgctgcgtccggctgccccgggtaccggtgtaatcgccggtggctccgtgcgcgccgtcatggaatgcgcaggcatcaccgacgtcctgaccaagtcgatgggctccgccaccgccgttaatgtggtgcgcgctaccgtcgacgccctcaagcagctcgaagagcccgaggagatcgccgcccgtcgtggcctggcgctcgacgaggttgctcccgatgctctgctgcgcgcccgtgccgccggcattgccgaggctcgcaaggctcgcgaagaggctgctgccgctaaggccgccgaagagaaggatggtgagtgatactcatggctaagaacctgaagattaccctgcaccacggcatcgtgaaccgtaccccggctcagcgcgccaccgtcaagaccctcggcctcaacaagatcggtaagaccgttgtccgcgaggacaccccggccaaccgtggtctggtgaacgccgtgcgtcacctggtcaccgttgaggaggttgactgattatggcagataacgaaatcctgcagatgcacgacctgaagcccgccccgggcgccaagaaggaccgcacccgtgtgggccgcggtgaaggctccaagggtaagacctccggtcgtggcgccaagggccagacgaagcgtaaccacgtgcgtccgggctttgaaggcggccagctgccgctgtacatgcgcctgccgaagcttcgtggcttcaagaacccgttcaaggtcgagttccaggtcatcaacatcgctcgtctcgtggagctcttccccgagggtggcgaggttgctgtggccgacctgatcgccaagggcgctgttcgtgacaacgctccggtgaaggttctgggcgacggcgagaccaccgtggctttcaccctcaagggtgttaaggcttcggcttccgccaagtccaagatcgaggccgccggcggttccgtttccgaggactgattagtcctacggggagcgcaataggctgtacaacccccgcccgccaataggtggacgggggttcccttttctcaaaaattgttgttctgagcgcagagaagcagtctcaacacaatgatcgttttgagtatgcttcccccgttcagtacgacggagcataattcagataacattcgcgagacatgaagtggccgaagtaggcactgtagactatgctcattcgttagtttgtgtatttcgcgtgattggcgcgctattgggaggaaatctaggtgaggacactaatccaggccctgaagaccaaagagttgaggaagaagattctcttcgtcctgttcatcatcatcgtctaccgcatcggttcgttcattccgacccctggcgtggactacaacgtggtgaacaagtgcatggccactgtcggcagcgcctcccaggagaacttcatcggactggtgaacctcttctccggtggcgctatgctccagctgtctatcttcgcgctgggcgtcatgccgtacatcaccgcgtccatcgtggtgcagctgctgcgcgtggtcatcccgcgcttcgaggccctgcataaggagggccagtccggagaggccaagctcacccagtacacgcgttacctgaccatcggcctggccgtgctgcagtccaccaccatcctggtcaccgcccgctccggtgccctgttcaactaccgctgcgaccaggtcatcccggacggctccgtgtggaacctcgtggtcatggtcctcatcatgaccggcggcaccggcctgatcatgtggatggccgagctcgtgaccgacaagggcatcggccagggcatgtcc

SEQ ID NO: 2470 - DNA, 5477 bp, Unknown
  R50_10m  MAG No. k141_17842
cgtacttcgccgacccgtactccagccggcggcggggaagcaacgagaaccgcaacggcatgatccgccggtatctgcccaaacgctgcgagatacggatggacatggcaaaggaggtcagggagatcgtcgacgagatcaacaaccgccccatgcgcgtgctcggctaccgcacgcccgccgaggcgttcgccgacgaactgttagaattgcaggaccaacaagggtgttgcacttctaaatagacatcggggtaggctccgcccgcaagtcacagtggtacaattttcaggtttgagactgtagcaagttgagtcgctttatcagtaagtctgtatttggaggtatcgatggcccatcgtccgcttatcggcgtggtcccgttgtgggacgacacactgaatagcctgtggatgctgcccggctatttcgacggcatcatcgaagccggcggcatcccggtgatgctgccgctgaccgacgacgagactacaatcgaacagctggtcaaccaatgcgatgggttcctggtcaccggcggccacgacgtggatccagaacggtatggcgaggcggccggccccaagacggtcaaactatgcaaggcccgcgaccggatggaggagcgcctgatcccctccgtcatcgcggcggacaagccattgctgggcatctgccgcggcatccagagcctcaacgtcgccttgggtggcacgttgtggcaggatctgccggacgaacatcccagcccggtcgtgcatcatggcgacaagccgccgtatgacccggtggtccacgaagtgtcgatcgcgcccgattcgccgttggcccgtgcgttgtggccgctgggagacaacggcccgagtgaggcggaggccgatgaggtcgattccgtcggcaggccgtatcatccgcgcgcctatacgctgggcgtcaacagctatcaccatcaggcgattcgcacgctgggccagggactggaaccgatggccaccgcgccggacggcatcgtggaggcggtctggatgccggccaaacgtttcgtctgggccgtccaatggcatcctgagttctcccaccgagccgatagcaaccaacgtcgcatcttcagcgccttcatcgacgcctgctgacgcaagctttccgccgatctcgacgaaacgccttcccggaagcagaacggcttgattccgctcctccagtctccgggaaaacgcccgcgccccggaacgcgagaaccccgcgtcccttgcgggagcggggtccaagcggtatgtccttgattctgatgtttcagataaggggggcccgaatcagcgggcgtagaattcgaccacgtactggatgttgacctgcaccgggatctcttcgacctccggtttacgggtcacagtggccttcagggacggcaggttcacgtcgaggtagccggggaccgcaggcaacacgtcacggtgcacgccttcggcggcgatctggaacggaaccatggtctggctcttggccttcacctgaatggtctggccgggcttgacgcggtaggacgggcggtccacgatgttgccgtcaacgaggatgtgacggtgcaccacgaactgacgggcctgggcggtggtgcgggcgaagccggcacgcagcaccaggttgtcgagacgggtctcgaggtcggtcagcatggcgttaccggtctggccggcagtacgggtggccttctcgtaagcggcgcgaagctgcttctcggagatgccgtactgagcgcgcagacgctgcttttcgcgcatacgcaccgcgtaatcggactcggtgcggcggcggtcacggccgtgctcgccaggagcgtacggacgcttttcgaagatgcgctgagccttgggggtcagtgcgatgccgagggcgcgagacagacgcacctgacggcgagaacgctgaacgttcgtcattggattaatccttctgtcgttatctgaacggaacgcttgccttgcatatgcctggcaagcgctgagccgggcctccccagcgcttcgtcgtgaacgaacacgaacgggttggttttcttgcgatcacctaccgccgacccgctgatgggctatgactccagacggtatctacctgttggcagacaccagcagaccatattacaccgaggctatggacagcactccggcgtccatgcgatacacccggtctgcgtattcgagtgcatcgggatcatgggtgaccatgagaatcgccgtgccgttgttggcttggtctctgagcagacgcattacgatgtcggtgctctcctggtcgaggtcgccggtcggctcgtcggcgatgagcaggctcggctggttcatcagcgcgcgggcgatggagacgcgccgcatttcaccgccggacagctcgcgcgggtagctgtctgccagatcggcgacaccaagctgggtgagcagcatgcgagctcgggtggcgaacaggtccggacggctcgcagccgtgtttgacggcgtgttttcccggtctgtgattggcgcaatgacatccggcatgaacgggtcggcggctgcttcatcattggtggcagcggcttgtgccacggcatcggtcgacgcaacagcgtccacctgagcaacggcatccgttgcttctgcgttttgggcaaacggcagcggctccggaaacatcgttgcgggcagaatcacgttgtcgagcacggtcaggttgccgagcagggtctggctttgggtcacgaatccgatggtgcgattcctcagcacggacagtgctttatcgcccaagtcggccacattgcgtccagccacgctcacggttcccgaggtcgggcgaatcagcccggcgaccatgttgatcagcgtgcttttgccgttgcccgaccggccgacgatggcgatgaattcgccggcatcgacggtgaggttcacgtggctgacggcgtcgaacggcgtgccgcggcggacgaactggcgggtcaggtccgtcaaggtcagcagatggtccggggagggcgtctcggttacgtgcggcgaatccggcgcagtcggcgcgttcggctgagctggcgtggtcggctggagcttggtcggctcaaccgtggtcagctgagtcggcgtagttgtctcagtcatatcactccccctctcgcagggtcaggtaggcttcgggccggccgagacgccacatggtggccagcgaaccgatgatgccgatgaccgtagagcacacaatggtcacggcaatgaatccgatcaccgcaaccgggctggcttgcagatacggcaattgaagttgtttgccgatcagcgaactgaatgggaaaatcaccaggctggccgcgccgacgccgattacgccaccgatcagaccgatgatggcggattccttcagaatgatggcattcaacatgccgcgcgtggcgcccatgatgcgcagggacgcgaattcgcgtttgcgttcgttcaccgacgaggcgaatacggcgagcagcacaatcacgcccattacccagatcaccgccacgaaaatcttgaggtaggtgacaagcgcggtcagcgaagttctggtgttggcggtgatgccgccggggtatacgtaccccaaatcggcgaaccgggagtcaagacgcttgatgttttcagccacggtctgcgcttcgtaaccccgctgcgtcttgatcatcacggtggagacggcttcgcctgcatattcggcgggcatgacctgcttggagaccttggccgaggcggcgaccatatcaggcacggtgttttggttgatgaacaccgaattgtcgaggctggtgccggtgttggcaagctgggcgacgaccggccacttatggccgtagagttcgatggtgccgtcggtggacacgttgacgtttgcgccggcaatcatctgaccgtcttcaagggggccttcgaactgggatgcgacccatggttcgatgacgaagtcagtgtccgggtcgtaaccgatgatctgcagcttttcggcacagcaggcggcggccagcgatgatatataggtctgttcggtggcctgtgcgatgccgtcggcctgcatgacctcgtcggcgatgtctttggtgaaatagaaagtgctgggattgccgctggtgagcagcgcttcagccttctgcgcggtgttttgcggcacgaccataaggtcggcgcccaggcgcttctccatactggtcatgccggtgttgaggttcatggtcagcatggtgccgccgaagaacgtcagcgcgaggatggtgacgacggcgagcagtgcgccggtgcggaacggcttgcgtttgaggttttcaatcggaaggccgcgcaatgcgatatgggatggcacgatgagtccttatgttgcttatagtgcggttgcaataagcgagaccggagtccagcgttcggaatggctgggctccggccgtctgctcgatcagttgcgcttggcggcgcgagagtcgagccagatggcgatggccgcgaacacgatggtgagcacgccgagcacgatgagcgtgggcagcataaccatgcggcagtgcatcatcgcgcccttgcagatgccgatcaggaaggtgggtacggcgagtagtagcagggcgttggctgcggcggcgatattgaggccgatgcgaatctgcggggcgacgaacaaagccacgacgccaaacacgaggatgacgacgccgatgccggtggccgcctgctgcgagtagtggcaggcacccggcatgtcatggccggtgcaggcgtgcgcaaaggtctggggcgcgatggtgatcagcgcgccgaacagaatattgggcacggatgcaaacagcttgttcttcataactactttttcctctcccctgttcccagggctcgtaggcgcaacctccgcattatgcccagatagtgatgaagaacacaagtcttgttttttgtgaatttatttggtatataactcagcccctcgtcagaggggccaatctatctacaacttctcaataggtgctacgcggagcatgaggcgtttgacgccggcggagccgaagtccacggtgattaccgaattgcggcccttgtcttgcgcgtcggtgaccttgccgagaccgtactggtcgtggctgatcatgtcgcccacggcgaagtcggcgatattcaggccattgtccttggtgagcttcgagctgggcacggcagagccggtcgaaccggatttcggtgtggtgcggcgcgtggtgaccttgccgccacgggtgccgccatatgaaccggatgaagaaccagaacgggaacgcggcccgtaagacgaccccgaaccggagcctgaagaaccataggacgaacccgaacgggagcgagacccgtaggcggacgaacccgaacgggaaccatacgaggagccggaacccgagccatacgacgacccataccgcgaccgcgacccataggacgaacccgaaccggacgaaccacgcgagccga

SEQ ID NO: 2471 - DNA, 7687 bp, Unknown
  R50_10m  MAG No. k141_17957
accgaggccggtgccgacgtgaccggtggaatggctgccgatggcatcaccgttcacaccacggctgccgatgggagccctgccccagtgcatgcccggtacgccatcaagtcggagacagtggaactcggcgacatgccaggtcgtatcatccgtgaggctcgtggcgaacacggtttcggttacgatccgctgttcgtcccggacgaccagcctgccggtcgcgtcagcactgagcctgaccatgaaggcgagccgctgaccagcgccgaaatgactccggccgagaagaatgcgatttcccaccgaggcaaggcgctgaaagccttggtccccgctatcgaggcgctgctgcactaagtcgtctaggctgtctaactgtactgagccgcgactaagccacagttgagtcgcggctcagcaactcagcccctcccgaatcgggcaagtgtctagcaagcgcctatgacctagcaagggcgatacgaaagaaggccggcgcttagtgcgtcggccttcttgatgaacaagagccacccgatagaatcgaactaccgaccttcccacgaacgagggggatgctctaccactgagctaaggtggcgtggctccaagagccaagtagagaatatagcactgcgtttgattcaacgcaagccggacgttcagcatcttcgggccattgttctttgagccattgtggaggcaatagtgcgaacgatgtgcacacctcatctgctcggaccccattcgtcgtgtgcgcgttatgctagcatggtgagcctgattgactcggaggcagagggaagcatgcgtgattttgtgctggtgaagttgacagacgaagagttcgatgatttctccgccaggcatccacaaggcaatttccaacagacctcggcgatgggacgccttcgcgccgcgcaggggatcgacgtcgaatatctggccctcaaggagggcgagaagatcgtcgcggcggcgctgttcgaaactcaccgctctcgattctctacatttgcggccatccatgatggcccgatgtgcgactatcacgacaccgaagcattgaccttcttcatggatgcgctgaaacgccatgccaaggcaaagggtgcttcacagctggaaatcacccctgaatccccgtatcggcttcgcgacaccaatggagcttctttgccggatgaccagaacggcgctcccgacaataagctgatagaacagctcgaggcgatcggcttcactcatggcggtttcaccgtgggctacacggcggttccgcgttggcgctacctcaaggatctggctggtattaccgatgagaaaagtctgctgaagtcctatgataagcgcacccagtggagcgtgaagcgtgcccaatcgatgggtgtgcacgtgcgtgagctgtcggacgacgagctgggggtattcgcacgaatcgagcggcaaacagccgaacgccgtagcttcgaataccgtggcgaagcgtatttccaccgtttcaaggaagcgttcggcaacaaggcgcattttatggttgccgagatccgcatcgatgaatacatggcggacatgacggccaagcgtgaagcgctttcggccaaggtggcggcattgaccgccaaaaacgccgaacaccccaccaccaaaaccgaacgtcagctgggggaggagacccgcaatctggcggcagccgaaaagcgcctgaacgaggcggccgagttcgccaaagacggggatgtgctgccggctgcggcatcactattcgtggagcatccgcgcgaggtcatctacctgttctccggtagcgtcgagcagtacaagcccttctacgcctccgcgctgattcagcatgacgcgatgctgcatttctgcgtggaacacgggctgtctcgctacaacttctacggcatcgacggcgtctttgatgatcccgatgacgaggggcgtggtgtactggagttcaagcagggcttcaacggatatgtcgaggaacttccgggcgagttcgtactgccggtcaaaccggtcgcctatgccatgaagcaatttgcgcacaagctgctgtcgcggtaaacggacgcagcacacaggccgttccagagcccagagtaacgatcagagtaacgacaagtaagaaggttcgattatgacgcaatccgatgcaggcgtcgcctcactcacccctaccaagatcactcctgccgagctggatgcgttctccgcagctcaagtgcaaggtagtttccagcagacctcgcagatggccgccatgggtgcgttcaacggtccggtggactatgtgggtgtcaagcgcggtgacaagctgattgccgcctgctacgtggtgtacacgcagtcccgtttcggtttggaaggctcggtctggtgcggaccgctgtgcgattatgacaatccacaggtggttgaggcgatgaccgaagccctgcgtcgttcggccaaggcccatcacgccatcagcgtatcctgctggccggccgcagtctaccgtctgcatgatctggacggcaagccgaccagcgacccggacaccacgatgatggacaacatggcccgcttcggttggaaacatggcggcttcaccgtgggctacgaatccgtggtgaaccgctggaacttcgtcaaggggcttgacggcattcataatgagaaggaactgctggcctcgttctccaagtaccgccgtaagaacatccgcatcgcccaggattccggtctgcgcgtgcgccggctggaacgcggcgaactgagcactttcgtcaagctgtgcgatatgagcgccgcacgtcaaggcttcaagagccgcgatctggcctactatgagcgtctgttcgataccttcggcgacctgatcgagttcaaggtggtcgaaacccatttcgacgaatatctggacaccctgcaatccaagctgaatgcggcctccaaagacaagcgcaacctcgaacgcctgctccagcgcgcgcaacagcggccggaaggcacggccaagaagggtgcctccgacccggcaacgctggaaaagcgcatcgccaccgcagacaagaagatcacggcgctggaaaagaccatcggcgaagtcaatggcatcatcgcctcggacggcccggtcattccggtggaagccggtgtctacttctggcatccgaacgaggtcgtctgcctgtccagcggcgaggacgatcgtttcatggattactacccgtcttccctaatccacttcgaggcgatgcttgactgcatcgcccgtggcgtggagcgcttcaacttctacggcatttccggcattttcgacgccaacgatccttcctacggcgtctggcagttcaagactcgcttcggcggattcgtggaagagcttccgggcaagttcacgctgccggtggacggactgcgcttcggtgtatccgaagccgcacacaagctgctgcatcgctgacaaacagtggcgagcacggacacagaaataaggcacaggtgacgacgagatgagcgcgactgcgaatcgaacagatacgacgtatacgtttggcgtgattacgcccgaagagttcgaccggctttccgaagccacaagccagggcagctttcagcaatggtccgggcaggtccgtcttgccaagattcgtgggcatgaagccgaatgcgttggcgtgtgcgacgcatccggcaatctggtagccggctgcgtgattctgtacctcaatggtcgtttcggtgcagatggctccgtatatttcggccccatcggcattagcgatgatccggctctgctgcgggccataaccgaggcgattcgtgaatcggcccgtcgccaccatgctgtttccgtggcatgctggcctaacgtcgcctaccgtctgtattcctcggacgggcagcccgacggcgagccgaacgatgcactgctgaccggattcaccgatgccggctggacgcatggcggattccataccggttatgacgtggtctgccagtggatgtacgtcaaggatctcaccggcatcaccaacggcaaggaactgctggcatcattcggcaaacgcgctcaatggagcgtcaagcgggcgcagtcgatgggcgtgcacgttcgcgaaatcggccccgacgagttcgacgtgttcgccgatatcgaacggcggaccggtgaacgccgcgggttcgcgacgcgcggcgcggactatttccgccagttcaagcaggcgtatggcgcggatgcgcatttcatgctcgcggaaatccacatcgccgaatatgtggcggatatgaccgccaagcgcgaggccttgcagaccaaggtcgcacagctgcagacgaaatacgatgaacgtccgaccacgcgcatcgaacgtcagctgggggaggaatcgcgcaatctcgcggccgccgacaagcgtctggctgaggtggagggatatgccaagaagggcgatgtgctgccggcagcggcttcaatgttcgtcagtcaccccaatgaggtggtctatcagtattccggttcgttggaggagtacaagccgttctacgcctcggcgctgattcagtacgaagcgatgctgcacctgtgtgtggaacagggtgtgagccgctacaacttctacggcatttccggcgtgttcgacgatccgaacgacgagggccgcggcgtgctggaattcaagcagggcttcaacggctacgtcgagcagatggtaggcaaattcacgttgccggtggacaagttccgcttcggcgtgagcaatctggcgcacaagctgctgcaccggtagcagctggcggccgggggacgaacctatgtgggctgcgtctcgcctgaccgtgtgcccgccgtgcgcccgtcgtgtgcctactcgcgcatttgctcacacgcccatcagcacgtgagcaaatgccatcatcaccagtgaaatcatcgcggtgattgccagcgagaagccggccagtttggcgttgccgagtactttgtcggtgaacagcgtggagaaaatggcgattggagccaacgcgcagatcaccatcacggcgcgaatcgaagccgagaacggcagcaggaaccacgagatcaacgcgaaggcgacactgaacggtatacgccaagcgatgacggccatgacttccttcacatcatgcttggactggggcaaatccatgagcatgcccaccatcagcatcgacaccagcgcgttggcaccgctcaacggctgggttatagaggcgatccaatcgggaatcttcacgttggcgacggtcaacgcgatcatgagcagatacgtgtcgaacggcaccgagccgaagaagctcttgccgatggtgcgcagcaatgcgcggcgggcaagccgtttggcgtcgcgatccttgggcttttcgtacggcaaggtgggaaccgaaccggcgtgttgttcggcaagtgttttgccgggctgaatatgcagcagttgctgggtgagcacattggtgccggcggccaccatcacgcagttgccgatatcgaacatcgcagccggcaccaccgcgcccgcaccccagaatgactggacgaccgggaaagagaaacaaccgagattgaagccggcgccattgagcatcaggaaggcgcggtcggtcacattgcgcttgcgggtggccagaaagatgaacacgatcgggataaaagcaaacaggaatgcgaataccgaaataagcagcagcgagatgtcatgcggattggtggcgaacgagtatacgatggcaccgggtagcacgatgttgaattccgcggtttgcaacacgcgataatccttctgcccgaacaggccgaaccgcttgaacagatagccggcgagaatgatcagcaataggccaaccggcgtaagaatggcggacatacacttctctccttgactcacacaggctcacggcgcacaggctcagacccacaatgctgtgaccattatatttgccgccttggcattgccatatgtagaggcgtccgcaagggcttgcaattgcctcacgcatatacgaagagcctcccggaatcgttggcgatccaatgtttccaggaggctcaagccggtgcgcgagatgggacttgaacccacacgtcaaagacacaggaacctaaatcctgcgcgtctaccaattccgccactcgcgcgtgcatatccgcgtttccacaggtgtggaagatatacaaaaccctaggccggacagccattacagaccagccagcctagggcatccgagccacttgtcagaatcgaactgacgacctgctcattacgagtgagccgctctaccgactgagctaaagtggcttggttcgcggaaggcatttcgccagccgcgcacaagaaattaagtataagacatctccgcgaaaagtccaatcggcggcttggcagttgtgtcgtgaccgctcggttgaagatgacggttgtgccgcgccacgaactgttcgataatgcaaacgatggcaatccgacatcgctgactgatttttgttctgttcatgtccgaatttgtgagtattctgtttggtgatacggagcgcatccgagccgtgagcgaaggcgctccagtcactgatgaaaggaatggaatcctatggccatcaatccgcccgttgacgccacccagacccctgagtgggctgccctgcagaagcactatgacgagcttcaggccgaaggcgtgagcctcaagaagtggttcgctgaagacgccgagcgtgtcgacaagctgtccttcgacgccggcgacctgcacttcgatctgtccaagaacctgatcaagccggaaaccctccagctgttcgccaaccttgccaaggccgtcaagctcgatgagcgcaccaaggctatgtacactggcgtgcacatcaacaacaccgaagaccgcgccgtgctgcacaccgcgctgcgccgcccggtcgaagacgagggcaagtacatcgtcgacggtcaggacaccgtcaaggacgtgcgcgaggtgctcgaccgcatctacgccttcgccgacaaggtccgttccggcgagtggaccggtgtgaccggcaagaagatcgagaccgtggtcaacatcggcatcggtggctccgacctgggccccgtcatggtgtacgaggccctcaagccgtacgctgacgccggcatctccgcccgctacatctccaacatcgacccgaacgacctggccgagaagaccaagggcctcgacccggagaccaccctgttcatcatcgtctccaagaccttcaccaccctggagaccctgaccaacgcccgtgaagcccgcacctggctgctcgaagagctcaaggccaagggcgccatcgacggctccgacgagaagaacgccgaagccatcaagaagcacttcgtcgccgtctccaccaacctggagaaggtcgccgaattcggcatcgacccgaacaacgcgttcggcttctggaactgggtcggcggccgttactccgtcgactccgccgtcggcacctctctggccgtcgtcttcggcccggcccgcttcgaggagttcctgcacggcttccacgagatcgacgaatacttcgccaacaccccgttcgagaagaacgtcgtggtgctgctcggtatgctgaacgtctggtaccgcaacttcttcaaggtcgcctcccacgccgtgctgccgtacgaccagtacc

SEQ ID NO: 2472 - DNA, 5071 bp, Unknown
  R50_10m  MAG No. k141_18080
acgaacagggccgccgaggatattgccgagcgtggctgcggacaggttatagaggatgcccgacacgtcgagcgccgcgacgcccgccgcgtcggcgccgaaaccaaacgttttggcgaccaggcccatcggcaggaagaacatgttggccacgcagtgttcgaagcccatcgccacgaatccggcgatcggcagcaggatgcccagcaccttgtcggatacggagcgcgcggcgaatccgatgcgcacggccaggcagacgagcacgttgcacaggatgccgcacacgaacagcgtgtcccagcttggcgtcactttaacatcaactccggttggaaaaaatctcagtatgtagcattcggttctcaaataggaggaacatgcagcggcaatcaacaacttgtcgtttacgacgccaagcaagggaaacagctcagacagatgacgcttccctgcaatcggatgacatattgcgggacggcagcggattttgggcgttcttggcgtggcatcccgcaagcgttatcgcacgttatctgcaccgaatcataagaatggcagaattccaatgatttcgcaggaagagttgcgggacgcgagctatgtgcatcgtttgacgtgtgtggcatcccacgtgattgcgggataccacgtcaaaacggacgaaaatcgcgtgccgtcccgtagtttgccgttatctgggataagcgcgtccgatatatggcgttcgaggaaaagagctgatccgatacaactttttagtgttataggacaccggaatccatggagagcaagggtaaaccgcctcgggcctacaggtccaaataccagtaggacatgtcccgcatggtgccggtggagtcggtggcagcggcgggcatgaggccgaattgggtgaagccgaagcggtgcatgagggcaatggaaccggcgttatcggcgaaaatgatgccgcaggccttgcgcatgtggcgggcccgcgcctcggtgagcagcctgtcaagcatgaacgtgcctactcccctgccttgccatgccggatcgatgtaataggccaaatcggtgacaccgtcatatcccgcgcggtcatagaacacggagagcgcaccgaagccgatgattgaaccgtcttccgattccacaacaaaaacgccgtagggcggcgtatgggattcgacccaggcgcggcgttggtcgagggtgcgcggggtgaggtcggcggtcgcaccgccggccatcactgaggcgttgtagatgtcggtgatggcttggatgtcggattcgacggccggacggaaggtgtatggcatgaggttcctttgaatacgcaaatagcccgtccttatgataaggacaggctatgtcagttgaggtaaccgactcccgtcagtcgccttctgcgatagctcccctcaccctgaggggagccggaactacttgtcgagctcgatggccttgttgagggcgtcttcaagctccttctgcgccttgccgtaggcggtccagtcgccgttcttcatggcggactggctgtccttcatggcttgggcggcatcgttcaacgcctgctggagttcggggctgcggtcggaagacgagccggaatccgactttccgtccgtggtgccggactgaccaccattggtatcggaaccagattggtcaccggacacgttctcggcatcgcccgcggccgcaccggaattgccaccgaacacctgatccaaggcctcatccaacgtatccgcgaatccaacctgatcaccgaatgcgaccagcgtcttcttgagcaacgggaatgaggtcacgcccgaagacttgacgtacacgggctgcacgtacaccagtccgccaccgagcggcagggtgagcaggttgccgcgcaccacttgtgtgtcgccggattgcagcaggttcagttccttggatacatcggcgttggcgttgaagttgttctgcgcctggccggggcccggtacgttcgaatccttgggcagctcctgcaatcggatggtgccgtagttcgagcctatcttgcccttctcattgccggcatccgagtcgaccgacaggaagccggtcaggatctcacgggtggactggccagccggaatgtaggtggaggtcagcgagaacaccggttcctcggtgccaccggtctgcaaggtcaggtagtacggcggctgcaggatgtcctggtcctgctgggactgggattcggtcggatcgaccggcgtctgccagaagtcttcgcctgagtagtactggctggcagaggtcacgtggtacttggagagcagctcgcgctgtaccttgaacaggctttccgggtagcgcatgtggctcatcaggtcgccggagatatcggagagctggtggtactggccagggaagatcttctcccatgccttgatcaccggatcggattgatcccacacgtacaggtccacggaaccgtcgtaggcgtccacggtggccttgaccgagttgcggatgtagttggccttctgagagcccagggacgagaccgttgcggaagagacggtggtggaatccttggtggcggagccgaggtcggttatttgcgagtacgggtaggcgtcggaggtggtgtagccgtcgacgatccacttgacgcggccatcgaccacggccggatacacgcggccgtcaagcgtcaggtacggtgccaccttggccacgcgctccttgggggaacgatcgtagagaatctgcgattcgctggtcacacggtcggagaagagaatctgatcggagccgaagcggatagcgtagagaatcctggagaacaggttgccgaccgaagggccgccgtcgcccttgaacgtggtcagagcaccttccgaaccggtcgggtagtcgaactcccaagcctgcgtgccttcaggggcaccgacaatcgagtattcggtggtgttcggcgagaagtagatgcgaggctcgtacttttcggattcggtgagcttgccctgggtggggatgccggattcgaagaattcgggctggccgtcggcggtcaccttgttgccgtaggcggccaccacgccgtaaccgtgggtgtacacggtgtggtcattgacccagttgcggttgtcattgccggccagatcgagctcgcgggcggcaatcacggtgtcctgggagacgccgtcaatctcgtacttgtcgaccgccagggtgtcggcgaaggtgtagtactgcttggactgctgcaactgtttgaacgtggggctgacgacctgcgggtcgagcagacggatctgcgcggtggtgtcggcctccttggccagagcgccctgctcacccttgtcggtcaccttgtattgctcggtcttgagcttgtcaagaccgtaggcggcgcgggtggcgtcgatgttgcgctggatgtaggtggattccatctcctgtgcgttcgggttgacgcggaagcgttgcaacagcaccggccatgccacggtgagcacaagacccaccacgaccacgacggcaatggaggtcaccggcacacgccaggccttgagcgcggcggaagcgcgcacgccgatggacgcctggccttcgagcgtgtgggagcgcatgagccagatgcccagcaccacgccgaggatggcggtcagcacgaccatgatgaaggtgacggggatgttggcatgtacggcggtgtaggaggcaccggtgatgcgtgaaccctgcacggtgagctggtcgaagacgccaatcatctggcgcactgcccaagcgaacatgttgagcatcagccagatgccaagctggcgacggcaacgcttggtaatggagaacaggccgcgtccgttaaccggcatggtaatgcggataccgcccatcagcacatgcgtgaccacggaaaacacaaggcccacgcccagcagcatggccacggcggcgagcacgagcttcaggcccggcagcacgaacacgtagaagccgttgtccagaccgaactgcggatcggtggtgccgaacgactgcgcgttgaacatgagcagaatctcgctccagttcgcgttaaactgggaaccgaagatgacgccgacgatcagcgaaatcaccacggccacgcggcgagcggttttcgagctgacggatttgccgacctcgaccacatcgccgttaatgcgaatggtggaaccgtcggccgaatcagggcgtgctcgaatggccagccaggcggaaacgaagccggtcagggccatgagcagcgcgtaggccacccacagaccgattttcaccccgagctgggtccagaccacggactggaagccgagctggccgtaccacatcagatcggtgatgaatcgggacaggccgaagaacagaccgacgatgatggccaaggccagcaccacgccgatcagaatcttgctgccacggctggctcctgaaccaccggacgctggcttacgggtgatacgcggattggccggaccacgtggagggcgggatgacccggaggggccagcgttggtgttgtgggccggaccgtccccatcggcctcgacatcgaggatgatcggatcgtcattgttcgcattgttgcgtcgtgaatcgccgccattgccgaacagtactgagaaaggatcgttaaaagacataactcaagcctatcgaaagggcgggaggtcggttatgccctgagcacagaatgaggcaacatcctgttctacgctctgttctacgcttgccgctatgaacagacaacggccacaacatatgcgtccctcagcacacgccacacgccaacttcggcacaggagcattccaatcgtggcggcaatatgtgctttggcggtggtgttggccggtgtggcagtctacggatggcatgtcggatggttcgccaaatccacatcaaacggcaacaccaccactccccagacctcccagacgagtgcgttaccgcgcaccgacgttccttccccgaagaagaacgacgatccggcggcacaagcccaacgtgcggtatccgccatgacgcttgaggaccgtgtgggacagttagtgatggtgccgttgttcgccggttccgaac

SEQ ID NO: 2473 - DNA, 18501 bp, Unknown
  R50_10m  MAG No. k141_18340
cattttcggcaacggtaatgtctttgaccgtgcctccatcgttgagcagactgtaatacgaacgatatgtcggatagaaattcacttccaccgacaccacgaaattcaccgtggtgatcagaatcgttaaaaacgcaagcatggcgggcacatcgtaatatggcgcaccataaaacagacccttcactttgataccaagcggcccacaccaagtgatcaccaaatgggcgaacaggccaatggtggtgaacaatccggtcaacgccaacggcagaaactggtcaacccactgcagaaacagccacggattctcacgactttgcggaaaataccgatgcaacagcagcacatcccacaccagcatcacaccatagccaagcaccaccgcaaacaacagcgattccaccggcggcaacgccaacgcaagcagcacgcatgacgtaataaacgccaccagcactgcagcagcaaaggaatacagaatgcttttgtaatctttaatggccgtcaaataactcatcgcattccagttgacgatcatttcaagaaacagccataaacacaacgcgccctgcatcagcgtggctccagaaaacagcagaaacaccgtgtacaataccgcgcccactaccaacatgatgtcggtagacccccaaaacgacggcagaatcatcttctcatcgtgatcaaacagcatatccgccaaaaaacgtgtgaccggcatcgacagaaaacttgtcaacaccaatgaggcaagcaatgtgtatgtgatcatgcatacaagcagatcacggtcggggcgccccacctgccaccaactgctcacgatcagcacgccaaactgcagaagcacgcccagcagcatcgggccggcgcaaatcacgccagcatagccgtaggctcgcagcattgccatcaagcccctacgatggaacagtttcttcagttcaaatccaataccagccatatcagcgctccaatccgaactgatccgcggtatcgctatacagcctgcgataatcgtcaagcatgcgctcatgccgataataagcattcacacgatcgcggccgatctgccccatggtttcacgcaacgtacggctggaacacattcgttccatggctcgactcaagccttcgcggtacatcgggggcacgtagaagccggcaatgccgaaatcgtcgccatcctcaccttccaacagttcacggcaacagccgacgtcagtggtcacgcatgggcgtgcggctgcgaacgattccaacaccgacaatggttggccttcggaaatgctggtcaacacggtgaaatcaagcttgcgcatgtattccaccacattcacacggcccgtgaattcaagattgcgcacgcccaactgttccacaagctcatagcattcgtcggcatactcctgatcgtcaacaccgccgagaatatgcaagcgaacgttgttcacgcgagctgtcaactcgtggaacgcgtgaatcagggttttcacgtctttgatcggcgccatgcgcaccaccgcaccgatatcgacccaaccatcgtcgggcttcagaggaatatcgcaaaaacgttcgtattgaatgccgttgggaataacctggcaggcgtcggcgggagcacccatacctatttggataagacgggcacgaccgaacaaactagtgatacgccatgcacgctggtagatctgttccgaaagcatgtagaagaaacgaatccaacgcggacggaaagccggaagcacccattcggcggaaataatctcctcttcacgttcgcgcgtataaatgccatgttccgtaagcaataccggcacatggttgatggaaccacccaaacaagccaataatccgccatatccggtggaaatcgcatgatagatttgcgcttccggcacttcgccgcccatcaggtacaacaccggcagcagcatggatcgcgcagtatggaaagcgtctgcataggccacatacgggtattcctccatgcagatttgtgtgaacaggtcaatgaattcacggctttgcaggaacgacagcggatgcacgcctttggtgtggaacaggttgaacagcacatcccagtccgggctgccaagattcaccagttcgcgcaatgaccgcaattcctcttcggtgaacgacacttgcgctcgttcaccgctcaaacgcaaggcgtcgtcgaggaatacctcatgcacttccaccacattgtcgggcaggtcatatacgaatttgccgcggtcttcggctttggcgccgatcacccacaatacgaactcgtgctctttcatcgcttcgatataactgtgcatccatgtggacacgccaccatgcacgtacgggtagcatccttccaaaaccaggcagattctcatgcttctcccccagtcttgcgttcgatatgaaccgtggcgctcgtggctttgagcagatacagattcccggtcagcttggtgaggcttccgccgcgcacattgccaggcgtaccattactggcacggaacatcagccacccttgatcggttaagttgccaagtttcagatcccaactggtatcggttgtttccatcgaaaccgtcaatcctgagaatcgttgcaccgccgcagcgcattccgttccggtctgcatacgaatggacggagccgactgttccaaccaatccaaataatcttccaatcccttgcgataggtttcccaaccttctttcgcaccacgatcttcatcaagcagatcgtcgggatgcatgaagtgcgtgctcacatagtgcatgttcaattcggaaaccgcggcaagacgcatgtacgtgtcgcccaccatgccgccggacacgatacgtggagcctccaccacgccatcggccgcaacaccgaactcctgtatgtacggcaaggaactgtcggaaggcatatacgtactggcgatggcgcgaatctgcggcacatcctcgcctatgatctttcgtgcctcttgggagaggatattcgacggcggcacgtataccgacgatgttgctgccggcaatacgtctttctggaatgcgatcagttcctgcaatgatgccacaatggctttgcgattcggccattgcacgtacgcgtattccttgccgtaatgcgtattcggcaacaccaacggctgatggttgtacccgtgatatccgatttcgccgttttgccgaagcagcaatcctccgtaatactcgaattgtgtgttgtccgtctgtcgtacaggatcattcttggtgtcatcgccgtaattctcaatcatcacaccggtgtaacgaataccgtaccgttccgcaagacgcaccaaatccggccaccatacttgagaatagaattcagaaatactcatgttgtagtcacgtttgatgtatttgccattgccagacggtaccggagagggaaaatcatccaagtagaacgccgcgctgttaatcaccggataggccatggcagaaccgagcagactgaacgccgaagcgtacaatcctcgaaacaccttgccgtaaatgccgatattgcacatcacagccgttcctgaccccaccgcgttcctccacaccaatggcgttctgccattgctgctgaccgcttccacctgtgcacgatcattcaatgcgacgctcagcgacgatttgaacgggtcactgaatgtgtatgtctggccgccacccaacataaaatcttcggacggtgtaatgcccccagtcgccacatattcgtatgtggacgtttcaatgccgatctgcgggccgatcacgtccaaatagccggttttttcgggagtcatggcaaacatgactccgccgccctttttggcccattgcatgatttgcagcacatgctcgcccagacggtcgagattaggcatggccaccactatggtgctgtagtgattcaacgctggaaattcagcgttttcgtcagccacgtcaaccgtagtggtagggactttcatatcaagcagaatctggtcgagcatggcttcggcatcgctgacaccctcttgcgaactgtcaaccaccaacagattcgtagctttttcgccagcgatggcattggctgcaggaatggccttgtctcgatccaaatacgtgatgtcgaaacgcgtggcaccgtaatgcaagcccaagctctccaccagcaacaccaatgcgatgaccatgaacacagcccagactttgaccaaaccttgccagcggaatcgcttccacttggccaacacgtctgacaggaatcctctgatcatgcgcgttcagcctccttggttccagtccagaaccgcaaagctcgtcttccttggccaccgagataaatatgcttgctttcgatctgctgaacggtttggcgcaatgcatcgccatcattgcgtgcggcatcgagtcgtagacgcatcagccatacatcgccttgatccggccaccgttccatagcgccgtcaatggtgtgtgcggcatcatcaaagagtccaagatcaatctgcatttgcgcaagacggcacgcaacgtgataatcgccatgtttgtgaagtcgttcctgcagtacttcggcatatcgctgcttctgcaactgcaatgcatatccttgtgcaatgccggaattgacatatcgttccaacgcatcgcaatagcgttccaacatcgtttcggaatttcgatgctgcagataatcgttacggcagcgttgcaatgcaagatcttccttggcactgatctgcgccatggcggtagccgcgtaatgcacgacttccacatcctcattcagtcgggcctgcgacagcacatcgatataacggctgggattgtcgttgagaatggacatcaccagactgcgccgctgactcgaatcgttgacgatcagcgcctcttccaacggcactgtattggcgaaatcggctcgttcctcaaccagaatgcttcgacgttcctcatcatccacacgcatttgctcaagccccgaagccgtgtgcccgtcagcgcgaatcaacgtgcgcacatgcagcaacagcacgcataacggcccccacaatggcaccagcagcataaagggaagcagccgcccctccacacaaagcacgccaacgcgagacaatacgcacagcaacacgcatatcattacatgcacggcgataagcagcatcgccatcaccgtcgcattcatgctgcgccgccttcgtacgatgcggagtcattcgacgcagcgtcactgcgcggcgtttcatccgcttgcgaatcggcagccacttgttccgaagcttcagccagcaacgaatcttcctcgtggtccgaaaccagcgtcacatgcaatccagcctgggacaaacgcctgttgataatcggcagctcatgctcgctgacctgatccatgagcacatacacattgccgtcctgcagtacaccggcttcatccgtttgacgaatggctcccatcaggcggctaccatcgtcttgccaggcgtcttccacacgcaacagcagatgattgctcatatgattgcgcttgagctcgtttgcagccagcactttgggcaggaacgcctgagtgttcaggaattccgtgccgggcaccagcctcgtctgccgcgcaacattctcataatcgaaggcacgcaccattgcggattccaccaagccgcacatgatggtgaacaggttctggaagtacaggttcatttggtcgggctgcgctttggcaagcacaatcaccacggccagcttgccatcggcacgcacgcccgccgcatacattggaaggttttgttcgagattgcggtttacccacaatctgccatgatccaaggccgtaacaatgttggcataattctcaagcagcgccgatttactgaataaggattcggtctgcggactcgcggccatcaaatgcgcgaaacgaccaccattatcgattcggtaaataccgaaactatcgccgcccaacgtatcttgcataatgcgaatggtcgcgtaatacagctttcgaggcagcacttcgtccaattcacgggtcatcgcatacattttgccgaaactgtcacgtctaccgataatctgcccgcgcaacatacgacgatcatcaagcacatcgtggtacaggtcacgcaggaatgcaagtcgttcacgcagcaaactgttttcgtcacgcatgaatcgcaggttttctcggttacgcagctgcacgtatccacatactgcgccggcaacgaaatacactacgaacgcaagccagttcgacgtgtcgtaaaacagcggagcgaacgacgcacccttcgacgcatacgacaacgccataccggcacatgccaaaaccgccgctaacacgcctgcgttcagtccgtacatcgtgccgacgatcaccacgaaaaacaagcgtaaatccacggtttcgagctgactgttgccttgtaccgcggcacgaagcagttcttccaatatgaacgtgatgaagatttcgattgcgatccacggtttcgaatggttgcgtagaaaatcccagatcgggtgctttccggattgttcctgagcacgcgcctctttccagcgctgaagtatagggggaagatcctgtttgagcgaatatcgcggcgaccagccatagcgcaatcgcagcacatgatcgtccgctgggtaacattggggcctgtcttcgccaaaagtcaccgataatccgggaaatgccgcgctaatcacatcagccaaatcaccgtatgtgaagttgaacacgttgggcacatggaatatttcgctttcggcggtccaatcgtcgaacatgcggtagatcagttcggcaagatcgtcggcgcagagaaagcatgtctgctggttcttttgctcgcagaacgacaatgtgcccgattccgcctgttcaaatagatgattgaaatatgcggtgacgccgttgcgatccgacgcatacaggtacgggcttcgaatgattttcgcttccagacggtaggtacgcgcataatacaggcagagttcttccgacgctcgagacatcagacttttgctggtatcacgtacgtcggcgttttccggatcggtaaattcggattcggggccgctgaccatcagtatttgcgtttgcctgttgcaaatggcatgcagaaatcttcgcaatgttcctagatcgccgtctcggtcactgcgtggggtcagattttcggaaaagaatacgatgcgatcaaattcgtatgtggtaagggtttcggcaagggtgttggcgtcagacatgttgacgattctgagacggtcattgccgtccacggtgccttctcgttccgctatcaccacatggtctcggggaaaggcatgctgaatccactgttgggtaatgaaatcggtatcaccgaccaaaagcacttcatgctgccaccccattaccatgtttggtaggccgcctcgatggtcggggccgggtcgccggtcctggtatgactttcctgccctgtcgttgatgatccgggggtgttgtcgccgggaacgcccccccccgtgaatactccccttaaacgggggtatggcatagttctgtccacagaccctccattgtccctgccttacggtattccagtgtaattcgttaacagacaaaattcccctcaacgggggtttcttacgccgtgcgattgcctcgcttcagcccttacttcgcgagcttggcgtactcgtcgaccatgaacttggcgatcttcttgccgccttcgcccagcagggtggacagcgagttgatcggcatggagttgaggaacatgcgcatcatggcgttgtcgagcagcttcgtcagctcgccggcctcgccggcggcggccacggcggaggtgttggtcacggtgttggtcacggtggcggtgttcgcgccggtcttggcggcgacgtcagcgatctcgaacgtggcgtagctcaggccgtagccgaacggatagtccacagacttgccgtaggtgtcgtagtagcggtagccgacgaacacgccctcgccatagtcgacatggccctcctcgcccggccagttcagcatgctcgggtcatcgttgatgtccagcggaatcgactgggcgagcttgccggacgggctgacctggccgaagatcacatcggcgagcgccaggccaccggcttggccgagcagccaggattcgaggatgcccttggcgttcttggcccacggggccacggagaccacggagccgttggacagcacgaccacgacgttctggttcgtggcggcgacctgttcgagcagggcgatctgcttggcgggcatgtcgagggtgtcgcggtcgaagccctcggattccgcggcttccggcaggcccaggaacaaaaggcccacgttggtgcatatgttctccacgctgagcgccgaggcgctcgactcggcccaccccgcgcacgattatttcgccgaccgcgagcgccgcacggccaccatggcgctcaacatcaactgggccgtgccggaagatgtgaatatcgagcacctgctgcagtccggcttcgccatgatggacggcattcagctgcgttggctgcgctcccccggccaaaatctcaataccatgtgggccgactgcgaggatgttctgatgcctttgcctctttgggagggatatcgctgattggtgcggttgcacgccatccaaccggcgtgccagacgtgggtgaggtcccatgggtcgagacgtgatgtgtcggattgcgggtcgatggcaggcaagaaatcacgattaccacgtaattggtagctccaataaatctgcccggcggatgcgctccacgctttgcgctgcatggcggcgacctcgcgatagacggcattcctcgctgaaggggttcggtccaccagattgttggccacgcaccactcccctacgatcaccggcgtatagcgcgcggcccggcggatgcggcgttcgttccagcgcacgaacaagcgataccagtccatcagccaccgatccggaatcagacggaacagcgagaattgctcggccatgacccgatagatatgcgtatcgagcatgacgccctgcatgccctcccgcacaaaccagtcccgccaacggcccagtcggaagccgtcatggaacacgatggcttggttctcggccaaaatcgggcgcaaccggcgatacgactcacggtagaaacgcttgaggaacaccattggaatcggcccactcctccgtgcttcaaagctatcctttgcctgcctgctcgatgacgacgtagcatacgtcagccaatcaatcggctcattcagcacttcgatgccgaacagcgccgcgcgatcgcgataccggcgagccagacaggccagcacattcagcgcataggcgaccgctcgcgggctatgatgccagcgcaccacgccggtgagaccgccgttgtcgaatccgttctgtgagccgggcaccgtgtgcaggtcgataagaatcttgagaccggtacgctcggcccagtcgaacgccctgtccaaatactcgatgcagcccggatgaccggacacatccccgaagataaaatacggcacaggaatacgcaccagattgcagccatgcgcggcaatgttccgaaaatcagcttcagtgatatacgtgtcgcgatgccgcgtcagcagagcctccagctcagccgacttcgtagcccgatgcagccagatctcgtccgcctcgccgctggcggcaaaaatccccggcttcatccaccgctccagcaccagccaattgccgaggttcaccccattaattcgttcgccaacacccagcgcgcccgatgccatacctgtcacgctaatcgttcaatgcttcaccgtagcgagcgaccagcccctgattcacacgctcaaattcggggatgtaatcaacgatgatggcatccacaagccgccgggcgcgttcctcatcatagatatgagcagaatcattgcgatcgcgcagcatgcgcagccacaacgattcgtccatgaaatcgtaatattggaaagcggttttgagcacatctcgcggagaaccggaagcggaaacagggtctccctcataagccagcagcgccttgaacagtttccgaccaagctcaaactgcaactcgaacttgtcaatgatgccgctctggatgaaatcattgccgagatcctgttcgggagccttgcgcagcgacttcagtgcggaagcgtaattctcatatttttttcatacaatacctttccgctacgctcaatctccgccctcagcgatgaagaaatcggctcatccagattgatgacatcaactttaagcagcgaccacagattgtcctgaaggttctgctccaagcgattgaaatcggggcaaccggccacggcaagatcgatatcgcttttaggccggttcacaccctttgcgcgagaaccgaacagcacgaccttgcgagcgccggcatcagcggcaaacgcgcgaatctggtcgtacacgtgctcgataggaaccatgacacctcccgccgcatccaacagtcccggaccaatcccggaccacccgcgcttccatcatacggccgcggcccgctcaccgcacggagcccgaaccacccgaacgcggcgacgtagttgcgggaggcgggctggcgctgtagggcgtgcgggaagttcctgacgtctacttttcaggaggtgaatcctcatgttcaccacgttttctctggccgttattctcgactgcaccgtacgcatcgtgcttggcacggcattgggcgcactgatagggctcgaacgccagttgcgcgcccgaagtgctcggcgtgcgctgggatgtggagcacatcaccacgtccgactgaaacgtccgactgacgctgaccagcaacatcgcaacagtacaacaagccaacaagtgggatggggcatcgagcctcatcccactttgttattatccggcgattgtcagactcactcacgccacggtgaacgtggtgcgcttcaggtcctcacggcgcgaggaggggccgatgagcagttcgaattcgccgggctcgacgatgcggttggcgtccgggtccacgatcgtgcagttcgccaccgggatctcgaaggtgacggtcttggtctcgccgggttccagtgcgacgcgctggaacgccttcaattcgcggtcggtccagctgtaggaggtcacgatgtcgccgatgtaggcctgcacgatctccacgccggcgcgctcgccggtgttggtgagggtgatttcggcacgtacggtgtcggtttcggcgaatgtgccgtcggcgttgcttgcgccgcccgtaatggtcggttcgccgtatgcgaacgtcgtgtagctcaggccttcgccgaacgcgaacgccggatcctgggtgaggtcggcgtaccggtcgccgtgctggccgcgaatctggttgtagtagactggcagctggcccgcgtggcgcgggaaggtgatcggcagtcggcccgacgggctggtcaggcccaggattatttcggcgatggcctgaccgccgcgcatgcccgggttcggcgcccacaggatggagccggtgccggtttcagggtcgctgacgcgcttggcgaacacgccgtactcccccacgatggaggcgggcaacacctgcggcttggagctgatgagcacggtgaccatcggcttgccggtttcgcgcgagacggcggcgagcgcgtcgagcagggcgttctggccaccgagcagttcgagcgtggcggtggagcaggtttcgccgaccagctggaccacgtcgccgaccacggccacgatcagatcggactggcgggcgttggccacggcttcgtcgatcattgctcgatcgacggcggcggaaacgccgattttcgggcgaggctggccgtccgggtagaactcgccggcagggtcaggcacgaggtcgatgacgttcgcgccgcgcgagtagaccacttcgcaatcgtcggaggtgagctgggtcaggccgtcgagcacggtggtaatcatgcctcgaggctggccatccggcatccaagagacctgaccggagttgccggtccagtcgccgagctggttctgggcgtcgtcggcaagcgggcctaccacagcgatgcgcttggccttgtttgcggcgaacggcagggcgccgtcgttgcgcagcaggacgacggattcgcgggcgagctccaggttgatttgctggtgttcggccgaaccgatgaccgccttgatacgttcggcgtccggcagacgcgggtcttcgaacaagccgaggcggaatttcagagctaggatgcgagctactgcgtcatcgatcagggattcgtcgagcagaccggtttttacggcttcgatggctccctcatagaactgtggggtggtcatgaccaggtcgttgccggccttgaccgcgtcggctgcggcgtgcacgtaatcgggcttgacatgctgctcccataccgagcggccgacgttgtcccaatcggtgatcagcgtgccgttgtattgccatgcgccgcgcagcttgtcggtcagcagccatttgttgaacgtgaccggcacgccttcgatggactcgtagccgagcatgaacgtgccgcaaccttctttggccacgcgctcgaacggcggcaggaaccaggattcgagcttgcggtgggagaggtcggcttcggaggcgtcacggccgccttgggtttcggaatagccggcgaaatgtttggcgcaggccaggatcgcgttcttcggcagggcctcgccggccttggcgccgccttgatagcccttgaccatggcggaggcgagttcgccgatcagcatcgggtcttcgccgaaagtctcatccacacgcccccaacgggtgtcgcgggcgatgcacagcaccggggagaacgtccagtgcacgccggtgcaggagacctcttcggcggtggcgcggccagcggcttcgactttggcggcgtcccagctgacggccatgccgagctgggaggggaagatcgtggcgcccggccagaaggagtatccatggatgcagtcatctccgataatcaacgggatgcccagacgcgtcttctcattgacggtcttggcggcacgagataaatcctcggggctggtatgcagaatggatccgacatgcttattcacgatgagatcctcaagatcgccgccgcgggcgtcaagctgcatcatctggccgaccttctcctcaagtgtcatacgggagagcaagtcggcgattcgctcaccagcgggcaaatcaggattcttgtacggtaaggtttcagcagttgcggcaggcgtggtgttgtcggtcatacgaagtcgctttcctcagtgaaatcgaacagctttttaattaccaattggtagtttatctattgacagcatacaacacgcttatgccgcgcgcatcacatacaccaaaacgaccgtatgtatgcgaccccttcgttcgcccgcatacttactgccgccatcaagcacaagcctcagttcaaggcacacagcgaatcagcgatacccgtcccatatcggcgaaggaaatatcgccggctccagatcggcccattcatcgcataagtcaatggccggcccccgtaaccacctcagttgcacaccatccatgatctccagagcatggcgcaacgtgggccggacctcctcaaacgaggtgaattcggaaggcaggttccagttgtatgtcgaatagtatcgccatattgaatcccgacgattggcaaactcgtcatgtaacggatgcgcaggattgaacgattcgacctgcaatatcgagaacagctgaacaagcatggggcgcgtggaattgcaatgtaccaagaacctcagatacgcgggtaatctgaaatcatcgggcactgaaccaggcaggccggaggccatgaagtcttccacactgccaaacgtgttgtaattctcgtgatacatcgcggcaagcaggttatctttgctaggaaaatatcgcaaaactccctgcttggtaacaccgaccgcatcggccacatcctgcacagaagtaccgttgtagccacgctcggaaatcagtcgcacggcggcatcgagaatttcctgccggcgttcccccggcgacttgcgaacacgcttatgctgcaatgaattcccagatgtcatatccgccagtctatccgcattctccccactcccatgcgcaaccacatccaatatccttggccggatatgcaaaacggtgccaaaacaaaacattctgtcatgccttcgacaccgatatcgcgcaatagatttttctgtatatgcttcttcgcttactcctggaacacgtcggggtgcttcagatcgccggggatgtcggacagaaggccctccagccccaggaattccttccagaaatcgagcggctggccgtatggcgaagcctcgcgaccgtgggcctgaatgttggccttggcctcgaacacctcttcctcgctgatgccctcgaagtagctttccagacgttcacggtgctcaggcacgtagaacagagaggacacaatctccgtcagacgctcggcacgctcaatcggcagtgaatcccagtgacgcagttcgatgaagttcttcaggcgtacgtcattgaagtgcgtggagatgatgtggttgatctcgtacgggttgagttcgcggtccgggtacacctcccccgcgttctcgcggaaggccgggcgatgcagttccttgggacttgctccagaagccacagcttcaggggtatgggtcaggtcagcgaacatgagcggcgtggacagcacgtcgatggcgtaatcctcccacccatagcgcgggtcgaacaggctcggcagcacattcgtgcgctggaagtcgagataatcccacatgcgctggcgcagcaacggccatgggttcgtctcaccttcgaaatacggggtgttgcggaagaagtacgccagaatcggaccgatgacggtgcccaaccgcagtttttcgatggaatcgcgctcgtccacgtagtcgatgctgacctgggtggaggcggagcaacgcatcatgcatgggccgaactgacccacgcggccgaggtagtcggtcattgcatcgtagcgatccttggggttgaccggcacatccgcaaagctggatttgggctggtaaccatagttgaccaagcggaagtcgagatcgtcaagaatcgggtcgagctcgcgacggaacttggaatacaacgtattcaggtcgctcggcttcttcagaatgccgattgaggtttccacctgtccgccgggctcgagagaaacggcgacgccggaacggccgagacccaccagatggccgttctcccagtattccttctcctcgtcgtagtacggagccaagcgtttgagcaatgcctcgatgccattcggctcgtagtagcttacggcagtgtcgtcgctgttgtgcacgggcaggtgctcgatctccacgccgaagccgccggtgccacgctgggagcgaccgttctcaaagaacttgagcaggctttcgacgtgcttggggttcggcttggcgagcaggtgcgcgtaactgattcggggagtaaccatgctttgtatcgtattcgagccggccggtgcgcgtgcccgaaagcccgtaatacgctatacgaaaaaccgatagcaggctccggcccggtttctcgctctagagactcccctcagtcgctgcgcgacagctcccctcacagaggccgagccgtaaagcggacagccctgtgggctgtccgtaggcgagggtgagccgataggcgaaccagcatgtcgcgagcgaagctcgtccttaattgcggacgagccagagcataaatcagtccgcggaggtgaagccctgcggctcgccggcctcggcgaacttggcgttgtgggccttcttggcagcggcaatcatcagcttgatacggttgagctgattggcctcggaggcacccggatcgtaatcgatggagacgatgttggcttccggatgcagacgacgaatcttgccgaacatgccacggccggtcacatggttgggcaggcaggcgaacggctgcgcgcagatcacgttcgggcaaccctgttcgatgagttccagaatctcggccgtcagcagccagccttcaccggcctgcacgccgatggaggtgacttcggcggccttcttgaccagttcgggcatcggctcgtcctgcttgaacttgccgttcgatgtggccagcgcggccttgatcggcgcgttgtacaggtcgaggcccttgcgcatcagggcgtaaaccgtcttgttgccgcccatgccgaggttcttctcgttccagtcggtgatgtaggggcgggtggtcatgaattccatgatgccgggcaccacggcctcgcaatcctgggattcgatgacgtcgaccacgtggttgttcgcgtccggctggtacttgacaagaatctcgccgaccacgccgacacgcaccttgcgtggaatatcacgcagcggcaatgcatcaaaggacttcacgatctccttggccagcacgttatacggcagatagcccttcttgatgctcggcgccttggctgcggtcttggaatagccgtgatgctcgatggtctcacgcacgatggtgtcccacagctcgtacagcttgttggccgaacctttctccacctcatacgggcgtacgcggtagaggcacttcattagcaagtcgcccagaatcagcgccttgatggcacggtgcagcaggggcagggtggccttgaagccggggttgtcttcgaggccctgggtagaaatggcgatgaccggaatctgcgggtaaccggcatcgaccaaggccttgcggatcaggccgaagtagttggtcgcacggcacatgccgccggtctgggtgatggcgagcgctacatggtcgggatcgtatttgccttccagaatcgcgtcgatgagctggccgacgaccatgatggccgggtagcaggcgtcattgttcacgtatttgaggccggtttccacatcgccacggctcgcgtgcttcaggatgtcgaacttgtacccaccggaacgaatcaccgcttcgaccaaggacatatgaatcgggctcatctgagggccaacaatcgtatagttcttcttcatgtccttgacgaacttctcgcgatgagcgtagcgggacatggtggcgttgttgtggccggacttcttggcgttcttggcgttcgtcacgccggtggtgccgtccgaagtgccgttcttgctggcgactgcggcctgcaggtcgcgttcggcggcacgcttggaggcggcgcgcatggccttggtgagcttcgggttggcggccatggtgctgtcaagcagaatctggcggccgggggttggcgcggtggagccggtcttgcggaatccggtggacttggggccttgcacggccttggccgcggcggcttcgcgggccttgttggcttcgcgttcctcgacggcggccttgagcgagcgcagtcgaatcttggcggcacccaggttggagacctcgtcaatcttcagcagcgtgtacacgtccgccttgtctgccaggatttcggccacctgatcggtggtgatggcgtcaaggccacagccgaaggaattgagctgcacgagttcgaggcccgggtaggaggccacgaagtgtgcggccgcgtacagacgggagtggtaggcccactggttggtgacgcgcaacggcatcttggtgactgtgcggtctcccacgtggcggaatccggcggcgttcttggagcgcgggtcggcttcgccttccgagaggaattcggtgaggttgagcttctcccccggctgcagttcgcagatggaatcctcggagagcaccaccatgccgagcgagcagatggtttcggggatgccgtggttgatttcggggtcgatgtggtaggggcggccggcgagcacgatgccgcggcagttgtgctccttcatgtaggcgagcgcggtcaaaccttcctgctgcacgtcgtgcttgaagaccttgtcttcggcataggcggccttgaccgcggtttcggcctcttcgcgggtcacgttggcccacgcaaactcttcgacgatgcggccaaccatgagctcatggttggcgaggttgaagtacgggtgcatgtagcgcacgccgtcttcacgcagctcaggcacgttggcgccgacgacgagcggatagttggccacaaccgggcagttgtaatgattgtccgtgttgggcacgaggttctcctcgtagctcacgcacgggtagaagatggtcttgatgcccttgttgatcagccacttgatatggccatgcaccagcttggccggatagcagatgttttcggaggcgatggattcgatgccggtctcgaacagctcgtgggagctgcggccggagatcatcaccttgaagcccagcgtggtgagcagcgtgaaccagaacgggtagttctcgtacatattgagggcgcgcggaatgccgatctcgccac

SEQ ID NO: 2474 - DNA, 3633 bp, Unknown
  R50_10m  MAG No. k141_18358
ccgacaaggcccacgccccgtgcgaacaggaggatgagcagcaggccgctccacagggccggcacggcgccgcccacgatggacagcacgcgcaggaaaccgcgcacggccggcgaccgggagatcacggcggcggcgcccatggacaagccgagggtgagcgcgatggccagactcatcacgatcagcgggaacgtgatcgtcgcacgttggccgacctgggaggtcaccgcccgcccggtcagcgccgacacgccgaggtcaccgtgcagcagccctccggcccagtcgagatactgcacgacagacggccggtcaaggccgaattcggcgcgcagggccgccacacgcgccggcgatgcgttcatgccggccatcacgaccgccacgtcgcccggcaggatgcgcagcatcgcgaacaccagcaccgaaatgccgaacagcgccgccgcgaacagcagcaagcgttgcatcaagaaccgcataacgcctcccttatcgattccctcgccaccgcccgtggcgtcaccggccggatgggccgtccacggtcgggcgcgccacggaatcactcccgcgccgcgcccgaccgatgggttccgggactacttggtgtaggtgatccgccagaggggcagcacggtctggctcaggttctgcgggaagccgtccacgcccttggcgtaggcgatggtgaccttccagctgaacagccagtcggccggcgcgtcctcggagacgatcttcgcggccttggccagatacttcgaggcctcgtcatcggaggtggcctccagcgccttggcgtacagggcctgcacgtccttgttgtcgtagtggaagtagtagctcggcgtggtccatccgtagaagtcgtggctttcggcatggtccacgagcgaaagatcgtagttgccgttggcgtgcacgtcctgcagccaagtggagaactccacgtagttgatcttcaggtcgatgccgatgggcttgagctggctcttgagctggtcgccgagctcggtgccgtacacgttggcgtaggtgagggtcaggtccagcggcttcgactcggagtatccggcctgctccatgagcttcttggccttggccacgtcatgcgggtacaggccgctcagatcctcgtaaccgggatcgaccttggggatcggaccgccgaggggggcgtccacgccgccgcgcgaggcgatgatctgcttatggtcgatggcgtatcggatggcctggcggacgcgcttgtcggagagcttgtcgttggccatgttgaaggcgagcacgaacttgtcggaaccgtcaccggacttgaccacatagttcggatccttgcggaacggatcggcaagggtggcggagatgggcgaaagcacctgcacgtcgccgctcttgagggcgttgatgctggcgttctcgtccggcaggaaccggacgatcacgttctcggtcctcgccttgtgctcggtgccccaatacttggggttcgccttgagcacgatcttgtcgttcgggtcgaaggagaccacggtgtacggacccgagcccaacgcgccgttcttctgatcccaggtggcgtccttgtcgtagaccaggccgggacggctggtgaggtaccacagcatgttcgagttgggcgcggagagggtgagcctgaccgtgttggcgtccacggcctcggccttgtccaggctcttgacctgctcgtagtcgtagtacttctgggccttgagctcgttgatggaccacgccacatcctcggcgtcgagcttgtcgccgttggagaagttcatcttctcgttgaggtggaacgtgtaggtcaggccatccttggagatctcccagctcttggccagaccggggtggaccttgttgtccgagccgcgcgagacgagaccctcgtacacgttgccgatgaggatctgctcaagggccgaacctgactggtggcggatgtcaagattgaccggggcgagtttgaggccgacggccacggtgtcggatcggctggccgagacggaggcgttcgcgtccttgcccttgcctttcccgccgaagacggtgacgcccacgatgagcgccgcggccacgacgaccgcgatcagcgtccacagccaccatttcgggccgccgttgttcctgtttgatgatttcgcgcgcgcgttgaggctcgcgtcggtgctggcggcttgattcgcgccgtcgatgttcctgtcttcggttgcgccggactcgccgtgcacaccattgttctgggacatggatactccctgatgcattcgggcatgcttacgcccgaatatggtttcgttgttatcttgcgtggttgaccgcccattcgggtcgatcaccacgttctactatatccccggacacgccggaggcaatggctatactggattgcggcgccgacggagggtccgcggcgaccacaacacgcggcgcatcgtcgggcaacgacgcgggaagcgctggcgtgggcacacgtgcggccttggcataaggccgggaggcagctatggcacatattcttctgggcgtcaccggcagcatcgccgcgttcaaggcctgtcatctggcatccgattggaccaaggccggccacgaggtgcgggttatcgaaaccacagcggccgaaggcttcgtcactcccctgacattcacctcactgacccatcaacccacccgtaccacgatgttccccgcttatccggccgcgcacggcgacgtgacggccaatccgaccgtgccaacgaccatcaatcatgtggccgatgcggcctgggccaatctgctggtggtggccccggcgagcgccgacgtcatcgcccgcatcgcctgtggattggcgaacgatacgctgacgtccaccattctggcctatgaggggccgaagatcctatgcccggcgatgaacgtgcatatgtacaacaatccggccacgcagcgcaatctgaaaacctgcgccgaattgggctggcagattgtggagccggaggaaggcaatctggcttgcggcgacgtgggacgaggccgtatggaagagccggcgcgcatcgaggaagtggccgctcggctgctggcggatgcgcaggatgaccaggctccctcatcttccccgctcaaggggctgcgcgtgctggtcactgccgggccaacgcaggagccgctagacccggtccgctatctgacgaaccattccaccggcaagatggggtatgcgattgcctcggccgcagccgaatttggtgccgacgtaacgttggtctccggtccagtcgccttgaccgcgcccgatgcggtggatgtggtgcgcgtcacgaccgcgcaggatatgttcgatgcggtggccgacgccttcccggcggcggatatcacgattatggccgccgccgtgggcgatttccgcgtggccgagattgcgccggagaaaatcaagaaggccggccgcagcagcatcaccgtggagctggtttccaacccggatattctggcgtgggccggcgaacgcaagcgcgacgacggctcgcagatcctgtgcggattcgcgatggagaccgagcatctgattcgtaatgcggagaagaagctgacgtccaagcattgcgacatgctggtggccaa

SEQ ID NO: 2475 - DNA, 34184 bp, Unknown
  R50_10m  MAG No. k141_18569
caacaacatggacgtggcccacgagaagcgctccgccctcgccaaggccctggccggcgacgaggtcgaagtcaagggtaacgacgacgagaccttcctcggcgccaaggaactgcccgagctcatgaccgaggccaagaaggctttgaccgaagccggcgtgtccggcgaggccttcgacaaggccgtcgcccgcttcaccaacgaatgggttccgggctccgaaacccgttggcgcgtggccgacgacctcatcaaggccggcgtggccgacgatcaggcctggtacctcgccaagaagtacgtcatcggctccacaatggatgaccgcatcgcgggtctgctgtccgaggccggtctgcccgacgccgctacccgtgcccgtcagttcccgcacgagttctccggtggtatgcgccagcgtgcgctcatcgccatcggtctggcctgccgccctgacctgctgatcgccgacgagccgacctccgccctcgacgtgaccgtgcagaagaagatcctcgaccatctgcacatgctcactgactcgctgggcaccgccgtgctgttcatcacccacgatctgggtcttgccgccgagcgcgcccagcacattgtcgtgatgtacaagggtcaggtcgtcgaatccggtccgtccctcgaggtgctgcagcacccgcagcacccgtacaccaagcgactcgtggccgccgccccgtcgctggcctcccagcgcatcatctccgccaaggagcgcggtgagaacgcggacgccctgcttgaccaccacatcgccggcgaaagcacgcttgagaaaagcgagcacatcatcaccgtcgaccacctgaccaaggaattcaagctgccccgcaagaaggagatgttcaaggccgtcgacgacgtgtccttctccgtcaagcgcggcaccaccctggccatcgtgggcgagtccggttccggcaagtccaccgtggcgaacatggtgcttcacctcctggatcccacttccggcaaggtgttctacgaaggccgcgacacctccacgttcaaggccaaggatctgctcggtttccgccgccacgtgcagccggtgttccagaacccctacggttcgctcgacccgatgtactccatcttccgttccattgaggagccgctgcgcatccacaagattggcgataagaagtcgcgcgccaatcgtgtcaaggaactgctggacatggtcgagatgccggcttccgtgatgggtcgttacccgaacgagctttccggcggccagcgtcagcgcatcgccatcgcacgagccatggctctggatccggacgtcatcgtgtgcgatgaggccgtctccgccttggacgtgctggtgcaggatcaggtgctgcgcctgctcaacgacctgcaggccgagaagggtctgagctacctgttcatcacccatgatctggccgtggtccgccagatcgccgacgaggttgtggtgatgcagcacggcaagctcgtggagcacgccaccaccgatgaggtcttcgaccacccgcagaagcagtacacccgagacctgctcgacgccatccccggcggcaagctccagcttggtctggactgataatctgcgtttgagcgcattgtattgggttctttccatccgtggaaagaacccaatattcgtatgtgcaggtttgcatgatggttcgcgtgggacgaaaggcaaaaattggtgttttcccgatgttgtcccacaatttgtgggacaacatcaacatcaatcgatggacatgaatgttgtcccacagtaggtttttacgaagtccggaattacgccattcttagtgtggtcgataattactcatgctgtggggtgtgggacggcccgcgaaaatcgtcgattttcggatgttgtcccacggaatatgtcatacctcgtatgtgatcgtgagtggggcgtgatcggaccagcgtttgtcatacgtgggagccttgtcgatgacgaatccgcgtgcggtctccgccagctcgggcgtggcgaactggtagtcgattctccagccgacattgttgtcgaaagcgcgccctcgctggctccaccaggtgtatggcccctgaatgtcgccggccaacgaacgcatcacatccacgaactcgtattcgtccagccatttgtccacgtaggcacgttcttcgggcaggaatccggcgtgcttctcattggccttggcgttcttgatatcgagcggcgtgtgtgcgatgttgaaatcgccgcataatacagcctgcttgccgccatgtgcggcttcatcacgaagcgcgcccatgcgggccagcatagtgtccagaaaacggtacttctgttccattttggtcggatcatcggtgttgccggcatgtatgtacacggatgccacggtgatcgtatagccctcaggcgttttgagatcggtttcgatccaacgccccgaatccacatcctcgctcagacctggcagaccatatcgcttgtcaagcacttccaagtcggtgagcagcccgactcccgcgcggcctttcacccggcagacctcgttcatggcatggaggttggccggtgcctcgattttgccggcggtggcgtattcgaaaccaaattcatcgaaaatagaatcgacatcgtcctgaggcgcgcgaacctcctgtatgcaccagacatccggcgcatgcttgccggcccaatcctcgatgcccttgcgcttggccgcacgaatgccgttgacgttagacgtggtaatggtgatggtcatgcggccatactattttggcctccctacgaatcgaaccggacatcggcggccgcgatgctcagctttctctaagcctgagtgctagtgttagcaaggttgcaaccgttatacgaaacgaggaatcatgggactgttcggattcggcaagaagaagagcaagaaggaagccgagccggccattgagcctgtcgatgaggacaaggtggccgccgcagaagcgaacgctgccgcaaaggccgagagcgcggagaccgtgctcgccgagccggccagcgaataccagggccgcggcgaagagcgaggcccgtgggatgtcaacgatgaggacgtgcccgattatgacgattatctggatctcggcgcctactatctgcccttcctccagggcatccagctgcgcatcaaggccaaccgcgccacccagcaagtgcttggctccaccatcaccttcggctcctccagcctggagatcgaagcctttgccgcacccaagaccctgggactgtgggatgacgttcgcggtgacctgcttgaagccaacaaggccgcttctgaagtggacggtgtgttcggcaccgaactgaagctgccggtcaatgtcaagggcggcaaaaccgtgaacacgcgcatcgttggtgtggacggcccgcgctggatgctgcgtggcatcttctccggcaaggctgctatcgatccggacagcccggagaccgaggcgctgaacaagttcttcgccgacatcgtcgtcgagcgtggcgaggagcctttggcgccgcgcgatctgatcccgatgcatccgccggtcgcccccgccgagcgcaaggccgcggccgaagccggcgagcagaacggcaaggaacacttcaaggacattccggacaaccagccgaagggtccgctgagccaggaccagcagaccgaagtgaagaccacgctgtctcgcggcccgatgttctccgaagttcgctgatttataggaagagacttggcagacaacaaacgcaccggcctgtccgctctagccgacgccggcaatgaaggcgaggatttctccgtcatcgacgccatcggtggcccgcgtggcgtcatcgaatccatgctgcctggcgtggtgttcgtcgtactgttcgtggccacgagcaatctgaatctcaccattgcggtttcggccgtgttggcggtattgcaggttattgtgcgactgattcagcgccagtcggtaatgggcgcggtctctggtctggtggcggtaggcatctgcctgatttgggcatggcagactcatgaggcccgcaattactacatcttcggattcattaccaatgccggctatgccgcgttgcttgccgtgtcgctgattgcgcgcgtgcccggactgggtttggtcgtcgaattcatccgtagcctgcccaccgagcatttcaaggcatggttccatgactggatggacgacaaggccctgaaacgcgcctatatgattgtcaccggcctgtgggtcggtctgttcctgctgcggctggtggtgcaggtgccgctgtatctgaccaaccatgtagctgcactcggcgtgacccgcctgctcatgggcattccgttctgggcattggcgatttgggtgagttacctcattattgccacgccgatgcaccggcataaggtcgcggctaggaagatacagactgaagtcgctgttgatgccgaacttgaaccgagcgcaaccggaaaggacgatgatgcaagctgaagttcgtatcgaacgatacgccgaccaaggccgctgcgtggcccatatcgacggtcgtgtggtgttcgtccgcttcgccttgcccgacgaactcgtgcgagtcgaacttgacgagccccacgaccgggacgaccggttctggaccggcgaagtcgtcgaggttctcgagccgtccgaagaccgagtcaccccggcatggccacttgccggtcccttggcgatgggcgggggagtgggcggcgcggatctcgtgcacgtctctttgcccggccagctcaagtggaaggccatcaccgtctccgaacagatgagccgactcggccatatcgacgtggccgttcccatcgagcgcatgcccggcgacaaggcagccggcggcctcaattggcgtacccgcatcgaaatgattgccgacgacaacggcatgccatccatgcgccggcgcggcacacacaaccgtgtggccatcgacaccatgccgcttgccacgcgcacgctgctggacgtcgccaagcgcgaacacgtgtgggaaggcggctttgaacccggctcccagattcgtctttccgtgcccgaaccgcgcggcgagatcgtcgataccgcggcagcaggcgacaattacgccgtacttgtggacggcgaactgcgcgccggctcccagctgctcaccgaacaggtgaccatcaacggcacgaccttcgactatcaggttgacgccaacggtttctggcaagtgcatcgccaagcgccgatcgccctcggtacgcacgtgatcaacctggtcaacgggcagctgcagtcagcggcggacgccgtaatctgggatttgtattccggttccggcctgttcaccctgccgctggccacaatgaccggtgaacgcacccgcatgctcagcgttgaaggcgcgcgtgtggccgtcaagaacgcccagcgcaatctgcgcgccatgaacctgaacgacgtggacgcccgcgcgggtgacgtctcgcgcacgctggaccatgtgccggcgcatctggccaagccgaatgtcgtagtgcttgatccgccgcgtgccggtgctcgtgccaaggtctgccgccagattgccgcggccggcgcatccagcgtggtctacatcgcctgtgatcccaccagcctcgcacgcgacaccgcgacactcatcggcgaaggctacgagctcaaagacatccgtgccttcgatatctacccgatgacccaccatgttgagacggtggccctgtttacccgctgacaggtgagcatatgacacgacgaattctcggattgctggcctgcatggcggctgtgttgtccctggccgcctgcacgccggccggtagggcggtcggcgatacccaagacagcatgccggaagtcgcccacgattccacacatcccacggatgtcacagtcggctttgtggggtcgactgacaccgccgcagacgagtccgccatcaatgcgctgtctgatgacaaactcaatgtctactatgcctcgctcgaaacatccgcaagctcggcaaacgcaactgatggtgtatccggtgaaaccgaatcttctgacgccggcactaccagcgaaaacggtgccgatagtatggatgctcatactggcgtcgacaagaatgcggccaccgcacagcagggtgttgccgatttcgtagctcgcgcggtcaaaatcgtggttatcagcggcatcgacgttaccgacgccaaccgggagagctggaaccagacgttgaccaatgcgcgtgaagccggtattccagtcgctctcattgatccaaagcatgcgcccgaagatgaactgctgtacgccgtcatccttcacctcaacaccaacagtgccgattctggcgacactgccgataccaagccaatgactattactgacgccgtgctcaccatcacgcgcgatgaaccccacgaacgcgagatcaaagtcaccgtttcctgagccgaatcaggcccttgaagctgagaaagcaccctgaatcatccctgagccttagtggattgcgaaacaagacgcggtaggctggggaatatgagtgcaacaacagccgtggaaatgcctgaaatcggagcaaccggtcttacctccaaagaagtggtgcagcgtatcgaaagtggccaatcgaatgcggtgaaaacatccacctcgcgttcggttcaagatatcgtgcgagccaacgtattcacgctgttcaacggcatcatcttcgccgcgatggtactggtgctgatcgccggttcctggagggacgcggtgttcggtttcgtcatcatcatcaacacgggcatcggcatcgtcaccgaactcagggccaagcgcacgttggataagctttccatccttgtggcctccgaattcctcgtgcatcgtgacggcagggacgtggaggtgccccacaacgagatcgtgctcgacgacctgctgtggatccgtgccggcgaacaggtgccggccgacgggcagatcatccagacctggggactggaactcgacgaatccatgctcaccggcgaatctcgtaccgtgcgccacaaggtgggggagcaggtgtattccggtgccaccgcggtctccggcatggcattggtcaaggtcaatgcggtcggcagccattcctacgccgccacgctcaccgcgcaggccaaggtatacaagaaaaccgtgtccgacctgaacaagggcatcaacacgattctgaaattcatgaccttcctcgtggtaccgctgtgcattctgctgattctttcgcagattcatacggtcggcggttggggcacggcactctccaccggcgaatggcggcaagccgtggtttccgcggtcgccggcgtagtaggcatgattcccgaaggcttggtgctgctgacttcgctgaacttcgcggtggccgccatgcgtctcgcccgtcacaatacgctggtgcaggagcttgaatccgtggagacactggctcgcgtggacgcgctgaacctcgataaaaccggcacgatcaccgatggcggtatcgccttcaaccggctcgtgatgctcgattccgccaatgcggctgcggaacaggcagccacgcaggccctctacgactgctgcaacgaagagcagcccaacggcaccggccaagccgtactcgccgggctcaaggcccaaggatatggggcaggtgcggttgagtctcgtgtcccgttctcttcggcgcgcaaatggagtgcggtgcgtaaatccggcgagacctggtacatgggagcgccggaggtgattatttctgcgcttgagggtgactattcgtcggtgttgcagcaggttaacgagtatgccaatgacggcaaccgtgtgttgctggttgcgcggtctacagctcccctcagtccgcgaagcggactgagggacgcagttgagggatccaatgtctcggacgacccgcaactggatgtgcaggctgagccggtggcgttggtgttgtgctctgagaagattcgcgaggacgccgagcggacgctcgcttggttccgtgagcagggtgtgcgctgtcgtgtgatttccggtgacaatccagtgaccgtgggtgccatcgcccgcagagtgaaactgacaggcgaccatgagccggtggcgatggacgcgcgcgaactgcccgaggacgtgaacgaactggcccgcgtgctcgaaaacgtcgatgtgctcggccgcgtgctgcctgaccagaagaaggccatcgtgcaggcgttgcacacgcagaaccacgtggtggccatgaccggcgatggcgtcaacgacgcgctcgccatcaaggaggcggacctcggcatcgccatgggcaacgcggcacccgccaccaaagccgtggcccaggtggtgctggtggattccaagttctcgcacctgccggacgtcgtggcgcggggccgtcaggtcatggccaatatggagcgcgtggccagcctgttcctcgtcaaaaccgtgtactccgcgctgatctcgctcggtgtagtgctgacgcaaatcccatacccatacctgccgcgccatatcacctatatcggcgctctcaccatcggcatgcccgcgttcatcctggcgctcgcgccgaacacgcgccgctatattccgggattcctcaagcgcgtggtcacgttcgcgctgccgggcggcatcgccactgcgcagtcggtgctgctggtcgcttgggtgctgccgccggtcatgggctggaacgtgaccggcgatgccgcggacctgtccgccctgcgcgccaccagcgccatcatcctgttcgcgatgggcgtgttcgtgctggcccgcgtggccagaccactcaacggttggcgtggcgtgctggtggcggtgttcgcggcggcgggcgtgatcggcgcgttcgtcccgttcgtggcgaacttcttcgccctgattctgccgaccggcgccacgatggtggccacgctgatcgcgttggccggttccgcgctgatcttcgcgctgtgcctgtggctggcgccgttcgtgcgcggactgacgggcaagctctcgcgtcggcattgagacggcggcgcgattgtctcatacttcaagccgacacgccagagcctcggtaacgtgcccgtaccatgtgtagcggataatcagcggcatcataagccgattcatgatttcggaggaagcatgtccttacgcgacgaccagctggctaccctcaaggcagccggcaaggacttcgattactacaacatcgccaatctcgacggcatcgatcatctgccgtactcgctgaaggtactggtcgagaatctggtgcgcaacatcgacggtgccaacatcaccgacgagcacgtcaagaccctgctcgactgggatccgaacgccgaacccagccacgaaatccagttcacgccgtcccgcgtgatcatgcaggacttcaccggcgtgccctgcatcgtggacctcgccaccatgcgtgacgcggtcaaggacctcggcggcgacccggaggtcatcaacccgcaggtccagtccgatatggtcatcgaccactccgtgcagatcgacaagtacggcatcgccgacgcggtccagcaaaacatggacatcgaataccagcgcaacggcgaacgctaccagttcctgcgctggggtcagcaggcattcaagaacttccgcgtggtgccgccgggaaccggcattatccaccaggtcaacatcgaatacttggccaaggtggtcatgagcaaggccgaggccaacggcaacacgctcgcctacctcgactcctgcgtgggcaccgactcgcacaccaccaccgaaaatggtctgggcgtgctcggctggggcgtcggcggcattgaagccgaggccgccatgctcggccagccgatctccatgctcgtgccgcgcgtggtcggcttcaagctcaccggctccatcccggagggcgttaccgccaccgatgtggtcctgaccatcaccgacatgctccgcaagcacggcgtggtcggtaagttcgtggaattctacggcgaaggcatcgcctccgtgccgctggccaaccgcgccaccatcggcaacatgggccccgagttcggctccacctgcggcatcttcccgattgaccatgtcacgctcgactacctgcgcctgaccggccgctccgaagagcaggtcgccctggtcgaagcctacgccaaggccaacaagctgtggggcgacgcttccgacccggattacgtggaaccgcagtactccgaatacgaggaactcgacctcggtaccgtggtgccgtccatcgctggcccgaagcgcccgcaggaccgcattctgctgtccgaagccaagagcatgttcgagaagaccgcccccgcctacgagaccgagaagaccgtcaaggatccggtggccgtgtccaccgacttccgtggcgatttcgacatcgaaaacggcgacgtggccatcgcctcgatcacctcatgcaccaacacctccaacccgtccgtgatgatcgccgccggcctgatcgcccgcaacgcacatgccaggggccttaagcccaagccctgggtcaagacctcgctggctcccggctcgcaggtcgtggccgactacctcaaggccgcggggctgcaggacgacctcgatgcactcggctaccagcttgtcggcttcggctgcgccacctgcatcggcaactccggcccgctgctgcccgagatttccgaggcgatcaacgccaacgacctgaccgtcaccgccgtgctttccggcaaccgcaacttcgaaggccgcatcagcccggacgtcaagatgaactacctggcctccccgccgctggtcatcgcctacgcgctcgccggcacgatggacttcgacttcgagaaccagccgctcggcaccgacgcggacggcaacgacgtgtacttgaaggacatctggcccaccaatgccgaggtcgccgccgtggtcgacggcagcgtgagccgcgagatgttcctcaaggactacgcctccgtgttcgacggcgaccaccgctggaagggcctcgacgtgccggaaggcgagctgttcgcgtggaacgacaagtccacctatgtgcgcaagcagaccttcttcgacggcatgaaggccacgccggacccggtcgccgatatccacggcgcccgtgtgctggccctcctgggcgactcggtcaccaccgaccacatctccccggcaggcgcgttcaaggcctccagcccggccggcaagtacctgaccgagcgcggcgtggagccgaagaacttcaactcttacggttctcgccgaggcaaccacgagatcatggtgcgcggcacgttcggcaacatccgtctgcgcaaccagctgctcgcctccgtgggcgaggaggtgacgcctggcggcttcacctacgacttcctcgccaagaagccgaccacgatcttcgaagcctcccgcgactacatcgacaacaaggtgccgctcgtggtgctcgccggcaaggaatacggcaccggctcctcgcgcgactgggccgccaagggcacggtgatgctcggcgtcaaggccgtgatcaccgaaagcttcgagcgcatccaccgctccaacctgatcggcatgggcgtgctgccgctgcagttcccggcaggcgaatcctatgagtccctgggcctcaacggcaccgagacctacgatatcgccggcgtcgagaagctcaacgagggcgtgacccccaagacggtccacgtcaccgccacccacgaggacggctccaagaccgagttcgacgcggtggtccgcatcgacacgcccggtgaggccgactactaccgtaatggcggcatcctccagtacgtgctgcgcaacctcatgaagtaaccaccttcttggctcccctctcttgaggggagctgtcagcgaagctgactgaggggagcaaggccggtatccgccaacggataccggccttttccacgcatgccaaaatgctatactgtatagcatcttcgaaatggaggttgccatgaccatggtccaaatgaacgttcgcattgatgcgaaactgaagaacgaggtcgaagaagtcctcaagggcaaaggcgtatcggtgagtgacgtaatccggtcgctgtggttatacatcgccgaccgcaaggaagtgccggcattggaaacgaccgccgaagagcaagcccgcgaggaggaaaagcagcgcaagctgaaactgattcgagaaggtgccggatacgtgcacaaggaactggtcaaggccggactgatctcagaagacaccgacctcatggaaggccttacctacaagcagttccgcgacaaaatgtacgacgagcaacttgatgcgtattacaacatgaagagggccgattgatgaccgacgtttccatgcagcgtattttgctcgataccaacgtactgttggactatttgctccatcgcgatgatcacgccaagatggcggaagcggttatggaacttggcgcgaagaacaacgttacgttgttgtgcgcgtcactgtcgctgaaggatatcgcatacctatcatcatcggcgattcgtagcgaattcaaaccgaatgaatcggaagtggagaatttcactcgcggctttctgtcgtcacgggtgccatggcgttgtatcgagcaggtgaaggagatgtgtgacatcgtcgctgtcgatgagtcgacatgtgatagggctttttccctgcaaaaacggcatcgggattttgaagatgatctgatcatcgttgccgcgcaacaatccggtgccaactgtgtggtcacatcggatgccgaattaatcagtcattttcccgaatattgcaaaacaccggctgaaatcgtggcggcgctggaataaatgagcgtgtggctcccctcacggaggggagccaccaatgatgtgccggctactgtagcctactgcgcctgtagacggaactgcttccagatgtcgctgagcttctgaccgttgcgcgtgcgcttccacacgtccagaccaccgccgcgacgtcctccggcggcggcacgggccgcggcggtcggagtcggatattcggagccgtcatccagacggagacgaccgttttcggtgaccgtggcgaaccagcgctcgcccttgcgcggccgctcccacaccagacgctcgcccggcaccagcagaccagcgtcaatcacctgccggatcgtgacgcgccgcgaactatgagacggccgtggagaggtcttcgacaactcatcgacattctgcttggtcagatcacgggcgtccttgtcataccggatgccccagtattccacgatgagtcggaccgactcttcctgccgcgcctccagcagggcaggtgtgcagtcagcgaaatccttcaactgattggtcagcgggaaacgacgtgaatccgcgcgcaacagcatgcggtcgcgacgtgccggatattcactcaacctgtccaactgatcctcagggccctgcaccagcgccatattgccgagtcggtacatccagaaatcatgctgatcctgcggccagtccgcaaacgatttcgaccgttcgatatccaacggcataatcggcagcgcactgaaccggcgtggtcgatccaactgcatgccggccttctgctcgttggcgcgaatcagcagcagacggaccaaatcgccgtcaccctgcatctcgccatgcaaacggaccaatgcgccttcacggtcgccgtccgagacatgcaacccgttcacgcgctggaccaaatagcccttgtcaagatcacggatggcggcgttcgcataaccgcgccgctccaacgctccagtgcgattcagcgtacggatgcccgtcacctgttccaatgcggtcagaatttccaacagccgacgctcgtcatgggcacccaacgattccagcgtggccgtggttctgtcggtacgcgaggcacgaaccacgaacggcgacaaatcggcgtcgcccagcccgcgatacgaattgaccaacgcccacatggccacgggcttccactcgtggctgcggtaatcgtccaatccctcaagccggctacgcacctcggcgggcagtacggtatcgctggggcgcgcgatgatccgccacgccatcgcgtagggtgccagcacctggttgatgaacgtgggcaccgtgcctttgtcgatgtacggttgcagcacgtcggccaggaaatcctcgatgagcttgtcggtggccggcttgtgcgtgagcacgagatgcagataggcgaagaattcctcacagtcatgcggatcgtcgccgatcgggtcaatgatgtcatcccaacgggctgcgtacacgtcaagttcggcggtcgacaggctggccgtggcgcgcgccttgaacacgtcggacggggtgagcggcaggccgcgcatgttcatcacgtcgaagatgcgatgcgcgccgtcgagatcgtcggtggtcacgatgacgagcgtcacctcgttgaccagatactgcgcgaagtgctggcgttcggatgccgaccaattggagatctcgtcgtacgtcttgcggatgttggcgacgatgttgcgttgcgcagcggtcgccagatcgtcgtcgttcatgtcgaacacggattcgaggttgtcctcctgcacatgttcgcggaagaacgccgcgtcgcgctcgcgcaacgtgaggcgaggctcggtgacgatgccgcgcagcttgtcgccgggctccaccagcagcgcgtcgagttggcacatgaggtccgggtctcgctccagatcgcgcaacacggcgatgatgatcgacagggataccagccgctgctgcccgtcgatcacgtcataacggttatcgccctcgcgcaccagaatcagcgagccgaggaaatacggggtaccgggtgacttgcaggcgtcatccaagtcgcttaccagttgcaggatgttctcggccttccatatgtaggcccgctggaatgaggggattgtgaaccggaaatccggggtgaacactttcccgagtggtagttccttcgcgctgattgccatgtcaatcccttcgtcgccggcctctggacggtatgccgacgtgccgactgtgctcaagcctaccagtgttcgcccggcggcgggcgcatcacgccggctcgggcaccgacccctcgtacaagtagaacgaagacgggttttctcccggcccggatgcgggcagtgactgctcgcacacctgcgtcaggccgcgatgtacatagaatccgacatcgcacgtggtatccgtgaataggaagtactgacgtatgccggctgcgtggaatgcgctcatcatcgtctcgaacatgcgccggcccagaccgtgaccgcgcgccgccggatcaagtacgaacagcaccacttcagccgaatactcatggccaatgttcgccgcctgcttacgcagttgcctatcgacatgaagagtcccgagaatctcgctcgcagctgccatgccgtcgtgggcaaacgccagttgcaatagcttgcgcaacgaatgacgccggtgcatgttcagcgggctgcgatggtcgagctcgtcgatacgccccacaatcaatgcgacgggtttatcttccagctccgcgacaaaggccgtggtcacacgtgccagacagttctcccaatcggcctcggctgccagcaagccggtccgctcatcatattcggcgtaccaagtgcggcgcaccaggtcgatcagcgccggataatcgtctttacgtaacgttcgaataatcgcttcactcatgttctccattatgactgatatggctcgataacccgacgtgttacagtcgcgccggcaaatcggcccgctccaccagcctcgccatctgtacgcggcccatattgagcttgtccgccgcggaggagagatgcgccttggccgtacgctccgagataaacatacgggaggcgatttcggcgttgggctatgtgctgcaagacgattcgccgattacggtgcatgccacgcgcatggtggaaacgcccgttacgctttgcgatgagcagaacgagccgatcgatcctattcatggaatgttcagctttgttcctctaagattggtactggaacaaacgctaaaggagcgattatgacattcggtcagcagccccagaacaacgggcaatacaacccgcaatacaacacgcctgattacaacgccgcccaacagtctggatatggccagcaatacgcacagtccggttacggccagaactactatgcccagccgcagggtgcccccacctaccagtacgcgccgcaggatgcggccggtgccggcgcgggtgccgccaccatcaacacgacgatgacctacaactacgaggaggcccgccgcgtctccgtagccaaggtgtacggcgagatgaccatcggcatcctcgtcaccgccgtggtcgccgtgctcggccagatcaccggagcctactacagcttcctcatggccaccggcatggtgggcctcatcggcctgtgcgtggtgcagattgccctggccgtggtgctcggcatgcgcgtcaccaagatgaagtcggccactgcgcgcgtcatgttctatgtgtacgccgcattgatgggcttcaccttgagctcgatcttcatggtctacgacctcggctcgatcggcgtggcgctcggtgtcaccgcagcgttcttcttcgcgctgaccatgttcggcatgactaccaagttcgacatgctcaaggccggcccgatcctgatgatcggcctgatcgtgctcatcatctcgcagatcgtgctcgccttcgtgcaggtcgacggcatgaccaagatcgtctgcgccatcggcctgatcctgttcgccggcatggccatctacgacgcgcagtccacgcgcgcgctgctgaccgaatacgaggcccagggcccggaaatggtcaagaagatctccatcctgtgtgccctgaacctgtacctcgacttcgtgaacatgttcctgtacatcctgcagctgctcggcaacagggactagcctcgccagccgattggtgggcggcatgtagcctgctcgtcaaacgtcacagcccgaccacattgtggccgggctttttcatgtctgtcacattcgcacgttaggctgtctccccgtgaaaagacaagaactcgtaggcatgctgagcctgttgttgaccgcgctgatctggggttttgcgttcgtggcgcaggtccagggcatggatttgatgtcgccgatgttcttcaacgccacgcgcttcacgctgggagcactgtctttggtgccgattctgctgtggcagcgtggccgggggagcgcagataagggcgatacagccggggtcgatgtcgttgggaccgaggcccctagggccgtctccacagatgccgcatcgaacggtgcatccgacgtcgttaccatcaccggtgccaagctgaatgcgaacaagcccgattcggccgtggcgcgattgctcgccaacccggtggtcatttccgtgatctgcggcatcgtgctgttcaccgccagcaccctgcagcagtatggcattctgtacggcaaatcggccggccgcgcgggattcctgaccgccatgtacatcgtgatggtgccgttgctggcctgcgtgttcctgcgccggcgcatcggcatgctggtgttcgtggccgtggtgctgtccatcgccggcttctatctgctgtgcatcaccgatggtttcggttcgatcggcctggcggatatcctgctcgtgttcacggccgtgctgttcgccgtgcatattctggtgatcgatactttgggcggcaccgtggacgccatcaagctttcattcggccagttctgcaccaccgccgtgctgagctgggcgggttcgctgatcgaaggctcggtcgactgggccggcgctgctcattcctggattccgatcctgtacgccggcatcggctcggtgggcatcgcgtacaccttgcaggtggtcggccagcaatgggtgccaccgacgcgagccagcctgctgatgagcctcgaatcgttcttctcggcggtaggcggtgcgttgcttctcggtgaagtgatgaccccgcgcggttacctcggctgcgccctcatcttcctcggcaccctgctggcccaagcgccggccaggctgccgaagtggctgcaacggtgaatgaatcggccgcaggccgattccatagcacctcagtccgaggttttaggcgcttcacccacttgcggcgcgccgttgatgtcgcggtggatgttctgcatttgcacttcgatgttctgcagcgaacgggcgcagtcgagcagtgtctgtgaatgctcgctgagcttgttgtccggcaaatcggtcttgtagcgcagcgcatgctccagcgacgcccaataatccatggcgatggtacggaactgcacctccaccggcgtgtaatgcgcgcccgaggagagaaacacgggcaccgcgtagattacgtgcaatgaacgatacccgttctgtttcgggttcttgatgtagtccttgacgcgcagcacctgaatatcggactgcgacgacagatagttggacacggaatacacgtcgtcgcggtaattacagatcacgcggatgccggccacatcgaacagattgtccttaatcgaattgacactgattggcagattcttgcgctccagcttgccaatgatcgaactcaccgacttcagacggcgttccatatgatgtatcgggtcatggctgaaccgcacctggaactcgtcgtcgagaatctccagcttggtgctgatctcgtacatcgcgccttcatacacctgcatgaggtcaacgaatttaacgacctgttcgggagtgaaggtgcctcccggaagatccaacgctttgagacgggcctgtagatcggaggttttgagtcggctatgtcggtcaagtatcacgtccaccaatatactcggcggattccagacaatctggatgttcgcggggaatctttccaagaacccatatttaggatcgtgacaaccaatggcatacgtgaccggagcatgacgaaccccgccgatagaatcggtcgttatgaatgaagacatgatgaccgaggcggagcgtgcctcgattgcagccgatggaaccgatagcttgctgggggagcgcggcaagggcgtattccatatccacacgctcggctgccagatgaacgtgcacgattccgagcgcatcgccggcgtgctggaggccaatggctacgtccctgcaaccgaggaccagatcaatgacaatgacctcgatctgctggtgctcaatacctgtgcggtacgcgagaacgcagccgaacgcatgtatggcaccatcggccgattcaatcgcgtcaaactggttcggccgaacctgcagatcgccgttggcggctgcatggcccagcttgaccgcaagaagatcgcggatactgcgccatgggtttccgcggtgttcggtaccaagaacatcgaagatctgcccaagctattggatcagaatcgtgcgaccggcaaggcgcaggtccaggtcactgaacaattgcggcagttcccgagccagcttcccgccgcccgcgcctcccgcatcagctcgtgggtggcgatttccgtgggctgcaataacacctgcacgttctgtattgtgcccaccacgcgaggcaaggaaaaggaccgccgccccggtgacattcttgatgagatccgccaatgtgtggccgatggtgccaaggaggtcacgctcctcggccagaacgtgaactcgtttggttatggtattggcgatcgatacgctttcagcaagctgttgcgcgcctgcggaaccatcgacggtctcgaacgtgtgcgcttcacttcgccgcacccggccgccttcaccgatgatgtgattgcagccatggccgaaacgccgaatatcatgcatcaactgcacttcccgctgcagtccggttccgaccgcatcctgcgcgcgatgcgccgctcctacaggtccgccaagttcctcgatatcctcggtcgtatccgcgaggccatgcccgacgcccaaatttccaccgatatcatcgttggattccccggcgaaaccgaggaggacttccagcagaccatggacgtggtgcgccaggcgcgcttctcctcggcgttcacgttcatctactcgccacgccccggcacgccggccgccgcaatggaacagattccgcgcgacgtggtgcaggaccggttcgaccgactggtggcgttgcaggagcagatcaccgaagagaacctcgccacattcgagggccgcgacgtcgaagtgatgatcaccggcaaactcggcaagaaggacaccgacacccaccgtgtcaccggccgcgagaaaaccggcgtgctggtgcacatcggcgtgcctgaaggcgaaccggtacctgaaatcggcgatttcgtcacggtcaccgtcacacacgccggccgccataatctgcttgccgaccccgatgtggccgctggacagacctattccgtgcgacactgagggggcgtatatgacgcaacgagtcgtctccatcgtcggtcccaccgcgtcaggcaagacggggttgggcatcgccatcgcccggcgtctggccgaagcgggggagcgggccgaaatcgtgaacgcggacgcctaccagatgtaccgtggcatggatatcggcaccgccaaacccaccgccgaagaacaggcggccgtgccgcatcatctcatcgacatcatcgaccccgaagacacgatgagcgtggcccgattccagcagcttgcgcgcgagaccatcgccgacctgcaatcacgtggcatccggccgattctcgtcggcggctccggcttgtacgccagagcggccatcgatgacatcaccttccccggcaccgatcccgacgtgcgcacacgtcttgaggaacgcgagaaaaccgagggtgccggtgctttgttcgacgagctgcgggccaaagaccccgaggccgccgcgcgcatggacccacgcaacccacgccgcaccatccgtgcgctggaagtcatcgagcttaccggcaaaccgtattcggccagcctgccgcgctaccggtacgtgattccgtccgtacagatcggactcgacctggaccgcccggatttggaccatcgcatcgacctgcgcaccaagcagatgtatgacgatggattcatcgaagaagtcgaacggctgcgcccgcatctgggtgccaccgccgtacgcgcgctcggctatcagcagatcatcgacctgctggacggtatctgggatgtgaacgacgccttcacggacatcgcacagaaaaccaagcgactcgcccgcaaacagatgggatggttcggccgtgacccgcgcatccactggctgcaggccctgaacccgaaactggtcgacaacgcgatggccattatcgcgcacgccgacgccggcgactacgacccgatcgacgcccgagccgacgaatacacccagcatcatctgggcgatatcacggcgtaggaatcagccaaaggccggtgcaatcacccgcaatcagtgtgcaggcccctgattccagccggcgatcaagaacacgcgcgtcggattcgccgggcgtagtatcgcgtcgaacatcgtctccagtgcagacgtgtcgccccgatatgccgagtgcttggcggagcgatactcctcgcgcgtcactgagccccagtcgagatcccagccggcgtcatgcgccaagcgtgaaccgaatatacgcagcaccatcgcattgccgccacggaacggatgcagataaccgagctcatcataaatagaagcgaacgcgtgaacgaacacgtcgcgatccaacgcatgcaggttgcgcttgtccgccaactccatcgcgatgttgtgcgcgccggtctcaatgagcccagccgggaagaacgcctccggattcgcggcccgagcccggtcgttcgtcacctcgcgtgtggtgtttgaggtacgcaacttgcccgcatcctcgaacacgccttcgaacagccccttatgaatggcggtcaactcgtccaagtcgccagacggattccaccgacgttccgccaacaatacggtacgtgcgaacaccgcatccgcgcgatccgtggcatgatcatccagactgccggcagccagacgatcctttccggcagggtcggcggcggcgcgcagacgcatggcggtctgctcgtccgccacgtcgatgagatgggtcacgggctccaagccacgttcgtaggcaaccgcggcgcgcatcgttgcctcgcccggcgtcatcgcttccagtgcgcagttcttgagtgcaaatgcgactgcgctcgcacgctctgcgggtgtcatgcaacccatgataaggcatattcgcgctccagcggggaatcgactcggacgaacctcgacgaaccgcggcgaatcggctgtcgggattcgtcaatcgaccatatcgtcacggtgtcgtcaccaaccatgcacccccgtactagtagaatcagacccgatatggcacgaacagcatcctccaacagcaccaaaccccgtaaatccaaagacaacgggtctacccatgatggcgaaaccaaggtccagcccgagcttgacctcgaacctgagccgttgtggaagaagatcctgctcgcgattccgcgcgcgttcggctccggcgtacgcgccgtcaccggcgtcggcgaatacgacccagcctaccgtcgtgacggtttgtgcttcctgctgctcgtgctcgccgtactgttctgcgcgtccgaatggttccgtgtcagcggtccattcggccagctgcttcacgccatcgcggccggtgtgcttggtctgatgagcgtcgtgctgccggtgttgctcgccgccgtggccttccgactcatgcgcaattccggtaaagggtccaataacccgcgtgtggtcaccggttgggtgctgctcatgtggtcgatttgttcgatcatcgacgtggcgatcgccgccgaccacaccggattcgacatcacgattctgcaatccgccggcggcctgttcggcttcttcctcggctcaccgctcgcctggggcctttccaacgtgttcgccatcatcattttcgtggtcgtcggcctgttctccttgctgatgattaccggcacccacgtcaccgatttgccggaggatgcgcgcaaaatcgcagctaaaatccaacgcaaaccgtatgtgccgatgggccaggagacggatgggagcgccagccagttccccaacgaggtccgtgtgggagataccacactcgcctttgccgacggtgttccctcgcatgacggcaacgacgacggcaacgacaacgatcaggccggcgatgcacggcccagcctgttcgcacgactgttcggccgcaaatccaagaccgaagacgacaaaacccttgacaagtatgctgccgacgatccgttcgaccgtgccgccagccagcatggtgccaccgccgaaaccccggtggtcgatccgatgaccggcgagattaccggtgcgcgaaccattgcatcgtcttcgtgcgacggtcgtccgcacctatccagccctgcgcctgctgccgatgcggatgatggcgacgcttcccgaacccgcgtcatcaccagtggccagaccatcgccatgcccggtgggggagcggtagacgatccgtgggcacccagtgccgcccaggccggtactgtcgcgctcgcaggggcagccggggcgatgggagcggccggggccgccggtgccgcggccgcggcagccgcgaccggagcctacgcaggcgccgatgcggatggcagcggagtcggccagggcgtgcccaatacggacggacagccgaatgccgccgccggcaacggtacagacgacgacgccaataggccgtatcagttgcccgacctgaacctgctgaccaaaggtcagccccatgcgatgcgcaccccggccaacgatcgcgtgatccgggcactgacttccaccttcgaacagttcaacgtggacgccaaagtcgtcggcttcctgcgtggcccttcggtcacccaatatgaggtcgagcttggccccggcgtcaaggtggagaaagtcaccaacctgcagcgcaacatcgcctacgcggtggccagttcggatgtgcgcatcctttcaccgattcccggcaagtccgccatcggcatcgaaatcccgaacgaggatcgcgaaatcgtgcacttgggcgacgtattgcgctccgacaaggccgtgggcgacccgaacccgatgctctccggcatcggcaaggacgtcgaaggccacttcgtgaccgctgacctgaccaagatgccgcacctgctggtggcaggtgccaccggttccggtaagtcgagttttatcaactcgatgctcacttcgatcatcatgcgtgccacgcccgaacaggtgcgtctgatcatggtggatcccaagcgcgtggaactgtccgcctacgcaggcatcccgcacctgctgaccccgatcatcaccgatccgaagaaggccgcacaggccctcgaatgggtggtcaaggagatggatgcacgctactccgacctcgaattcttcggattccgccacgtcaaggacttcaacgaggccgtgcgcgccggcaaggtacatgcgcccgccggctcccagcgcaaggtggccccctatccgtacatcctcgtggtggtcgacgagatggccgaccttatgatggtggccaagaacgatgtggaaagctccatccagcgcatcacccagctggcacgagccgccggtgtgcatctggtgctcgccacccagcgtccgtccgtggacgtggtcaccggtctgatcaaggccaacattccatcccgactggcgttcgccacctcgtccgccaccgattcgcgagtcattctcgacacggtcggtgccgagaccctgattggtcagggcgatgcgctgttcctgccgatgggttccgccaagccgattcgtgtgcagggctcgtgggtgtccgaatccgagattcgcaaggccgtggagttcgtacgcacccagcgcaagccgaagtaccgcgaagacatcgaacagatggccaaggaagctgagaagaaagacagtatggagcctgacgaggagatcggcgacgacatggacgtgctgctgcaggccgccgaactcgtggtcactagccagttcggttccacctccatgctgcagcgcaagctcagggtcggcttcgccaaggccggccgactcatggacttgctcgaatcgcgcggcgtggtcgggccgtccgaaggctcgaaggcccgcgaggtgcttgttcagccgcaggacctgccgcaggtgctcgccttcatccgaggcgaaaccagctcgctcgaagccagcgccccgcaacaacccgaactcggcgaataattcacccatcgacctccctctgatgagggaggtgcccgaaggggcggagggagagaagcgcggacagcatcagcacgaaacctgattcccgaataatagcagtcaatatccagccaccactcactcaaggtaggagtatgggggtaacgtgaacactatggatgagaacacaatggacaagcagtcatcgcccaaatcatcgctgttcgacggatggaacgcgccgccgaacctggtcacctactcgcgcatcgtactcgtggtgattttcctgacgctcgacattctcgccggggcctggggtgagaacaacctgatcatgcgttgggtcgccgcggtactgttcatcatcgccgcgtccaccgataaaatcgacggttggatggcccgcaaatacaatcaggtcaccgaaatgggcaagctcatggatccgatcgcggacaagctgctcacttgcggcgcaatgattgtatgctccgcgttcggcgagctcggctggtgggtgaccatcctgttcctgattcgcgaaatcggcatcaccgttatgcgcttcttcgtcatggagcgtccgggcggcaaggtcatcgccgccgcatggcccggcaagctcaagaccgtattccagtgcgtgggtctgtccatgctgctgctgccgttctggtcattgggtaacggacaggccacgccgttctggatgaccgcttactacttcctgacctacgccatcatctacgtggcattggtcctgtgcctctactcgggtgccgtgtacctgtacaacacgttcgtcgccccgaagcggaagtgacggatattccaatgcaggaattgtgcgacagtctcgcggccggcatcctcaagatctgcgaggcgaacaatacgaaaatctcctgcgctgaatccctgaccggtggcctgctcgccgatgcgttcgtgcgtattcccggtgcctccaacgtgttgctgggctccgctgtcacctacgacatcaatgccaaggcctcgatcctacacgtggacaaggccctattggatcgagaaggcgccgtacaccccgaagtcgcccggcagatggccatcggtgccgctcgcctatacagccagccggaatacggcgaccgaatcatcggcctttccaccaccggcgtggccggccccggtccggacggtgataagccggccggactggtgtatgtgggcctgcgcatccccgcaagcctcaccgcggaccatgtcgaagtgctcaaagccgtcgaactccatcttgatggcatgcgcgaagaggttcgtcgcctcaccgtattccacgttctgcaaaacttgagtctattcacagcaagttttaaggaataaaaccgcgggaccgtcgtgttgtacatagtggaaacactgaaccgaccttggaaggggcgatggcgatggaaacgatgacccgagtgaacgaacagatggatgtggccgccaagaagccgatggctgtgcagccgggtgtcgcccgtatgcgtgaactgactccggcccagcgccgtgcggtgatgttcgcccagcagcaggtgctcaaggcgcaggctgccaagaaggccaaggatcagcgtcaagccgttcgtgaacgtatgtgggatgaggattcgccgtcgtacaagccgactgccgccgccgagtccgtggtggttgaggaggagcctcgcgaggtttcgctgcgtggtgctatcggctacgtgctgcgcgaactgcgtacgcgcgatcgccgcacgttgcgtgaggtctccgagaaggcgggcgtttcgctgggctatctttccgaagtcgaacgtgggcagaaggaagccagctccgaactgctgagctccatcgccgatgcgctcggagtctccacttcgcgcatgctgcgcatggtggccgattatctcgactcggtcgagggctgatcggttggcggtgtgaagccgcatcccgtaatctatgtctagctgtgaacccgtatcgcttgtggcgatgcgggtttttgctgtcctgcgggtggtggcacactggcgtgtatgcgtgaacgggaattctgggaattacttgaagaggtgttcggtcggacctacggtcgttcgttgtcgcgtgatcaacggatgtccaaattggcgaatatgaccgtggtcgaggcgctggacgcgggggaggagccacgcgtggtctggaatgtgctctgtgaccaaatggaggttccggactccaagcgttggggccacgatcataacgcgccgcccatgcccgccgtctgacactgcgggattacggagtcgctgaatcgtgaaattggcgatttcggcgtgttgcacgccaaattcgaacaaatgttcgtgtgtgtggttatagttattcacagtgacaagaagccgcatacgtgtgcacagggtgcttgtcatccgccataagccttaccgcagtaggtcttagggaggtcagatggccgagctcgggcaagctggaaccacaatggttggtttggattgcctcacatggcatgtccgtcatacggtggaggcatccgattcgcgcacgacttcgacaaggagaagatcatggcacttgagaccaagccggccaaggacccggcagccgaggacaagcacgagctcgatcccaagcgcaaggcggcgctggacaccgcgctggcgcaggttgagaagagctttggcaaaggttccgcaatgcgactgggcgaccagcccgagcagaacgtcgaggtgattcccaccggttcgttggccctcgatatggcgctcggcatcggcggcctgcccaagggccgcatcgtggagatctacggccccgaatcatccggtaagaccacgctcgcattgcatgtggtggccaatgcccagaagaagggcggcgtggcggcctacatcgatgccgaacacgcactcgacccggcctacgcccgcaagctcggcgtggacaccgactcactcatcgtctcccagccggataacggcgagcaggccctcgaaatcgccgacatgctgattcgctccggtgcacttgacgtcatcgtcatcgactcggtcgccgccctagtgccgaaggccgaaatcgaaggcgaaatgggagacagccatgttggtttgcaggcccgactcatgagccaggcgctgcgcaagatgaccggcgcgttggctcaggccggcaccaccgccatcttcatcaaccagctgcgtgaaaagatcggcgtgttcttcggcaatcccgaaaccaccaccggcggcaaggccctgaagttctatgcctctgtgcgtctcgacattcgtcgtattcaaaccctgaagaatggcgacgaagcggtgggcaaccgcacgcgcgtcaaggtggtcaagaacaagatggccccgcctttcaagtccgccgaattcgacatgctctacggtgaaggcatttcccgtgagggctcggtaatcgacatggctcagcaggttggcgtggtcaagaagtccggttcgtggttcacctatgagggtgatcagctcggtcagggacgcgagaaggttcgtcagttccttaaggacaacccggccatcaccgaggagattgagaataaggtcaaggccgagttcggtctgatcggttccgccgaccagttcgcggaagatggcgaagccgcagcagcggccgctgtcagcgaggccgccgctgccgacgtggccaaggacagcaaggccgcagcggcgcctgctgccaaaacgacccgtgccaaggccggcgcagctaaggcctgaacatgattagtgccgaagcgttcttgcggcgcaatcctgttgcgtcgcaagacatgcccattgccgagcagcgtgttcagtcgaaaccgccgggacgtttttctcgacgggggagagacgctgccgttgtcgaagatcccaatgatttggacgcttgccgcgaggctgcattgcgtttgctggacgcggccccgcgtgcatccggcgcgttgcgcgaacgattgctcagcaaaggctatggcgaggcgattgtggacgaggtcattgaacggctgattcgcgtgcaactgattgacgaccgcgcttatgccgaatcggccgtacgctattgtgccggtcgcatgatgggtcgtcgtggtgcggtcctggaacttgctcgcaaaggcgtggaccgcaaactggctgaacaggtgtgtggcgaagctgagcaaaatggcatctttgaagatgccgcatgggaattgggccgccaaatagcccgcaaaacccatggcctcgatcgtcaggtccgtcagcgtcggttttggtccgcaggcggccgcaaaggacacagccccgaaaccctccgccgagtcgccgccgaattgttggtgtagccaagaaaaaaatgagacctcttataccccgggttctgtcgtgccgtgcgcgaacgcacggcacggatggccatccatctcgacctgacgttgccgccaggctctagcagcctacccgatgacacgggcgagcagcccttaccgccatctgcttggccttgctcccgatgaggcttgccatgcgacctactgttaccagaggcccggtggtctcttacaccgccgtttcacccttacccgtcgaggacgggcggtctgttctctgttgcgctatctctcaggtcaccctgggcggacgttatccgccatcgtgctctatggagcccggaagttcctcagccgatcccaatgaagatcacggccgcggccatcaagaggtctcaagcctgcaattatacataaggtgcggaaaaggcggcatcccgccctgcggtgaggccatgacgttgcccagttatcctgttttctccatagttgggcgtagttgggcgattcgtgaacgacgcgccgaatatcggatggggcgtgtcgggcgtgttgtggcgtgtcgtatggagacgaatcaaatctgtaagagcttggtatgtgcgagaaagagcaagaaaacgttgcctatccattgcagtatttaccatgacgaacaaacgagccagcctgataaaccggtatcaaatcttcttataggagactgctgccaaaaccccagtatatacatcgtttcattgcagagaaaagcccggagataaacatatattctctgggcgagtttccggccgttcacccattgttcgtctacaatgaaacatacccggtcggtgatgatgccgttcggaacacatatagcgggttacaccgcttgagttagaggaggtcaacatggaaatcgtcgttaccggacgccacacgcaggtcaagcaaaggttccgtgatgtggtcgagaccaagatgaatcgtgtgaccgctatcgccccggatgctcagcgcgcgcagattgtgctgacccatgagggcaacccgcgtcaggccgataccgccaagcgcgtggaaatcaccgttatcgccggacgtaccgtggtgcgtgcggaggcttccagcaccgatgaattcagcgcgctggacatggcgctggataagttgacgctgcgtctgcgtcgtactcgtgaccgtcgcaaggatcaccgtcgtggttacgcgaacccggtcccggtggatctgggtgttatcgccccggagcccgagccggaggagtcggacgaagagccgaacaacagcccgcaggctgcggtcgcctccgatcttggccctggcgaatccgtggaggtccaggttggggatacgccgattgtcatccgtcgcaagctgcacatcgccgagcctatgagcatcgacgaggcgctgtacgagatggaactgatcggacacgatttcttcctgttcgtgaacaaggagaccggacgcccgtccgtcgtctaccaccgtcacggttggagctacggcgtgttcgaaatcgatactccggagaacgtcaagaaggcctgaagataaggcctgctgacacgatcagctgataccgcatggaccgcttccaatatggaggcggtccattttttcgtaagaaggtcgaaaaattcgactgctgacggtgcgaggcgctattctggtacgcggacaccaccacttatcagtcaagggagaacccagtggtcgatattgttgacaaagccctgcgaatgggtgaaggccaccagctcaagaagctggagaacgtggccaaggccgtgaacgctctggaggatgagatctccgccctctctgacgaggatctgaaggcccaaaccccgaagttcaagcaggaaatcgaaaacggcaagagcctggacgatatcatgcccgaggcgttcgccaccgtgcgcgaggtctccaagcgcacccttggccagcgtcacttcgacgtgcagctcatgggcggtgccgccctacactggggcaacatcgccgaaatgaagaccggtgaaggcaagaccttggtcgccaccctgcccacctatctgaacgccctcgaaggcaagggcgtgcacgtggtcaccgtcaacgactaccttgccagctaccagagcgagctgatgggccgtatctaccgtttcctcggcatgaacgtcggctgcatcatcaccgagcagaagccgccggagcgccgcaagcagtacaacgccgacatcacctacggcaccaacaacgagttcggcttcgactacctgcgtgacaacatggcctgggagaaggccgacctcgtgcagcgtggtcaccactacgccatcgtcgatgaggtcgattccatcctcatcgatgaggcccgtaccccgcttatcatctccggcccggccgaaggcgacgtgacccgctggtaccgtcagttcgccaagctggtgctgaagctcacccgcgacgaggactacgacgtcgacgagaagaagaaggtcgtcggcatcctggacccgggcatcaccaaggtcgaggacttcctcggcatcgacaacctgtatgagccggccaacaccgccctgatcggctacctcaacaacgccatcaaggccaaggaactgttcctgcgtgataaggactacgtcgtcacccaaggcgaggtgctcatcgtcgacgagcacaccggtcgtatcctgccgggccgccgctacaacgagggcctgcaccaggccatcgaagccaaggaaggcgtggaggtcaaggccgagaaccagaccttcgccaccatcaccttgcagaactacttccgtatgtacgacaagctcgcgggcatgaccggtacggccgaaaccgaggccgccgagttcatgaacacctacaagctgggcgtgctgccgatcaagaccaacaagccgatgatccgcaaggaccaggacgacctcatctaccgcaccaagaaggagaagctggccgccatcgtcaaggatgtggccaagcgacacgccaagggccagccggtgctgctcggtaccgcctccgtggaaagctccgaagtggtctccgccctgctcgacgtggcgaagatcccgcaccaggtcctgaacgccaagcagcacgagaaggaagccgccgtggtcgccgtcgccggccgcaagggcgccgtcaccgtggccaccaacatggccggccgtggtaccgacatcatgctcggcggcaacgtcgagttcctcgccgacgccaaactgaagtccgagggctactctccggaggacaccccggaggagtatgagaagcgttggccgggcaccctgaacgagatcaaggcccaggtcaaggacgagcatgaggaggtcaaggagctgggcggcctgtatgtgctcggcaccgaacgccacgagtcccgtcgaatcgacaaccagttgcgcggtcgttccggccgccagggcgatccgggcgagtcccgcttctatctgtcgctggaagacgatttgatgcgtctgttcaacacccagctggtggcccaggtcatggccaagggcatggaggaaggccagccgatcgaggccaagtccgtcaccaagggcgtgcgcaccgcgcagaaggccgtcgaatcccgtaactatgagattcgcaagaacgtgctgaagtacgacgacgtgatgaacaagcagcgcaccgtcatctactccgagcgtcaggccgtgctcaagggcgaagacatccacaaggacatcctgcgtttcatttccgacaccgtcgagtcctacatcaagggtgccaacaagggatccgagaaaccgaaggactgggattgggagggcctgttcaaggcgctcaacaccgtgatccccaccaaggtcgacgaagacgaggtcaggaagatcgtcggcggcctcaagggtgcgaaggccgtcgaggccgtgcgcgacctgatcgtcgaggacgccaggcagcagtacggcgaaatggaggagaccatcggcgagaccggcttgcgcgatctcgaacgccgcgtggtgctcgccgtgctcgaccgcaagtggcgcgagcacctttacgagatggattacctcaaggacggcatcggcctgcgtggcatgggccagcgcgacccgctggtcgaataccagcgcgaaggctaccagatgtacaactccatgatcgaggccattaaggaggagaccgtccagctgctgttccacatcgacatcaagcaggtcgccaccaccgacgaggccgttgacgaggtcgaggagaccgccgaaagcgccgacaccatcgccgtggcctcctgccccgacgagaacggcgagtccgaggtcgaagccgccgaaggcgaggtcgaggaagaggacgaggacgccaagcaggc

SEQ ID NO: 2476 - DNA, 20916 bp, Unknown
  R50_10m  MAG No. k141_18724
accaagaccgccaagaagaacgccactgcgattactgccgcggcaaagggcgtgacggacagcaagaacgctaaggatcaggctaacgctcagcaggcgttgcagagcaagatagccgaggctcagactttgctggacaacagcctgtatgccgtcgacgataattcaacgcgcatgacactggaaagcgacatcgccaacgccaataccgtgctgtcccagcagggcactgacgtaaaggccatgcaggatgccgtcaacacgctgactgcgtccatggatgcagtcaacacgtccatggccaactacagcgcagctgttgaggctcagcaagaagcagcgcggcagaaagctctgaatgattattatgcacgattaaggcagcagcagttgttgcagcagcgacagcaaacacagccagacggtacagacgatccggggacaggtggccaggcggctgatcaggggacgaaaccgaaagatgatccggaaccgaaagatgagtcgaagtagtaagttatcgtgctctagcctaaattgtcaaaggaaccgcgaataacagtagtgcgcatttccaccatttgctgttgcaaaccagctcaatatacgcgtgctttgtgccgctatgccgtcacggattcgcataatcagttgtggagggcacttcgtatgacacggtaaaagtgatctctagggcgttgcataatgcaaggattcggctgataaggcgcagaaatgctgatgccggtccccgatgattgggaaccggcatcatgcgtatgagttcgctcggcgtttgggccgggtttcactcagccttcttacggccgcggcgcttcatggtgcctgcagtggcgttggcggcgtcgaagatcacggtcttgctgtctgggtaggcggtgccgttcacggactgataggagacttcgccttcgggggattccgccaaggtgaagtctccttgcggcgcggaacttgttgtgtacgtgttgatttggctggcttagtagctcttgtgcgcctgccaatacgcgtacgcgccggaaatcgagccataatggccgttgcaataattcacaaaccacttgaactgggtctggtagttggtctgccagtctgcacctgcggaagccatcttgctgcccggcagcgcctgcggcaggccataagcacctgaagacgggttcgtggcggtggggctccagccggattcgtggctgatgatgaagttggcggcggtgaagtcggcctcggagtagccgttggaaatcaggtagtcatgcgcccaggactgaatctcgccggccggcgtggtggtgccgaggctggcggcgctgggcgaagacacggtggcggtgcccaccagaatcaccttatcgaccggagccttcttgacccaggaggtgaacacattggaggaaacgacctgatctccggagcgggttaccagagacgtggtctccagcacgcccttctcgccttcggtctcgaccttctcctggcccttgggcaggctcgaggtctccttgcgcacttcattgaaggcgatttcggtgtcggtggtctccaccgtggtgttggcgcggtggatggaaatgactgtggactcgctgaccttggaatccaggctcggagtcacgctgtcttccggatcgaggacgatatcgccggtttccagcacatccttgacggtggtcatgttggctttttcgccgagaaccacgcgagacttgccattgaccttgactgtcacgtaggtggtgctcttgagcgcgccgcgggatgccgaacgggaagccgcaccatcagtggcggagaatgaggttggggtgatggaaggtgtagcggtgctcgactgatagaagtcgcgggatataacgcctgcagtggcaatgagacccactgcggccacggccgccgcgatcttcgcccactggccccgagacagggttttgacgaatgaggtccgctcagcgtgcttcgacattgcgctccttggttgggtacacactgctttccatcataggacgttgagtggatgaataaaaaaaccgtggtgggtgttcgacccgccacggatggcatatgtagtagttagcagtgcaaggaagcgctatatatgggcttttccgcgcttccgttgccgcagtgtgataaggcttactgctgctcctgcgctgcctgctgtgctttggcggcggccagatccagcgccttggcctgggcgatgaggtcgtccagatcggaggcctgcagcgcgccggcctgctggaagatgacctcgccctgcttggcaatcatcagcgtaggcacagcttgaatgccggcggcctgggccagatcctggttggcgtcgatatccaccttgacgaaggcgatgttcgcgttctccggctcgttggaggccgcctcgaaaatcgggccgaacgcgcggcacgggccgcaccaggtggcccagaagtcaacgaacacgatttcgttgtcggtaatggtcttctcaaactcagctgaagtgatggcggtggtggccattgaagttccttcctcaaacacagtgcttgatgctgtgtaccagtttcccagcaccacccaacatttcggcaaaagcttgtgccccaagctgaatggattgcgggcgcatggaggcgatgaggcgctttgctgagaattcacagacaatttttcggtgaattgtgcccatgttcatcaatgcgcgcgataatgagaccatgccagtcatgaatgatgaagtgcccgacgagggcgattatgatgccggccgtggccgcggcgaattcgacaacatcacgcccgaggacttcatccacgggggcggttccggccacggcaacccgccgggctggctgggaccggccgacatcaaccgggcgcgtcatcagatgcccatcgcatacgtggagatcgtgcccgtgcgcaccgatgagatgggccgcatctcccaggtgggctcgctgctgcgcgtatccgaggacgggtcgatcgaacgcacgctgatcaccggccgtgtgctgtaccacgagacgctgcgcgaggccatcgcccgcaatgtggccaaggatttgggcgatatcgccctgccgctgctgccggtcgggctccagccgttcaccgtggccgaattcttccctacgccgggactgagcgaatactacgatccgcgccagcacgccatcgccctgtgctacatggtgcccatcgccggcgactgcaagccgcaggacgagacgctggacgtggaatgggtggatcccaagagcgacgtaatgaacacgttcgtggcgcagatggtcaacggccacgggcgcatcgtgcgccaggcgctggcctgggccggaatctgacagttgttctgcttcccgctggtgggacgtgaatgtgaaggagtaattcatggcaatcgaattggccaatcatatctatcgcgatggcgaaggcgtgccggtggtgctgatgaacgcctacccggtggaccaccgcatgtgggacgtgtgcgcgaaggcgctcgccgactccgccgacctgaacgatgtgccggacttcccgatttgggcgccggatatggccggctccggcgcatccccggtgccgagcgatgccgattctggcccccgcatggcgaacggcgcgtacagcgaggcgctggatcgcctggccggagcctacgtggacctgatcaaggccgccggctatgagcaggcgatttgggtcgggctgtcgatgggcggctacgtggcgatggacatccagcgcctgtaccccgaaacggtggccggactggccttgtgtgacacgatggccgcgtccgacggcgtgggcggagagaaccgactgaagatggcggacgccgccgaacagacgaactcggtcgaaccggtcatgcacttcgcgcaaccggccgatggcgattccaccgtcaagaagactcctgaattcatcgcgaccatgaccggctggatcaacgaacagaacccggctggtctggcctggcgtcagcgcatgacctatggccggcccgaactgggggcggtgccggaaacgatcagcgcaccgagcctggtggtgtccggcgaactggacccctccagcaatccgagtgtgatgcgtccgctcgccgagcgaatcgccggcgccgaattcatcgacattccggactgcggccatttcagtgccgtcgaacatccggataccgtggcgcgagcactgctctcgctcgtcaggcgcgtgcagaacgcgcagaagaacgcataggagacctcgatgggcactgacattcatttttcgcccctggcgctgacccatgcgctgccgttcctgccgctcgcgcaaggtgacatcgactatcaggtggaccggcgcggtgaacccggtctgatcgacgagctgttggccgagccgaccaccaaagtcgtgcttacgcgcggcggacttgtcgccgtaccgcgcggccaaggcgagctcgtggactatgagaacgtgaaaatgcggctcgccacgttgccgggcgcctatgtgtccgccgaactggcacgctaccccgaaacggtcgccatgttcctcggctcctatgtcggggcgcgcggcgaatccgtggtcgccgtggatatcacgcgcgcgccggaagccggcgttcccggtgttggcgggattgctgatgtttccggtgctgccggcggcgtgctcggcacccaggattccggcaccgtggacggcgcgctgggcaagaacggcatcagcggaggtgctgccgccggaatacggcagccgggagataccaagggcaatggcggcgtagccgcagccaaaatcgccgggccgctcggtgtaccggattcggccggacaaggtgcggacgatgccttcgatgattcggtcggcgcgcccgtacagcccttggccccgaagcccacgctgttgcaacaggccgtgacccggttcgactgggtggacctgcgcggattcgcccctcacgccaacgcgcgcgaggctgggcaagccaccagtgccatcaccttaagcatctggcacagccgccagcggttctgccccacctgtggcgcggcggtccggccggcgctcgccggatgggcgcagcgatgcaccaacgaggcggacggcaaccgtgtgctgttcccacgcgtggagccggcggtcatcaccgccatcgtggacgggcacgaccgtctgctgctgcaacacaacgcggcatggaatgattcgaggctgtattcggtgtccgccggatttgtggaggcgggggagaaccttgaacacgcctgccgccgcgaggccatggaagagaccggcatcaagctcggcgaggtgcggtacctgggctcgcagccgtggccgttcccggcttcgctgatgatggcgttcaaggcacatgcgatcgccaccgacgtgcgtgtggatggcgaggagaccatgaccgcgcgatgggtcacacgcgacgaatacacggccgagctcatcgccggccgtatggcggcgccgggccgcgccaccatcgcccgctacatgattgaggaatggctcggtcgcgagctgtgacggaccgcgaagataggttaagcttatgactatgagtgatgacaacgaaaacgaacagccgctgaacctcgacattcccgaccacctcgaatactccgaggagcatgcttgggtggaccgttcggtcgaccccgcaatcatcggcataaccgaatacgccgccgaccagcttggcgaacttgtgttcgtggatttgcctgagcctggcgcccgtgtggaggccggcgacgagatcgtggagcttgaatcctccaaggccgtccagccgttgatcagccccgtggcgggtacggtcaagtatgtgaaccgtgacgtggcggacgacccgtccgtggtcaacggcgatccgtacggcgaaggctggctgctgaaggtcgagcttgacgacgatgagccggagctgctgagcgccgacgaatacgcgaaggttgtgcggtagttccacccatagctcccctccctgaggggagccagtatgtggcatcaaacctatatgcatcgtgcctcttatggaggggagccaagaaaatgaggcgtatggcctatattggtgtctatgagaagcccacgcgaggattttgaggcggcaggcaagcgactgccttgggatgctgctgctcgcaatgcagcgctgtccgccaccgcgccagtctctgacgtcaaggcatccgccaatggcgccgacaatgccagcaatgccagcagtgctgaacattccgatgacatgcccaccgtgccgattcccgcacgcaaggctgccacgacgttcgacaccccctccaagcgtgagcgcatcgaggtcaagccgccgatcacccgattcatacgtcgtgccatcacccgcgtgttcggcgtatggtcacacatctccactcaggtggtgcgccaatggggctggtatccgcgagtggaaccctatgtgggttatggcaccggcgattactcgcgcctgatctgccgcacggtatacgcccccaagcacgcgcaatccggcgaactgatccgcggcatccgcggcatgcttgccgtatccgcgccgcgcacccacgtgcaggccagcattgatgacacgccgctcaacaccgtgcagatcggcgtctccgaggtctatgacaaggtggaccgcacgcgcgatctcggcagcgaatacgccatctccgattccgccggatacctcgacctcgtggccgagcatcgtctggtgcccggtatccatcgcgtctcctacagcgtggccaaccgcaaacccgtgagcgccaacctgtacaccatccccgccagtgccaaagtcggcatcatctccgatgtggacgacaccatcatgatcacacaggccccggtgccatggaaggccgcgtacaacctgctgttcctcgaccccaagaagaaagcctccgtgccgggcatgagcgtgctgttcacccgcatcgccgacttgttccccggcgcaccgttcttctatctttcgacatcgccctggaatgtggagagttcgattcgcaacttcatcactgaccatggttttcccgaaggcccgctgctgctgcgcgacctcgacccgaggcccaagaccttcgtgcccaccggcccccagcacaaacttgagtttgccgaacaacttatggccgacttcccggacatgaagttcattctggtgggcgatgacgggcagaaggacccgaccacgtacgccaccatcgcccgcagatatcccggacgtgtactggctatcgtcattcgtgagttgagcccgcgcgaatcaaccggattggcgtcggtgacgggactcacctcgacccagccgactccggtaaccgatgtaccagtattcaccggcaccaccggctcgaacattctgaagaccatgctgccgtatctgaagacggtgttgcgataagcgcggcgtgatgaacgccgaatgcgtcccggtgtggtgcctcgcctataatcgcgtgttatgactgacgagagcacaaacgccgcggccgcgatgccgccttacgccaagcgcgagccgaagcgccgcgaattccacggtgacgttttcgaagacgattacgagtggatgcgagacaaagactccgatgatgtgcgcagctacgtagctgccgaaaaccagtactgcgagcgtcgcatggcgcatctggcggatttccggcatacgttgtttgaagagctgaaatcgcatgtggaagagaccgatatgtcggttcccacgcgcgtcaatgattactggtacttcacccgcacgcagcagggcaaacagtatggcgtgcaatgccgcatccccgtgcgcgatgccgatgactgggacccgccggtcgtggatccgcaaggcgcgcccggctccatgcccggtgaacaggtcgtttttgatgcgaacaaggaatccgaggggcatgacttcttccggctcggcggcttggatctgagcaaggacggccgttggatgctgtacggcgtggatgttgcgggagacgaacgatatgatttccgcattcgcgaccttgccgggctggagaccggggagccggtcagcgaactgcccgaacagttcaccggcattggcagcgcatgcttcacgccggacggccaatgggtgttctgggtggaattggacgattcctggcggccgctcgccgtgtggcggcatcgtgttggcacggcggtcgaatcggatgtgtgcgtgtaccgagaaaccgatgaacggttctgggtgggcgtcggcatcagttttgatgagcgcaatatcgtgatcggcaccggttccaaaaccaccaccgaagtgctgatgctgccggtggccacgcctgaaggcgaattccaagccttcattccacgtcagaacgatattgaatatgatgtgagctttgcctgttttgaaggcgcgggggagaacggtgcggatgtgccgctcgccgtggtctaccacaacgccgccaatccgaatttcgaaatcgacgtcattgacatgcgtggccatgagccgccgtaccgactcggcgaaggcgtgtgcatcgccgccgggtcgccgtacggctgtgaacatggtgagccggataagccgattaccgaggcatacttcaacgccgccaatccggcgatattgcagggtgcccacggtctgggcatcgaaggcatcgcgttgcatcgcaactttgtgtccctgagctaccgtgccgacggccagccgcacgtggcatacatgaccaagagcgcggccgccgccgacttcctggccggacggccgtggcggtttacggaactgctgccgcctgccctggaggacgactgggacatggtcgccgccgatcgcgaaaacttcaccggcgatcatggcgaaatcttgtggaccgaagatgaggcccccacggatcacacgtcatcttccgatggtgccagcgacgaccacctgcccggtgagacccggcgcttgtacgccatcggcgtcggcggcaacccctcgtatgaggcgccgcgcatgcgctactcgttcgccagctacacccgcccgggcgagctgcacgaaatcgatcccgccaccggtgaagatgcgctgctgaagcgagccaccgtgttgggcgacttcaatccacgcgattacatggaacgccgtgtgtggattaccgcgcgcgacggcgaacgcattcctgtttccctcgtctggcaccgcgattgcccggcgcaggattcgccgatgttcattaccggatatggtgcatacgagatttcctccgatccggggttctcggtctctcgcctgagcatgttggatcgcggtgtgctgtacgccgtgccgcacattcgcggtggcggcgaaatgggacgcgcctggtatgaacaggggcgcagactgaacaagaagcattcctttgaggacttcgtggacgccacgcgcgcgctgcagaaggcgcatttggctgatgcttggcgcaccgtggccaacggcggatccgctggcggcctgctgatgggcgcgattgccaatatggcacccgaatgctacgccggtgttgaggcggatgtgccgttcgtggacgcgttgacctccattcttgacccggacttgccgttgaccgtcaccgaatgggacgaatggggagacccgttgcatgaccctgaggtgtatcagtacatgaagtcgtacacgccatacgagaatgtgccggtcaccgtgctcgagggcggcgacgacgaggctgccggtgacggcagtgctgatggggctgccgccggcgcgctcgccgccgcgcaattcccgagaatcttcattaccacctcgatgaacgacacccgcgtgctgtacgtcgagccgctcaaatggctggcccgtttgcagtccgccggcgtggacgcggtggccaagattgaggtcgaggccggtcacggcggtctatccgggcgttacaaacaatgggaagaggtttcctatgagaacgcttggtgcatggatgtgatggggctcgctcattaggtcatttcgtcgttcattaggtcggtgtcctcttctatgtgagactgaaatgccgccatttcagtccctgaaatgaacccacaccgacctaatgaacactaaaatgacctaatgaatgtctcgacacgatacgcatgttggttgtgtccactagctgagcgggttcgggccggcaggtggtcgcgcgagtaggctccttgaactatggcaaagacatataaaatcgccgttattcccggcgacggtattggcaaggaagtcactccgtgggctcagaaggctttggaaaaggccgctgaaggcgtagctgacttcgagtatgagaacttcgacttgggtgccgagcgttatctgcgcgatggtgcgatcctgcccgaggacgaagaggagcgcatcaaggccaacgacgcgattctgctcggtgccgtgggcgatccgcgcatcaaggccggcattctggaacgcggcctgctgctcaagctgcgcttcgacctcgaccagtacgtgaacctgcgcccctccaagctgtacaagggcgtcacctcgccgctcgccaaccccggcgacatcgacttcgtggtggtgcgtgaaggcaccgaaggtctgtactgcggcgccggcggcgcggtgcgccgcaacaccccgcaggaggtggccaccgaggtgtccatcaacaccgcatacggtgtggagcgtgtggtgcgttacgccttcaagctcgctatgaagcgcaagaagcacgtcaccctggtgcacaagaagaacgtgctcgtcaacgccggtgatatgtggcaacgcatcgtcgacaaggtcggcgaggaataccctgaggtcacccacgactaccagcacatcgatgcggccaccatcttcctggtctccgacccgagccgtttcgatgtgattctcacagacaacctcttcggcgacattctgaccgatgaggccggctccgtggtgggcggcgtgggctactccgcctccggctgcatcaacgcctccgacgagttcccgtccatgttcgagccgattcacggttccgctccggacatcgccggtcagaacaaggccaacccgaccgccgccatcctctccgccgccatgctgctcgagcatctcggctttgatgatgcggccaagaagattcacaccgccgtcgaagcggacatcgaggagctcggctccaccgtgcgctccaccgaccaggtcggcaaggacattctggcccgcatgtgatgtcccacttggctcccctccagaggggagccaagtttatactgagttgcatgcaaatacgacatggggaatgcaaaaccgttggcggcaaactagtcgccgtgaccgtatccgtcgatgatgacggcaccgcacagtcatgccatatcagcggtgatttctttattgaatcagtttcggatgccgaatctcatgctttgttgcgtgacttggaacaggctctaattagtgatgattcattgcggtccgtattggacgctcaccctagttgccaaattatcggcacagatgaagttgccatcaaaaccgcatatagccgagccgtaagcagcaacttgcccccgctggtgggggctcccgcgcagcgggtgggggtggtcagccccgatgcgccgaacaccccggcatccatcaatacacaaaccaagcagcccgacaaaagctctgaataccgggagcgctggaacgccctcagacctcaactcaccgtgatccacgaccatccgcgtactccggacgagcaaatggccattgacgagacctgggcgcgtgaagtcgcagcaggaacacgacagccgaccatacggttctgggagtgggcgggcccggctgtggtcatcggccgtttccaatcggcccaggacgaggtgaatctggacattgccgagcagctcggtttcgacgtggtgcgccgttgcacgggtggtggcgcgatgtttatcgaaccgggcaacaccattacctattctctgtatgcaccgctcgatttcgttcagggcgtaagcatcgaagaatcctaccggctctgtgactggtggctggtcgaagcgctgcgcgaacttggcttggatgtgcggttcgcgggcctcaatgatatcgcctcgcagtacggcaagatcgggggagcggcgcaacggcgcttccccgtaggctcaggcggcgcggtgctgcaccatgtgaccatggcatatgacatcgatgcggccaagatgagccgtgtgctcaacaccagtcgcgagaagatgtcagacaaagcggtgaaatcagcagtcaaacgtgtggacccgatgaaaagccagacgggtctcagccgcgaacacatcgtcgaacaccttattgactggtttgcggcgtgatttcaccgatggccgtatacgattttgccggtggccgtgcgtggttttgtcatgggcgagcgcggtaaccgcgacagtgccgtttttcgcggtaacacattcgtcagcatgtcgtacggctatcggatcgcaccacacatgaagtgacgaatgatggcatgcttctgacgaaacctgtggggcgcgttacaatatgacggatggccgacgacggtcgtaggacaataaggatggtgcgatgagcttggaaacgccaaacgcttttgctgacgaggagaacatcctgctgcatacggcattgttcaagcaggtatcgccagccgaagccgaggagctgctgccgcatttgaagcgtgcgaccttcgataagggcgactatatcttctccgaaggcgataccgatcagcgcatgtatctactggagcaggggcgcgtcaagctgattcgcacttcttccgatgaccgcgtgcagctgctgtccatccacgcgccaggcgaagtgcttggcgagattccggtattcgaccctcatggtggcccgcgcaccgcgtccgcggtgtccatgagccatggcacgcgcgtggtctggctggagcatgatgccctgttcgcatggcttgatgagcatccgcgtgtggccatcgacatgttgcaggtcatggccaaccgccagcgcggcaacaacgaacgcatctccgacttggtattcatggatgtgccggcgcgtctggccaagacattgctcaacttgggctcacgtttcggcgagccggtggaacagggcctcaaagtgccgcatgacctgactcaggaagagctggcccaactggtgggctccagtcgtgagaccgtgaacaaggcgttgatggacttttccaaccgcggatggatcgcacgtgacggtcgatcgatcatcatcttccagccaggcatgctgattcgacgctcgcggcgctgaccgttcggctgacttccagccaatgttacgctagtgcggttcttgtgatgatatgttcacgggagctgaccgcgagcccggttggtagggcaccccatttagaatggggctcatgcccaaaaagaagtccctcactctccaacgtgtgcttgttctcctcttggcctatatcatgcttgccgtctgcggtggcgtggcggccagcgtgttgtttgtaccgggtgtggtcggtgccaataaagccgccaaagcggtgattccgtcgctcaaggtagaaaacgtggacttcgacgtgaccggtctgccccagaagtcgacgatgtacgcgcgagacggttccaccgttatcgcgacgttctacaaccaaaaccgtatcgtcgtgccgctgaagaagatttccaaaaccatgcagcaggcagtggtggcgcgcgaggaccgtcgattctggactcacgccggcgtcgacgtgcaaggcgtgatgcgtgcgttcgtgcagacctacctcgtcaaaggctcccagcagggtggttcgtcgctgacccagcagtacgtcaagaacgtgctgctcatgcaggcgatcgaggacgacgacccgatcgcccagtaccatgccaccgaagacaccgtcgcccgtaagattcgcgagatgctgatctccgtgcagatggagaagaagtattccaaggccgagattctgcagggctatctgaacatcgcccagttcggcaacaacctgtatggcgtggaaaccgcagcccagcgctacttcagcgtgtccgccgccgacctgaacgtggtgcagtccgccaccatcgcggctatcaccaagaacccgagccagtacgatccgctggtcgaggagaaccagaaggaaagcgagaaccagcgcaatatcgtgctcaagctgatgctgcaggaggggtacatcacccagaagcagtacaccgaagccgtgaacacgccgctgaaggacacgctgaaggtgcaggccgtgaacgtcggctgccaggacaccggcgactacgcatacttctgtgatttcgtggtgcatcgcatccagaactccgaagaattcggcaagactcgtgcggagcgtaacaagctgctgcaggagggtggcctgaagatcgtcaccacgttggatgtggaagcgaattccacgatgatggagaccgcgcgtaataccattccaccggacgatcccagcggcatggagatcgccatggccgcggtcaaaccggggaccggcgaggtgctgggcttcggcctgaaccgccactatgacgccaccccggcggccgcgaacgacccgaccaagacgagccagaactacgccgtcgatctggtggacggcggcggctccggttggaccatcggctcgacctggaagcccatcaacctcatcgcgtggatggaggcgggccattcgatcaacgacaacctgcagaccaccacgacgtaccccacgaccgacttcgcctgtgacaactacaagggcggcgccgattcgtggaacgtgtcgaacgccatgggcgccggcacggtgaacccggaaagcccgttcctcggtctggtgcgatcgcacaacaccacccaggcctccatgggcgccatcctcaaactgtgcaaggtggcggacaccgcgaccgaactgggataccatgacgccgccaccggcgagaccatcgacaagaccccggtgtacacgccgtccatgatgatcggctcggtgaacgtgtccccgctgaccatggcgagcatcttcgccgtatacgcctcgaacggcgtgcagtgcaacccgatcgccatcaacaaggtgaccggcagggacggcaaggagttcaaggtcccgtccgcgaactgccatcaggcggtggataaggacatcatccaaacactcgcttataccctgaaccaaggtacggtgcggccggatggtgccggttggtcattcagattggctgacgggcgtaagccgtttggtaagaccggtaccagtgaggatctcgcggtgtccggtggatcgttcattcctaatcagatcgcggcgttcgctgtggtcggcgacgcacagaacccgtacaccaaccgtatttccaacattgccatcaacggccggtacaacagctattgggatggttcgacaatcgcaggtccggccgttaccaacttcttcaatagctacatttccaagaagaaaataccgattgacaacgattatggccagcccgtctcgaagtacaccacgactggcaagtacctgggcattggcggacgaacgttcagcgtgccgcagaccactacgaatggcaacagccaatcgcagacgaccaccaatggtcaatcccagtcgcagtctcagtcgcagaacactgggcaaaacaacacccaaacccagggcaccaattcagagcggtcgaatgatggccagtgattggtgattggcgtttgacatttggtgattgcaggccggctgagtctacgtaacatagtcgactgcgatacccaaattacgtagtttgcgggcgttacctgtttcaggtgacgcccgttttacaatacttaatgacaacgccagcgcgttcatcgaatattcgccatgaacgcgcattggaaaggggaacgatgagcaacgacgatctgacgcatgagaattttgattttcgtggattcgacgtgccggatctcaaagcggtgacgctggcttcgtcttcggacggcgaacagtccaagcagccgaagaccaagcacgaggatgcatcgaggaaccgtaggcacggtaagaagaagtcaaaatccgacgcacggtccaagaagcgggccggcgcgggcaagacgagcgaatcgttcgatgattatgaggattatgaggaaagggaagctgtgagcaaggcagataagaaagccagcaaggaccgtccgggactgtttgcgccaatgacgctgcgcgaagtgaccgtgcgtaatcgtatttggttgccgccgatgtgcacgtattcgtcgttcgcctgcgatggtaggcccacgccgttccactaccagcattacgtgtctcgtgcgttcggcggattcggcatggtgatcgtcgaatccaccgccgtggctcctgaagggcgtatcacgccgtgcgatctgggcctgtgggaagacgggcagattgatgcttggcgctggatcgtggacggtattcgcgaggcgggtgcggtgcctgccatccagctcaaccatgcggggcgtaaggcttcgaccggttgcttcgccgttggttacgacggtcagagtgtgccggaggaggcgggcggctggcccaccatggcaccgtctgaaatcgcgttcggcgggctgcgtacgccgcgcgcgctgtccgtggatgagattcatggtctggtcggtgcgttcgccgcggcggcgggccgtgcggtggccgccggcttccaggctattcagattcatgctgcgcatggctatctgatttctcagttccttgacccgctgagcaatgagcgtgatgaccaatatggtggcgatttgaccggtcgctctcgtttcctggtcgaggttgtggatgccgtgcgcggggccgtccccgagggcgtgccggttctggtgcgcatttcggccacggattgggccgctggcggttgggatttggatcagaccattgcactatccaaggtgctgaaggagcatggcgtcgatgtgatggacgtgtccactggcggcatcatgtcgggagtgtcgattccggtcaagccgaactatcaggtgccgttcgccgagcaggtcaagtccaaggccgatattccggtgaccgcggtgggtcttatcaccaagccgaagcaggcggccaagattttggcccgtggcgaagccgatgccgtggaaattggccgcgccgcattgcgcgatccgtactggccgttgcgtgcggccaacaagctgggcataccgtccacagaggtcccctacgccccgcaatacgtggccggtgcgtactgaatcctcatggggcggtgactttcccatggggcggtaaaaccctcatggggcggtaaaaccctcatggggcggtaacccaaaacggcggtattctgcggaatgtgaaatttggctaaccgccccatggggcaatcaccgccccatgagggttttaccgccccatgggtaatagggcaatatgtgagttcactccacgtctacgccgacggcgtcggagacgtgctcgaatccgtcgcggcgcagcagctgggccagaccgcgcttcaacacggtgatctgctgcgggcctcggtacatcagcgagctgatgaacatgaccaggctggagccggaacgaatcttcgcataggcttgctcgggggtaaagacgccaccgatgccggcgatggcgaaccggtcgccatactccttatacaccttgcgaatcagctcggtgctggcgttggtgcacgggccgccggacaggccgccctcccaatcgcgcggaatctcgaggccggtgcggtccttctgcagattggcgatggacagcccctgcacattgtgctcggccagcacatcgagcagctccttgtactcgccccacggcttgttcaacggcatcttgaccagcgtgggctgcgggcggtcgatcttgtcgagcgccgtaaacagacggtcgagcgcttccggagtcgcggtgaacggttcgccgacgtgcgtgttcgggcaggagacgttgacctccaccatcgcggtgcggccggcggcgcggcgcatcgaaatgcagtaatcctcaatgccttcgtccaaatcgccgcactggtcgtcgttggtgcgggcgatcgacacagacagctgcatctggcgggcctgagtccaagccttctcggcgcgctcgatgaccttgtccgaaccgatgttggcgaggccgacgtgcaccatcatcgaatcgtattcaggcagacggtggaaccacggcttggcgttgcccgggcagggacgcgaggtggtggagcctacggtttcaaaaccgaagccggcatggtccagcaccacgggcatgtcgcagttcttgtcgaggccggcggacaggccgaacgggttggtgaaatcgacgcccatcacattcgtttccagaatggggtcggtgtagtcgagcatcagctgctcggcgagcagcagcggcgggacgttcttgacgacgtggcagaactcgatcatctgatcgtgtgcctcatcggggcggtggttgaacacgaagttcggtttgatgatgtgcttgtagccgaaggtgaacagatcggtggtggctttgttgacggcgtcgtgccagaagctttcagaaacgtaagtcataccgcctattgtctcacgcttgggccggtgcggctaggcgatccctacctaggcgaattggggaaggggctaccgcgtgtcgaggcgcacgcaggcgtcggctcggcagaagatacatgaatcgggatgcaccaggtatcaggcgtgactcgccgctgagcaacgcgctcgggagagtcgtcggtcgtgagtcatcgcgctagtggtcgctgcgagaatatcggttcgcacaatgtgcgattttgcgcggttttgtggaaatgaacacctgaattgcccggaattttcgagagattgtccccaaaacgctcaagccggtttggtttgtgagcttttgtgtgcgataatgttcacatgatttcgtcacaacgtcagcacctcatcttgagcaggttgcgcacgcgcggggcagtgcgcattacggcgctatcgaaggaactgggtgtgtcagcgatgaccatccgccgcgatatcgccgaacttgccgacaagggactgctgaagcgcgtccatggcggcgcggtgactaccagtaccttgctcagcgaacccctgttctctgtcaagtcccagatggatctcggcctgaaggacgccatcgcccaggaagccatcaaatatgtggctcccggcgatgtgatcgccatcggcggcggcaccacggcctatgtcttcgcccagcatctgctcgaatcgcagcagtccagcggcatcaccatcctcaccaattcgattcccgtggccgaactggtccaggccctcgaatccaaggacgtggaggtgatcgtcaccggcggcgtgatcacccgatcgaactcgcttgtcggtccgatcgcggacaaggtcgtcgcctcgctgcgtgtcaacaccgtattcctcggcacccactcggtgtcgattccccgtggcttcctgatgccgaattcgctggaagccgcaaccgatatggcgatgatggacatcgccgatcgtaccatagttttgaccgatcacaccaagtggagctgcacatcgctgtcgctgtttgcgcgcttcgaccaggtggacacggtcattactgacgacgggctcgatcccgactccgccgccaaaaccaaggatttggtaaaggaactcgtgctggcccaccagagcgagatcattgaggaaagtgagtaaacccatggctgatttcgccaactacacccccggggagtatgcgaaggagcacatccgcatcacgccgacgacgcttgccgacggtcgtgacttcttctacctggacgacgaccccgagttcgtctccggtgccaagacccgcgagctcaaggacccgcgcccgctggactaccgtttcgccccgcacctggacgccgacggcaacgaagtgccgtacgccgccccgcagatgcgccgcgacccgctgaccggcgactggatcccgatggccaccgcccgtatgaaccgcccgatcaccgccggccccggcgctaccgccaagggcaacccgctggccgcccgcaagcccggtgacccgtaccaggacggcgaagtgccggacaccgactacaacgtcgtcgtgttcgagaaccgcttcccctccatggtgcgcgtgcccggcgtctccgaggacgtgacctacgttgacggcaacccgctgtgggagaagaagctcgccgccggccgctgcgaggtcatctgcttcgacccgaacgaggatggcctgccggccgatctgccggtctcccgcctgcgcaccgtggttgaggcttgggccttccgtaccgccgaaatctccaagatggaaggcatcgagcagatcttcccgttcgagaaccacggccaggaaatcggcgtctccctcgcccacccgcacggccaggtctactgctacccgttcatcgccccgaagatggagaaggaactccagcacaccgaggcctaccacgagaagaccggcggcaacctgcttaaggacatcatgaacgccgagctcgaagccggcgaacgcatcgtgatgcgcaaccacagctgggtcgcctacgtgccggccgccgcccgttggcccctcgaggtccacgtggctccggtgcgcgacgtgctcaccctcgaccagctcaacgacgaagagcgttgggacctcgcctccatgtactcgcacctcctgaagcgcggcaacgccttcttcgacaagggcgacggcaagggcatggatctgccgtaca

SEQ ID NO: 2477 - DNA, 6288 bp, Unknown
  R50_10m  MAG No. k141_18905
cagatcgatcatgttctggcagtcggtgcggtgcacggatacgccctgattacgggtgatgaagccgatgatattgtcaccgggcaccggcatgcagcaacgggccagcttgatccacacatcgcccacgcccttgacggataccccggtggagctgctggaagtcttgcgctccacgggcttgagcggcagagcctcctgctcgacctcctcatcgacctcgtcggccccggcatccttgaccagatgcgagatgacgttctgcgtggagatctgcccatcaccgatggcggcgaacacagcgtcggcgttcgggaaattgaggtcgtcggccacaccgatcaatgcctcggtggtcagcagcgcattgaccggcaagttacgtttgcgcatagcgcgggtcagttcgtcgcggccttcctcaatagcctcggtacgacgttccttcgagaaccactggcggatcttgtttcgtgccttcgggctcttgacgaagctcagccagtcgcgcgaaggaccggcggtatcggacttggaagtcaggatctccacggtgtcgccgttgtcgagcgtggtgtcgagcggcaccaaacgcccgttgacgcgcgcgcccatcgtacggtggcccacttcggtatgcacggcataggcgaaatcgaccggtgtggcatgggccggcaaagagacgatcttgcccttcggcgtgaagacatagacttcggacgagccgaggtcttccttcagggaaccgaggaattcgttggaatctggggtttcgctggtccaatcggcaagctgctgaatccatttgagattgtcggcttcggaaagctcctggttcttctcgtcacgcctgcggtcggacttgtccggcgagctcagggcgcggccggcctggccgttttccttgtatttccagtgcgcggcgatgccgaactcggcgcggcggtgcatgtcccaggtgcgaatctggatttccaccggcttgccaccggggcccaccaccgtggtgtgcagcgactggtacatgttgagcttcggcatggcgatgtagtccttgaaccggccgggaaccgggttccaccgcgcatgcacggcaccaagcgccgcatagcaatcctgaatggtgtcgacgatgatgcgcacaccgaccaaatcgtagatgttcgcgaaatcatggccgcgcacgatcatcttctgataaatcgagaagtagtccttcgggcgtccggtgacgtatgccttgatgttctgctcgtcgagatcctcgttgatctccgccagaatctgcttcaggtacacatcgcgctggccggctcggcgagccaccagcaccacgatctcgttgtagatcttcgggtagagcaccttgaagctcagttcctcgagctccgtcttgatggcgttcataccgagtcggttggccaaaggcgcgtacacgtcgagggtttcacgcgccttcttctgggcggacgtggtcttcacatagcgccaggtgcgggcgttgtgtacacggtcggcgagcttgaccaccaaggtgcgcacgtcgcggctcatggccaccacaagtttgcgaatggtttcggcttgggcggagtcgcccacttcaagctggctgagcttggtgacgccatcgaccagaccggccacggtgtcgccgaattcggcacggcattgatccaacgtgtagtcggtgtcctccaccgtgtcatgcagcagaccggccgccaccacaatcggccccatgcccagatccgcgagaatctgggaaacggccaacggatggatgatgtatggttcgcccgacttgcgccgttgcgtgcaatgctggatgacggcgcgccggtacgcgcggtcgaggatggacaaatcctcaccgggatggtgggacttgcacactttcttgattggatccagcggattgagcggatcggcactgatctcacaacccaacttacgggcggcgtactgctcgccatcaatctctgccatgccagtcacctccctcgtcatgaagttcattgtaaccgcgaaccggagccttatgcatgcacctgttcgccatcattggttccgcaaccgtcgttgccgtcatcaccttggtcattcaaccggcccaatccggtcaggacgccactcccgtcgaaccgaacccacgttcggcgcgatcggatccgggcagggtttcagccgggatgaaccgggcctcaacataccgctgaatcaccaattgagcgatgcgatcgcccggatggaagacggcggtgtgcttcggatcgaggttgatcagcggcaccttgatctcgccacggtagccggcatcaacggtgccaggcgcgttgagcacggtgacgccctgcttggcggccagcccggaacgcggatgcaccaacgccacgtagcccgcaggtagggcgatggccacgccggtgggcaccagtacccgttcaaaaggcttcagcgtcacatcgacggtggtgatgaggtcggcaccggcatcgcccgcgtgggcatagtgcagctgggccggatgttcggggtcgaggctcttgaccaggacctcggtggattcgggctcgttgtaggtctcgtcgaacgccatcaggcggcgcactcctcacacaccggctggccatcctcgtccgtgtaggcgagctggctgcgatgcttgaccaggaagcactgcgagcagatgaactcgtcaccctgcatggggatgacggtcaccgaggaatcctcgttgctcaaatcggcgcccggcagttcgtagtcttcggcgatggcgttctcatcgtcgtcgatgtcgctcgaggcgttctgcgaggacttccccagcgcctgcagcgattcctcgtcctcatccttattgcggggggaatcataatcctgagccatcatggtcctttcgtcgtctttggttcgtaagtcgatatatatagcacggtcagcgccgtactcgcccataggatacacgatttgaaatactcgtaaagttcgacacgtggggcatacttaaaagaagtaatgtctttgcgacggaaagtggtgcgaatatgccagatgatcggcttgaaaaagcccgtttcgtacgcgtgagcaagacgggggacctcgtattctccattggcggcagggaaatggccgtgagcgtggacgacacgctcgaacgggcgattcttgaggccaagcaggtcagaagcgagatgcgacaggccccccagccgcatcagcagtccactttgccgatttcccagatacagtcgctgattcgcgccggcgccgatccggcccgtgtcgcggagaaatatcatctgagcgaaacgctggtacgtcgtttctccatggccgtggagaccgagaaacagtacgccatcgaacagttccttgccgtggcggcacccaaagacagcagggtgcgcaccatcagcgaactggtggaacgcacgctggcctctgctggaatcggcatggaatcagtgacctggaaatccacccggcgcggacttgagccttggcgcatcgtggcgatattcacttccgcgggccgtgagatccatgccgaatggacgtggaatatgcacgacaattccgtgatgagcctgaacaatgccgctcgaaaactgctcggcgaacagaatccggaatcagccacggattccaaactcaagccgacgattcctgaactgcccggcgactccgtacgttccgcgcgtatcgagcgcgccgtgtctgcttgggctgcacctacgccttcgattccggccgcacggcctgccgcgatccggccctccgtcacttccacaggttccatgcccccggtggacctatccacgtccatctcaccggccacgacccaggctcatggcactacggcccccagtccggtctcttcgcagaccgccggacctgtttcgtcatctgccgcaggattgcagcaatcgcctgccacggcaccagagcagggttctgacaatatttcggacgagaccgtacggcgtggccccaatgcacagctggtagccaccgagcaggaggtggcggccgaatccgccgccaccaaacacgaggcaccagccaaaccggccaagcgtaaatcaggacgttcggccgtaccaagctgggacgagattctgttcggagactgaatttccgaatcaggccatatcgatcaggcagggaatatccatttccaatgccgtttgggagccatgcacgctcggcaggtgggtggctttgtctccttgcgtacgcgaatcgacgagggtcacggctcccgctgcctgcacgaccacatcgccgagcatcggccggactcgctcgcagaccggtccaaacaatccgtccgcgatggcctcatccctggtccgcaccaaggctcggtcttgcaggtaatcgcgccaccggcaagctatatcctcaggtcgttcatccggctcggcatacagcatcagcgagcgaggctctcccccgaccagtgacacgcctcgggtgagctgcggttcaacggcgatgtcaatccgctggcccatgtcggtttgcaccatgccgtggtcggctacgatgacgatcagcgtgcctttgggtgcgctgcgtttcaggagcgcgagctgggcgtcgatatgttcgaatgcggccacccagtgttcggaatcccacccgtaattgtggccgactttgtcggcgtcacggatgtacaggtaggtcaggccgggggtacgggaggcacgtgaggcggccagcacacgatcgcgtggggtgacgttgccttgatagtcggtgcctcgcaatgcggcttcggtcaatggcgatttggagaacttgggcaaccccgagcttgtgacgcgcacctcttgagccgcaagtttctcgaacaccgtctcctcgcgctgctggtcgagcggatcgaccatgggtggcacaggaatgtgcggattggctggtttgggtgccagcgcgtctttgaactggatgagttggatgagcttatggctggcgggttcgagctgcgtatagcccgccattgcggtcagtcccgggcaggttccggtaccgaatgcggccatggccgccacagtggtgcttggagcgcaggtggcgatgggacgctgattggcgcgttcgttcatcagcgaacgcagatagggcgcgtggccgaggcgcatggcgaggttccagaagcccaggccgtccacgagcaccacgatggccgattcggcgtcgggcagtcccaacgcgcgctggcaggccttgggatcggcgtggaccttggtgggagtcggatgcccaatcgcggcggacaaggcgggcagcacggcggacaggtgcagcgctcccccacgccgatcggccgggacgtcatccccatagcccacagtgggcaccagccgcagcaactcgtccatatccggcgtctcaacactcatagttgcccattcaagtagcacccctccccttggctcagtgcgcagagaacggttctcaataacaactgtgcgccccaacgcacataatcaaacaaacgcacatcgactgaaacactggaatcacgccgttttatcggcaaacatgtgcgattggcgcaccgaaaccagcgcacagttgttattgagaaccgttctctgcgcactgtttcgcgccctcccgctaatatgggggcgttcgaaagggagtttcatggcatcacaccgcaaaccgtccgcgcaaacctacgatccgcgcacggtcaaggagcatatcgtcgagacgccgctgaacgaggagatgagcaaatccttcctcgagtatgcgtattcggtgatttacgcacgcgcactgcccgatgcgcgcgatggcttgaagccggtgcagcgccgtatcgtctaccagatgggcgagatgaacctgactcccgaccgcccgtatatgaagtccgcccgcgtggtgggcgaggtgatgggcaagctccatccgcacggcgattccgcgatctacgaggccatggtgcgtttggcacagccgttcgcgatgcgtctgccgctggtagatggccacggcaacttcggctcgctggatgacggccctgcggcctcccgttacaccgaggccaggcttggcccggcggccctcggcatgaacgcggatatcgatgaggacaccgtcgacttcacgccgaactatgacaacaagctcaaggaaccgaccgtgctgccggccgccatcccaaatctgctggtcaacggcggctcgggcatcgccgtgggcatggccacgaacctggccacccacaatctgggcgaggtggtgaacgcc

SEQ ID NO: 2478 - DNA, 15042 bp, Unknown
  R50_10m  MAG No. k141_18923
acgaagtgagactgagggtggtctctgccggtatggcggaccactctcagaccgcctgcggcggccagctcccgccagcgggagccttctcctcgacttagcgacgctcgatttcgacgccggcggtgttgatgggcaggtgaagcacacgccagtggccggaagcaagctgctccgatgcgatctggtcgatggcttcgcgggcgttgccgtagtgcagcacgagcacgcaggggccggcaccggagacggcggcggcatagcccttggagcggaagagcgcaatgagctcggtggacggcggcatcagggtaccgcgatacggctggtgcaacttgtcctgcgtggcggtgaacagtagcgcgttggactgggcctgagcggccgtaagctcgtcagcgaacggcgattcacgggttccgccagcgcaagcgcacgtatcggcatcctgagccggggcagcggcgacgccggacttgccctgctgggcggcctgggccagcactacgggattcatcgcagcgggcagcagacccacgcgagacacgttgtagacggcgtccttgtatggcagttccctaggcagcgcctgacgggccttctcagtggacagctcatagtcgggcacgaacacggcggcggtgatggacgggtccaccgggtagttgacggcgtggaatccgccgtgcagcggttcaccaccaggaacggcgaccgagccgacgccttccgcggtttcgaagtcccaagagacggtcaggccaccgaacacagccggggccacattgtccgggtggccttcgatctgggcggccatatcgaagatggccggacggttgaggtcaccggtctgggcgaaggccgcggcggcggcgatgccggccacgatggcctcggcggaagagcccatgccacgagcctgagggatgttgttggtcgcttccagcgtgaagccgagtcggccgaggccgaacgtggcacaggcacggcggaaggtggagaccacgaggtgggtttcgtcgcgtgggagggtgtcggcaccctcgccgtggatgatcacgtgggcaatgccgtcgttcgggtcgtcgttgagcgtgaaagtgagctcgtcatggtagtcgagcgccagacccacggtatcgaagccggagccgaggttggcggacgtggcgggcacgcgcacgtgaacgctattgcagattgggttcatggttgttccttaaaaaggagctccccttgtcaggggagcttgggtattcagctttcaactcacgggcagccgttcgaccgcctcatcagagggagcctagacggtgtcagtccagcacgcgcaggatggacgggtcaccggtgacgaagtcgagcgcctgcacggccttgacggtgttgcgcagggtttcctcgtcggtcaggtgggtcacgatgcgcaactgctgaatctcgccgtcgtagccggggtcggtcatggtgggcttcagatcctggttcacaccgttgatggagacaccgttcttggcgaactcggcggcgatggcggccagcacgcccggcttgtcgtggatcaggaagcgcacggcgaatgcagccttggaggcggtaatcggagccttcggcagattcttgtacagcgggatggacgggccggtgcagccagcagcaatgtggcgggcttcggtcaccacgtcgcccacgacggcggaggcggtcggagcgccgccggcgccacggccgtagaacatgaggtcgtcggcggcctcggccttgacgaacacggcgttgaaggagccgtgcacggaggccagcgggtggttctcgtcgatcagggccgggtagacgcgggcggagacgccggcctcgccgttctcgaccacggcgagcagcttgatgaccttgtgctcggcggtggcggcggcgatgtcgtcggcggtgatcttggtgatgccttcgacggacacgtcgtcgatggtcacggaggtgtggaagccgagggtggccatgatggcggccttgttggcagcatcgtagccttcgatgtcgccggtcgggtcggcttcggcgtagcccttggcctgggcgtccttgagcacgtcgtcgaactggagacccttggtggtcatctcgtcgagaatgtagttggtggtgccgttgacgatgccgagcatgctggtcaccttgtcgccgaccagggactcgcgcagcgggcgcaggaacggaatcgcaccacctacagcggcctcgaagtagatgtcgacgcccctggcctcggcggcggagtagatctccgggccgtacttggccagcagcgccttgttggcggtgaccacggaagcaccggattcgatggcggcaagcacgaacttgcgggccacggtggtgccgccgatgagctcgatgacgatgtccgagttggtggccacgctcaaagtatcggtggtgacgatggactggtcgatccacgggaacttctcggtttccttcgggtcgaggcaggcgacgccggtcagttcgatcgggcggccgatacgagcggacagttcgtccttctgctcgacaatcaggcgggcggtctgggagccgacggtgccggcaccaagcaggcctacgcgaatcggggtttcgctgttgtgagccaattcagggtccttccaaaaagttttctatatcccacgcctattttacggattatttccgacagcagaccgaaagtactcatcaagctgacggcccttttcgtattatgacggttttggccgcacattacagactgtcaggcgctcacctctgcacgctgattactcgctgacgtcgaggttgagtaggtcgtctacggtctggcggcggagcatgacgtgcgcgccggactcgctgacagcaaccaccgccggaatcagcgcctggttgtagttgctggccatggtgcggccgtatgcgccggtaaccggcacggcgagaatgtcaccgcgcttcaaatcggcgggcaactgcacctcgtgaaccacaatgtcgccggattcgcagtgcatgccacacacacgggcaagcatcgtttcagcggaaccggtgcgattcgccagacgcgcggtgtagtcggcaccgtagagtgccgggcgaatgttgtcggacatgccgccatccacggacacgtacacgcgctcggcaatcgggttgccggcactgtctttggcatcggacaagtgcacgtgcttgatggtgcccacgcggtacagggttacgccggcgggtgccacgatgtaacggcccggctcgaagctgatggccggggcgggcatgccgagcgcacggttggtgctgttgaccgcatccgccaagcgagtgagttccacgtcaatgtccattgaatcttcgccatcggtgtaggccacggagtagccgccgccgaggtcgatttcgggcaggatgtaggcgtcggtggcccacagggtcttgcgcagcagcatcatgcgcttggccgcgtgaatgaaggcgtccgcatcgtggatgttggagccgatgtgcgagtgggctccgaccagttcgagtacgtcctggtcggcgaggatggtcttgagcacggcgatggatggaccgtccgcaatggcttccatcgcggcggccagcgccttgtctgtgtcggagacttcctcgtggctcaggtcgtacgggtacttgacgtcgtagtgcagctcgcgctctgatttctcggtcttctccgcgccattttccagggaatgcgtcgcagagatacgcgcgttggtagcggcaggcgtcacgtctttgaggtcgttcagcacgtcgagcacggcggcgtcggccccggcggccagcagcggcacgccgaacttctggtcctcgtgagcagtggagatgtactcgtggccgccggcgtggacaccgacggtgacgcgcagcatcacacgagcgcgtttgccgagcttgcgggcgatggcggcgacgcgctccggctcgtcgggctcgtcgatcacgattttggcgaagccctgttcgatggccagcgcgatttcctcatcggacttgttgttgccgtgcagtaccagacgacgtccgggaacgccagcggcgagggcgattttcatctcgcccatcgtgcaggtgtccacgaacatgccggcctcggtgaccaatcgcacgatttctttggacaggaacgccttaccggcaaagctcacgtgcgtagtggatgtgttgaatgcttcggcggcagcgcgcacgaagtgcctggcacgtgcgactacttcatcagtgtcgatgagatagagcggcgagccgaactcgtcaagcagcgattcggcggtacgaccgtggaatgtaatggcaccgtcggcattcacagccgtagcggccggccaaattggagaaatgggcataatcacatcttttcgggggcggtgacgccgaggaggtcgaggccgttggcgatgacctgctggacggcgtcattgagcttcaggcgggcggcggcacgggccggctccgggttcttggcgatctccaaggccttgcgagcttcgtcgtcgccacgggtttccggatcggtcagggccatcggcaccacgcgctctacgttgtaccacttgtgataggtggcggccagttcttcgaggtaacgggccaccttgtgcggctggcggtcgtcggccgcagtggcgagcacgctcgggaactgggcgagggcggcgagtacctcgccgtcggcctcggtgtcgagcagggccaggtcggcaccctcgtagctgatgccggcggcggctgcgttgcggtccacgttcttggagcgggcgtgcgcgtactgcacgtagtacaccgggttgtcgttggtgtgcgaggcgagcagggccaggtcgatgtcgaagttctggttgtagtcggagcgggccagcgagtagcgggcggcgtccacgccgaccacggagaccagatcgtcgatggtcacgacgttgccggcgcgcttggacatgcgcacgggcttgccgtccttcatcacgttgaccagctggccgatgagaatctgcatgttcttgccgggctcgtcgccgaaggccgcgcacatggccatcatgcggccgatgtagccgtggtggtcggcgccaagcatgtagatggccacgtcagccgggttttcggcgcgatggcgcttgtcccagtagtaggcgatgtcggcggcgaagtaggcgaactcaccattggacttgatgatcacacggtccttgtcgtcgccgtgcttggtggattcaaaccaagtggcgccgtccttgtcgaagatgtcgccgcgggacttgagctcttcgatggcggcgtcgaccttgccgtcggcgtacaggctgttctcatggaaccagacgtcgaagttcacgcggaagtccttcatggacttctgaatctcatcgaacatcatcggcacagcgcgcttgcggaattcctcgcgcacttcggtgtcggcctcgccgagcggttcaccgtcgtcgttgaggccttgatcctggtgggccagtgcggtcaggtccacgccgtcggactcggcttcggcctgaacacgggcggcgatctcgttgatgtaggcacccttgtagccgtcgcacggggtttcggtctggtagccggcctcgcccaagttattggcctcagcccaagcggcgaccagcgacttggcgaagcggttgatctgctcgccgtggtcgttgaaataatattcgcgcaccaccttggcaccgttggcctcgagcacgcgggccatggcgtcgccgacggcagcccaacgagtgccgccgatgtgaatcggaccggtggggttggcggagacgaactcgagattcagggtctggccgcccagatgggcgttgcggccgtattcgttgaccttgttgagatgcttgtcggtgtcggtcatggcaccggcggcgagtacggtgtccaccacggcggcggccgaggcggagtcgagcgtgatgttgatgaagccggggcctgccacctcgaccttggcgatgccgtcggcttcagcgagcgcggcggcgaacggctcggccagatcgcgcggcttcatgccggccttcttggccagctgcatggcgatgttggaggcccagtcgccatgcgcgcggtccttcgggcgcatcacggcgagcttgtcgacgggcggaatcagctcgtcggtcaacgcgccggcctggccggcggcgacgaggttgtgggcaatgctggaaatcagttcacttaaggcttcagggctcattcttctaaggataccggcgacggcgacaccatgccgcgtccggtcattgtcggcggccataatggaacgacgcgcgaaagaggtgcatatggccgggctcaacccccaatcattggtcacgttgtggcagatcgaacagtatggttcgttctccgccacggccaaggccacgggttggtcgcagccggccatcagccagcagatcaaaaagctggaggcacagtgcggttcgactctggtgcaacgcacctcgcatggtgtggaactcaccgccaccggttcgatgctcgcccgccacggcgaggccatcgccgatcggctggagcgggcggcccgtgaggtcgaggattatcggcatcatcggtttgctcacctgcatttggtggccccaccgtcaatctgctctactatcgcggcccgtaccgtggtcaagctcagtatgttcacggacatcgagctgagcctgattcagatggagccgccggaggcgatcggtctgatttcccaaggcaaggccgatgccgccgccgtgttccggtacagcagcatcccgaacttcctgcacatcggcgacgacctgaccttccattcgctgggttacgacccgatgcgactgctggtgcgccgctccagcagcatcgccaaacgattcgaggagaccggcgaacccgtgccgctgtccgccgccaaagacgagcattggatcgccggctgccccacctgccgcgcaaatttggtgaaactggccacccgtgccggattcaagccggatatccgccactgcacggatgattactgggccacgcagaacctggtcgaggttggcatgggcgtctcgctggtgccggcgctcgatacacatatcaatctgcaaggcgatctggtggcctgtcccatcgccgacgattttgcggcgcgcgaggtcggcatcgtgactcgtgccggcgaccatcgtcccgcgctcggttcattgctcgaagagctcgagcgcacgtcactcaaatatttgagcgccaagtagtcggacagcgataagcaagcttgcgaacgccatcacgatttcggggagccagaccgttgagcagcccttctgtaccaggaacaatgacatgttatgagcatgaacaacgtttcccagtcaacgactttgagcagcgcaaccgccggtgcctcttgctttgatgccaatcacatcgacgtgacgaccatcgaagatctgaagcaggtcggttcggacaaatggacccgctaccccggctgcatcggcgcattcatcgccgagatggattacggtctggcgccgtgcgtggccgaagccatcgaagaggccaccgaacgtggcgcgctcggctacattcccgacccgtggaagaaggaggtcgcccgctcgtgcgccgcatggcagcgtcgatacggctgggatgtggatccgacgtgcatccgtccggtgccggacgtgctggaggcgttcgaagtgttcctgcgcgagatcgtgcgcgccggcaactccatcgtggtgccgactccggcctatatgccgttcctgagcgtgccgcgcctgtatggagtggaggtccttgagattccgatgctgtgcgagggcgccggcgagagcagcgggcgcaatgatgaatggctgttcgatttcgacgccattgagcaggcgttcgcgaacggctgccatgccttcgtgctgtgcaacccgcacaacccgatcggcaaggtattgacgcgcgaagaaatgctgcgattgtccgacctggccgccaagtacgacgtgcgtatattctccgatgagattcacgcgccgttcgtctaccaaggccacacgcatgtgccattcgcctcaatcaaccggcagacggccatgcaggctttcacctccacttcagcctcgaagtcgttcaatattcccggcaccaagtgcgcgcaggtgattctcaccaatccggacgatctggaactgtggatgaggaacgcggaatggtccgagcaccagacggccaccatcggtgccatagccaccactgcggcctatgacggcggcgcggcatggttcgagggcgtgatggcatatatcgagcgcaatatcgcgctggtcaacgagcagatgcgcacgagattcgccaaggtgcgctatgtggagccgcagggcacgtatatcgcgtggctggatttctcgtcactgggcatcgatgacccggccgactatttcttcaagaaggccaacgtggcgttgacagacggccgtgaatgcggcgaggtcgggcgcggttgcgtgcgtatgaacttcgccatgccctacccgctactggaggaatgcttcgaccgcatggccgccgcacttgaggcggacgggctgttgtaaaaaattgtggctcccctcagagaggggagccgaggaacggccgaattaatcgaagtcggcacccaacgcttcgagtttgccgcggaagtcggcgtagcctcggtcgatcaggctgatgccgtgcacgtccgaggggccggacgcggccaaggccgcgatcagatggctgaacccaccacgcaggtccggcacgtcgatgtcgcgtccggtcagcggggtcggtccgaagatcacggcggaatgcttgtagttgcgctgccggaaacggcacggcagcgagcccaggcactcgcggtacaactggatggtggcacccatctcgaccagcggcttggtgaagccgaaacggttctcgtacacggtctcgtgcacgatcgacaggccgttggcctgggtcagggccaccacgagcggctgctgccagtcggtcatgaacccgggatgcacgtccgtctcgatcgccacgggcttcaagtccccgcccggatgccagaaacgaatgcccctgtccgtcacctcgaatttgccgcccaccttgcggaacacgttgaggaacgtgatcatctccggctgggtggcacccttgacgaaaatgtcaccgtgcgtggcgagcgcggcggacgcccaggacgccgcctcgatgcgatccgtcagcgacgtgtgcgtgtacccctgcagttccttgacaccctcgatgcggaaggtgcgatcaacgtccacagaaatgattgcgcccatcttctgcagcacgcacaccagatccatgatctccggctcagtggccgcgcccgacagttcggtcttgccctcggccagcacggccgccagtaaagtctgctcggtggcgcccaccgacgggtagggcaggtggatcttcgcgccgtgcaggccgttgggcgcggtgatgtggatgccgtccttgtgttccttgtccaccgtggcgcccagcttgcgcagcgtctccagatggaagtcaatcggacgtccgccaatcgcgcagccgcccaacgcgggaatgaacgcttcacccaaacggtgcacgagcgggccggagaacaggatcgggatgcgcgacgaaccggacagtgtatccacgtcggccacatcggccagctgcacacgcgaggcgtcgatggtcacaatgccgttcgcaccgtccacatccacgtccacgccgtgcagacgtagcaaatcggacaccacatgcacgtcacgaatctccggcacgttcttcagcaccgacttgcccggtgccagcaacgcggcgaccatcgccttgctcacgaagttcttcgcgccacgcaccttgatcgtgccattcaaaggcttgccgccctcgacatgcaacacgtcatccggattctcagccacgccactctcctcaatcaatcaagattcaaaaaatgctaccgtccagtttgccataagccatgtgccgactccgtgaaatgcaccccagccgaactttgatcaccgtgcacaacggatcccataccccccgtcgaatcaaaccgataacgtgatcttcctcacatttgccgccacggtgttctccatacttctacgctacgattcagggcaatggcatcagacgccatggccacaagcaaaggagcattcatgaccacagtcgccgtcatcggctgcacgcacgccggcacgttcgccaccacctcgattctcgccgagcaccccgattggaccgtccatgttttcgagcgcaacggtacgctgtccttcctctcctgcggcatcgccctgtgggtgggcgaccacgtatccgacccgaagaaaatgttctactcctcccctgccgctctggccgaagccggcgcgaccatgcatatgcgcaccgacgtgacgtccgtggacctcgacgccagaaccctcacctaccgcgcgctggacgaggccggagaccccgccgaacagaccctcgctttcgacaaactggtcgtgaccaccggctcgcgcccggtcatcccgccgatccccggcatcgacagcccgcatgtgctgctgtgcaagaactgggatcacgccatcgccatcaaggaaaaggcgaaaaccgccaagtcggcagtggtgatcgggtcgggctatatcggcgcggaaatcgccgagcagttcagcgtcaccggcgtcaagaccacgctggtcgacggccttgatcgcccgctggccaataatttcgataagaccatcaccgatcaggtggcggccgcgttcgaggagcacggcgtcacgctcgcgctcggccagaaggtggtcgagttccgcgacaatgacgacgacaccgtcactgtggtcaccgaaaagggcgagtacacggccgaaatggcgattctggccgtcggcttcctgccgaacaccgacctgctcaagggcaaggtggacatgctgccgaacggcgcgatcgtggtcgacgactacatgcaggcgtccgcgccgggcgtgtacgccgccggcgactccgccaccgtgttctacaaccccaccggccagcacgattacattccgctggccaccaacgcggtgcgccagggcctgctggtgggccgcaacatcgagacgccgaccgtgaagtacatgggcacgcaggccacgtccgccgtgcagctgtacgatctctcgctcgccgcctccggcctgacccgcgccggtgccgaacgccgcgggctcacggtccgcgagacctcgctcaccgaggattatcgcccggacttcatgctcaccaccaccccagtcacgtcgattctgacctgggacccggaaacccgcaaggtcaagggcggccagttctgttccaaggccgatatctccggcgcggcaaacgtgatttccatggcgattcaggccggcttcaccatcgaccagctcgccaacgtggacttcctgttccagccgaacttcgacaagccggtctactacgtcggcgccgtggccatgaaggcggcggccgagtaagacggctgtacccaccgcaaaaaagaaaccccggcgtgatgggcgccggggagagaaaggagagaagaagaaagaggttaagttatgcagcttgttcggccgtgattacatataacagcaacagtttcaatgcaacatgggcactgtctgggaatcgtctgggaatcacggcccgtacaggctgttgcttgtttttggagccgatttaccggctggccttgatcttgtgggccagttcggcgtcccacatcgcaccggtggcggacatcaccgagtccgcgccggcgtcacggtacgcctggtagtcggcgggcgagaccacgccgccgacgccgttgatcgcgaaatcgagcccgagcttttcacgaatcgcggccagacgggcgaccatgtcgaggccggcgccacgaatcgcattgccgcacacgcctgagcgatcgcggcctgcaccgggcagggcctgattgccattggcatcgaccagtttggcggaaatcgtattgatggtgctgaagccctgcacggtgccgtggcccacggtggaacgcaccataagctccagagcgtcgtcgctggggatgtaggcgagcttgaccatcagcgggatgtcgccgatctcctgcttcacggcctcggtgatgcggcccacgagcagcggattgtggcatagcaggcggttgtggccctcgttggggcagctggtgttcatcaccatgagcttggcaccggtctccttgaccaggcgggcggtagtggcatggtcggcgatgtattcctcctcgctcatgccctccacacgcgagccttggaagctcgggaccagcacttgaccgggaccggcggcctcgatggcggcgcgcatgtccgactgccagacgtcagggctctgcgagggcacaccgaagctgttggagatggaaatcggctgttcatagttggtgtcggccagcacgccttcgtccagttcggcgctgcccggcgtcagtgaaccgtccgccgacttggggtgtacggcgagcacgttcgggaacgggttgcagccccaggcgcgcgaacgcacggttttgtaggtcgccagatcgaaacccatgtggaaagcggccgtggtgaaacggctgttgagcagcgggcctgcgggaatgccgaaaggcaggttgaccggctggcccaaaaaggtggccaaggcaccctcgctggtggttccggcggcatcggcaccgttgccatccttcagcgcctcggcgaacgcgccgaacggcccttgctcatagttgtcttcgtaactgcggctgacatcgtaaaacggctcaaaatcactcatgcttcaacgataagccaacctgcatgcgcacacgcacactcaacccatcatcgcgccgacaaacgaaataatggcgaaagcggcattggctaccacaaagatgatgaacgtcggagctgcccagccaaagtacgtgtctggaatactacgattcgtacggtgatattggcgcatctctttgccgtatatcacgaatatgataatcgatccgatcacgccgatcacagatagcgacaatgagaatatcaaatatgcgttgtcatcaagatagttgccggcaagggtatcgatggcgccggaaagaatcgcattgttgaagatgtgcagtgcaatcgaccaaaccaacgagtattccatggccacgaatcccagaatcaggccaaagaggaacgcgaatgtgccttgcactacgtcgtcatggaacaggccgaacaccattgccgaggtgacgatggcgaagttcttgcccaacggcttgagctccttcatcagtacgccgcggaacagtacttcctcgcaaatcggagcgaccagcccaacgtacagccacatgcttacggtgacgctggattcggcgatgctgtctgacgtgggagaggcaagatcggtgcccagcatggaaaaagcgacctgcaccaacataacgatgccttgcacgcccatgcccagcacgatgaacatcaacgcccagagaggctgcatgcgcccgccgccatattggctgatgtggccaagctgattgggctccccgtacgagtcgcgatgctggccaccaagccagaattcgcaggtgaagatgtcacggtggcgcatgagcagcagaaatccgaacgcgacgaacaccgatatcaggctgatgatgccatcccactgcacgccggacaaatcgctcgcggttattacgccgacgataatggtggcgaccattgcgcccaagagcatcatgccttcataggcgagagtcagtcccattacacgattgaccaccttgcgacgccacgtgcgccatacacggcgaggatcgatcggcatgaccacgggcattgctgcgggcatcgtggccggcattgcgttgggcattgtgactggcattgccggagccgtttgcacgaatggttgcggcgcagcggaatagggttgtggcgcgtagcccactggttgagcgtagtacggatgagcgaggggctgtggagccgactgttgcgccgggtatggggaataggcggattgcgccggatacgtcggctgcgtgggatacatcggctgggcaggatacgtaggttggacgggatatgtcgggtatacgagctgcgcggcgtattgtgcaggctgcacagcaggtattgcggcttgcggcacaggttgtgaaacaccttgtgaaacaatccgtggaacaccccgtgaaacatcttgtggaggtagcggttgtgcccatgcctccggctgacccgcatattgcggctgcatgctcggcccaggctgaacatactgtggcgtctgtggcatcggcgtctgtgactgtgccgcagactgcggtgccggtcgaggtggcaacggttgcgctgacagcgattgcgccggagccgtatcggaatcgttcgacggattcatgtcattcatggtcatgatgctcaacctaaccgtcattactggatgaatcgtgattatgtccacaaatgtgtacgaattcaggcacagtatttcgaacgctaggacggagttcatgagtgttgaggaaagcgccgccacgccggtgttggtggctgcggtggataacgaccgtatggcgttgttggcactgaagggaatattgccgcaactcctgcccgccgcgcaatggatgtggggcgcgggcaccagtgagacctttgtttgatgcgatgcgagcgacccaataatctcaatcagacacagagccaacggccctgggcctgcaattatggactcgcctttcggcgaggctcaatgctggcctcgctgctgtcgcggctcggcacagggcctgctgaaagcccaccgggctttcagcaggccgatcgcggctaaataatgccgcgatcggccaacggccctgtccagtctgcgtcctcaggctcgcgggcggactcgattctttcttcggcccagtgtttggcg

SEQ ID NO: 2479 - DNA, 8345 bp, Unknown
  R50_10m  MAG No. k141_19052
ccgagcagcgtgaggcactgaaggccgcctacggcaaggcgattaccgctgtgccgggctctgcttgggaaaagctgaccgagagcattatggccgcgctgaactccacgctcggcattcccgaggaccgcacctacatccgttacaccgccaccaccgactggggctggaatggcggcaacttctagttgccaccattcccctcgcagcatagctgctcgcatcgcctacggaaagcccggtgggctttccgtttaacggctcagggtagcaacttctagtttgcgtatgctggctcccctcagtcagcttcgctgacagctcccctcaaagagggaagctcagatgtagaaagcccgccggtgccgggctttctacgtttcaaggggctgatttccaacattcagaagctctactagcgtttcaaggggcttttaaaacaagaaacccggagtataaacattgcaatttcaatggtcatactccgggtttcgcgatcgaagagcccctcgaaacgcagatagacctccggaaaaccggaaatccgcccctcgaaagcgagttacctcacctcatgcctgtcatcacacaatcttgggcatgggggtggtgaggctggtggtcaggttgacgtggaccagaccggcaccggcatgcacctcgaccttcttcagggtcacggtgcgctcttcttcgggggcgcggtcgttgtcggtcatggtcgccggggacttgaccgccacgaacgccagatcatccagcgagatgcctgcgctctggcacagttccatggcctcggacacggactcggtgaagcccggcttgtagatcacgcgctcggccggtacgccgtaggcgttctcggccacccacttggcgttctcggtcagggccatgcccttgtgcgaatgcggttcggccggcatggagccgttctgcaacgcatcgacgaaaccgtcaagctgcggggccagcgcctcgccgccgtcgcggaacaggttgccgatgatcggcgtgcggaagcccagctcgtcggcggtggcctgcagggacgggacctgatcgtcctcgccttcccacaggttgatgagcgggaaggtcggaatgtccaggttctccaggcgctgcacgtggaacgggtagcgccaggccagctcgggatcgtcgcgccaggtggaggcgcgggtcaccacgatggcggcggacggccactgcgcgccatactcgcgacaggcgatgtccagccacttctgggcaccggcgtcggtgccgtaaccggcttcgacgacaaccacatcatgcagagcgcaggccatttccacggaaaccagcgtcggaatgccgatggacacgttggcgaacgggccaccgtgcacgtagaccggggagccgttcacggtctcggtcttggccggcttgaccgcgtcggccagaatgccggtgatgcgccacaggtccacgaactcgccgaaggtcacggccttgccgtccttggtgccggcgatcatcttggatacgcgctcggaaatctcgtccatcgagcgggagagcaccatgatctgcatgagctcgcaggtcggcgtgagcacgaccttctccggcacgttgcccttgccgtagtccacggcggtggagcgcagggagcggctcggcacctcggagacacgcggcacgagaatcgtgtcaagcttgccttcatcgatggccttctcggcgaaggagacgagcaggttctgggccgcctcgatggcgcccatttcgccgcacagaccccagtcgatgagctcggggtgggtcagggatgccttgccgccgccggaggcaccgcccttggaaccggctgcggtgatgcccatgctcggctgacgcagcacggcggccgcatcaatgccacgcttgttcagggcgtcgatcaaggcgatggtcgtggtggtcttgccttcgccgcgcgatgccttgagcggcgtatcggcggtgacgagcaccaccttgccgtgcttgcacggggcgtccgggttctcggccaggtacttcatgtaaccgaatgcgtcgatcttctggaccaggccgtactggctggtgaagtcttcgatggtggtcatttaatgcctttctgtgttgatgatggcggagcggggtggtggggcggccgccgccgcctcttcgcctagaaacagcccactgggctgtttcttaacagcttagcccctcagtccgcttcgcggtcatctcccctcagggaggggagctcaatacggactaaaagtcggacatgtggaagccgttcttcatttccatgctgcgagtgtacagcacggagtcaagcagcttgtcggtttcctccttgagctggtcggccatggtctggttggcggcggcgagaatctcgcgcacctcggggttacgcagcgcggcgatggtctcgtccggggtcatcggctgcacatcgccatccacgttgtcggcctcgaattcctcttcagcggcagactgcgcggcttcctcggcggccgtcaagcccagacgggcgatctgctcgtcggtggcggcgaccaagcggtgacccatcgcaccggtcttctcctggtagcgctcgacggcgttggacgtggagcggaaggcgccatcgcacagggcggcgatgatgcggttggcccagtagaagttctcggacgtcacgcgggtggtggtgtcctcaaggtaagcgggtgtggcgtccacgttcgggaagaacggtaccagcgtgttgaacgggttggacccgtatgccatccactggatggcgcgggaggcttgcgggcggtacgggcgaatctgcatcaccgcaagctggctctggcggttgatgccgatcggacggtacatgtggcgtgtgcgctcatcgcccagctggccgtacggatcgaacggagtgccctggtagtgggagctcagcacgtacttgatgtcttcgatggtcaccttgcgctccggctggcgggcccacggaatgtcgtcggaggtgggcttgtggtcggcgtccgggccgtcccacacctcgtcgtacgggttgaggaagcgctgcatgtaccaggcgcgcggggtgttgtacacgtggtcggagtcggagtgggagccgaaggcgtcgcgcgggttgaacggggtggtgttctccaccgcgaggtccaggtggttggtttcgatgaattcggcgagatcttcggagcacatgtgcgcttcctggtcgcccagagcgtcctcaaggtcgaattcgtcgataccgagctggttcggcatggtcacgtaggcctcgtccggcacgcgcttggcaatccagtgatggccgcccacagtttccagccaccagatttcgttggagtcggagaaggcgacgccgttcatctcgtaggtgccgaattcctcaagcagcgcgccgaggcgctggacgccctggcgtgcggtcttgacatacggcagcacgatggtcaggaagtcctcttcgccgatgccgccgggcacctcgggctcatcgcccctggccggcgtgtattccacgaacgggtcggcgccgagcacgcgctcgttggtggtcagggtctcggtggcgctcatcgccacgttcgcctcgttgacgccggcctcgccccagatgccttccttgaggtccgcgttcggcacggcggtgtactgcagcgggtcgtccggcagagtgatggtcaggtgggagatcactgatttgtattcgcgcggctgttcctccggtttcacgacgatgaagcgcttcgggttgaactcgccgttcgcggaatcctcgttgcgggcaatgatggtcgaaccgtcatagctcgcgtctttgcctaccagaatcgtggtgcaggccatagtgtgatggtgtcctttctcttattcaagctccccttgtcaggctgagccgttcagcaaacagcccggtgggctgtttgtaggcgagggtgggagataagtcccaccacagatgttgcgggcggtagcccgtccgtaattgcaggacgagctgtctcgcaaagcgagactgaggggtagtcactctagctgtctctcccccagtccgcctacggcggccagctccctcatcagagggagctcacatacgccaactaaaaatcacgccttaccggtcaggaagatgccgtcggtgtcgggcgcttcgccgctgttgcgcagcgcgtgcaacagctcgttgagccagaagccctgattcaagccgggcaacggcttcttggtggcccacacctgcaggtagtactcgtggtccttgtccggcggctgcggaccgttgtaccgcatgatcaccgctgggtcagtgctgcggcccaagaacttggaggccgaagaattgcggccttgcacggtctcgggaatcatggccggcagctgacgggagaagtccggcgggatggccaacgcatgcgaatcattgaagtcgtacatcagcgcgtcaatcggcagattggccacggaccagtgaatccactcgaagccgcagaccggaatcgaatccgggtccacgaactcccagtgcaggtaacgggcctcggggttcacatcaccgatgtagaacgggaaggagacgaccggcacgccgccgttgaagtactcaggcgcggcggccttggcaaaatcgtccggaatgacggtgaaatcggcggaaatcttcatatgtcccagtatcgctcatatgtgtgacgtactgggggctgtgcgttacgggggtctctcccccagtctcgccgcgctcgacagccccctcgtcagagggggctggttgcgtcgggttatggaattagggcgcagaagagggattcgaataccagtagcgggttgccgttgccggctagacgcttgcgggcgtgggccacttcgtccagacgggtcacggcaccggcccggttcaaccgcaccgacaattcggtgatcggcgagcggttctccaggttgatgaggcccaccgaatcctccgcattgttctgcagcaccgccacatcccggtagatggaggcgatggagttcagcgcacgatccaatacgtcgcgcgtacggcgggtgaccaaacgcttcacatcgtctttcttggcgatctggttgaacgcgccacgcagtttcggcgggatgcggtcgttcggtgccagtccgttgatgcggcggaattccgcttcctggccggcggtgatgcggcttgcgtccgcctcggcctgggccttggcattgtcgataaggctgccggccagcagcaccgcgtccgaggcgcgagcgaggttcagtacgcccaccaccaattcgtcgcgatccgtcatcacctgctcgtcagtggcgtacaacttggcgacgccgatgtgtccctcggccagacgggccgcacgctgcgccacttttggctcgacattggtggtggaggtcaagaattcagccaccgccgatgcggagggcacggcgaggttcacgatgcgcgtgcgcgagcggatggtgggcagtacatcctgggcgctgggcgcgcatagcagccagatgcagtgttcggccggctcctcgatctccttcagcagcacattggtggtgcgctccagcatgcggtccacatcctcgataatgatgatgcgccatggtgccgtggcaggcatttgctcggaggcggtgatgatctcgcgcacctggtcgatgccgatggtcactttgttggtggccagcactgtgacatccgggtgggtgccagcgagcacctgttgggtgacgcgcgtgggctcatcgttcatgccgtggtcggggctttccagcgccgccgcgaatgctcgggccatattggaacggccggagccgggaggcccgcaaatcagccacgactgggtgatctgacccgggtcgccctgcgcgatgcgactgagcatgtcgattaccggctgctggccgactagtgaatcccatacgctcatcggacaccgcccatcgtcacggctcctgtagacgccccggatcgcgccatcaccgtatccacatctgcaacattgtcccgcagcagtgtctgaatgtccgcttcgatggcggaccacacctgttcgatggactggctggcatcgatcacgtggaaacgattcggctcggccacggccaagtcgaggaacgcctgacgggtgcgggactggaagtcgctgccggccgactccatgcgatcttcggcatgctcaagacgattgtgggaaagcgccggatccatgtccagcagatatgtgcggtcgggcagcaggttgttggtggcccacatgcttaaggatcgaatctcttctggcgtgagttcgcggccaccggcctgataggccaaggaagagtctagatagcggtcggtgatcaccacttcaccgcgctccaatgccgggcggatggtttcggcaacgtgctgggctcggtctgcagcgaatagcagcgcctcggcgcgcggtgcgatgtcgacggcgcccccatccacaccgtgcaacagcagttggcgaatggccttgcctaacgcagtgcctcccggctcacgggtaacgaccacggtacgcccctgagcctcaagatacgcacgcagccgctcgacttgcgtggtcttgcccacgccatcgacaccttcaaacgaaacaaacagaccgctcatgctattgaccttagcgttaggcgcagagttgcgcccaacaggcagtcaaaccagctctacctccgtttcaaggggctgatttggtcttttctgaaggtctacttccatttcgaggggctgttgcccaagtagacaacgttccaaaacggcggaatgacgttggcgcggagccgttcatactcgtggttcagcagatgaccagccccttgaagcggaagtagatattctcaaaacgagaaatcagccccttgaaacgcaagtagagcaataattccgctcagccacgcttgggaattacggcggggcgctcgtagccctcattggcggtcagccagtcgacatccttcttgacggtggcggcggtggagctgagcttttcggcgatgcgctggttggaccagcccttgtttgccagcttcttcacctcggcacggcgtccggcgcgcttggcctcggcggcattggtcgcagccgaagcagcgcccttcttggctcccttggctcccgacttcgcggcaccggcacgcccagcaccgcgacggccacgggtggagggaccagccgcacgcttttcggcgagcagtcggaaggcgtcatcaggggtgatggattcaggcgtgtactgacgcggcaccgtgcggttggtctcgccatcggtgatgtacgcgccgaaacggccgtccttgatggtcacgttcttgccggtgttcgggtccttgcccaaatcacgcagcggcggcttggcggcaccacggccacgcccgcggccgtacttaggctgcgagaacagttctttggccttgtcgatatcgaccgtgaagatctcgtcttccgaggccagcgagcgggtctccgacttgccgtcggcacccgtcttggtcagataggggccgtaacgaccgttgttggcggccaccgtgcattcggatacctcgccggtttcggcgttggtttcctcgtatgtgcccacttcgcgcggcaggctcagcagctttagcgcgtcttccagcgacagcgattcagggctcatcgtcttgaacaacgaggccatcttcgggcgcgacgcggcggcggccgcggccttcttcgaacccttcttggccgcagaagcaccagcagtatcgccagcagcgccagccgaagcctcagccggcggcaccaacgccacatacggcccgaaccggccattgcgcacctcgacggtaccgccggataccgggtcaacgcccagctcgcgcggtccaccggagtggttgtcgatcaaatcgcgggccacagccaccgtcagctcatccggcgcgatggtgtccggcagggaggcgcgcttcgggttgccttcggcgtccagatgctccatatcttccagatacgggccgtaacggccgacgcgcacgtgcaggccgtcgccgatgtcgatggtgttgatggcgcgcgcgtcgatctcgccgagctgcgcgacctgctgttgcaggccttcgtgcgcctcgtcggcgttgcgggcggcgccctcgccggaaccgaagtagaagtgggtgagccagtcgcggccggattcctcgccgtgggcgatgcggtcaaggccgttttccatctcggcggtgaactggtagtcgaccagcttggggaagttcgtttccagcagcttggtcacggagaatgccaaccagctggggatcagcgcacggccacgctcatacacata

SEQ ID NO: 2480 - DNA, 13602 bp, Unknown
  R50_10m  MAG No. k141_19086
cggagcgggtgcttgccgtcaccttttcggtaaaagcggcggcggaaatgcgcgcacgattgggccagctcggcgtagggggaggtactggacgttccggttcgggtgcgggaactgccggagtcacggccgcgaccttccactcagcggcattgcatcagctcaacagcgtctgggcggacatatgcgaggctccattcccgcatgtgatcgaagatcagcgtgacgtcgtctcccgcgcgatcatccgcgccaccgcacgtaccgatgccgatccgctgaccgttcgcgatgtgctcgccgaaatcaattgggccaaaatctcgttggtggcggtggaagattatgcccgggcctgtgccatcgcccatcggcagccgcccgccggacttgacaccgctcggttcgccgacgtctacagcgcctacgagcaggaaaagacctcgcgtggcgaaatcgattttgacgatattctgctgctcgtatgccatatcatggatgattttcccgaagccgccgcccaaattcgttccaccatcggctggctcaccgtcgacgagtatcaggacgtctcgcccctgcaacacaggctgctgaccctgtggctgggcgggggagggcctgacggcaagagcgcgatgaaccgcaacgtatgcgtcgtgggcgatccggcccagaccatctactcgtttgccggtgcttccagctgggatctgctgcgtttcgccgatgaattcgggccactcgccgccgatgtcaatctcaacaccgactatcgttcgacgccggaagtcgtgaatctcgccaaccgggtgcttgcggccgcgccgaaccgtgaggattacctgaaactggtttccgcccgcgaatccggcccgcgcgttacccgaaccgcttatgagagcgatatggaagaggcgcagggcgtggcggcacgcatcgcccggttggtcgccaacggagccaagccgtccgattgcgcgattctcacccgcatcaacgcccaacagccggtattcggtgccgctttgcgcgctgcaagactgaaataccgcgttcgtaaggattcgggatggcaatcatccgcgctcgccgacgatgccgcgtccaaacgtgcgctattggaggcgatgggtttggacgccaccggacttgccgcaaacgacgatcccggcgttacgatttccacgattcacgcatccaagggtctggaattcaagcacgtgtttctgatcggctgttcggaaggactcttgccgtacggttcgccggaaacgggggatgcgctggaagaggaacgccggcttatgtatgtgggcatcacccgagctgaggattcgctgcatctgtcgtatgcgcggaccaaggatggttatggagcgcaacacagacgcccatcacgatttttgtgacgggcgtcggtaatgaatgtgaatgttcctgaacgttcaggaacgggaattggctgaaggacggttgactatgcctgcgtatcctccgagttgccgttgccgccatcttctccgtcttcgccgagaagcttggacagttcggcatcccaatcgatatcgccggtcttgccatctgcggcagggtgggaggcggaaccgttggcatcggaagaggagcctgaaggggcgtcggatgacggagacgcgccatctgcgggcttgtcgctaggcagcgaaggcagcagatcgggatgcgaccacttggcgtcacggccttcagggccttcggcggcggtgatcatctcccacaatccggcggcctcgcgcatgcgcttggggcgcagctgcaaaccgagcagactttcgaacgtacgctcggcggggccacccatcgcgcgctcgcggcgcatcatctcacgcaactgttcgatatgaggcagatgggccataccggcgcgccacaccacgcaatccacccagccctcgaccatcgccagcagcgattccagcgaagccagcgcctcgcgctgttcgggagtgtcggggatgccgaccttggtgagattcaccgcgccggaaatcgactccggatccatcgacgtggcgtcacgcagctgttcctccatcgcatccagatcgatggagatgccgcgtgcgtacttgccgatgagcgcctcgaaacgcggcatcagccacggtaccgaggcatacaggcgggcgtgagccatttcctgcagggccaggaaggaaagcacttcagattcgggaattttctcggtggtctcgaatccggagagcgcagcctcgaacgcggcggcgtcggcggaagcatcggagccggagacttgggcggtaccgtcagttgccggagtatcgctgttgccggccgaagtgaagccaatgggattggcggaagcgtcggtggatgtggagaacggattgaccgagtcggttgaagtgccggccgtatcggcctcgggcgcaggagtctcaccgttcagcatcttcgcgtattcggtggcgttctgggcaatcagtccaccagccggattcttcagcaatgcgatgccctgatcgaaactgccatgcacttcatggctcagattgccggccgcatgccccaactgcatggcaaaggacgtgttgcccagcagcttcatcagctgggctggatctttcatgccgtcgggaatcggaatcggcaccggtccggcgaacatgccggcaatctcgccatcgccgaacgcgccgccaagacgctccgaaatcaccgaagccaaagcgtcgttcatcgactcggccacaggagctgcgaacttcgcccactggtcgatggtgccctccacccagccggcgcgggtcagcacatccggatcgccgggcgcgggattgaactcgcaggcggtatccagccacaggttcgcctcactcatcgcgcggcgagccgcctcgccatccacggcggacacgctggacgcggaaccggaggcgttggcctgctgcaaggcaatcgacttggcgagcttgacgttgatcggcccttcctcgacagtgcgctgcatatcgcccatcgtgttgagtccgccggcgctgaacgcggccatcatctgctggacttcggatggattgggcagtcggctggggtcctgactcatcagctgttcacggatctcctcaggcaactggctgatctgctgccaggccatctcgccctgaatggggccgaagcatttgatcagccactcgtgaatcgcgttgtcgtccatgcgtatccttctttgccgcggtgtgttaccccaagtgtagggtctgcccgggcctgttcgctcgtggccgagcaatattttcggtttatgttcgttttcggctgatttcggccctccgcttacactgtagggtatgtttgcacgccacaggaatcaggaaccagacttcgtccaggagcagaagagcccgactgcggattcggaagcgggggatgggcgcatgccatcgttcgaagtgaagcatgattcgcgcctatctcgtggaatcagccgtgctcgggcctatgcggccgctcgtccgaaacgccatttcgtcggtgcattcgccgtgttgcttggtgtggtgattctgctgctgcccagcccgtacgtcatcgagatgcccggacccacccaagacgtgctgggcaaggtcgaggatggtgcggttatcgacatcaccggtaccggcgtgacgacgtataaggattccggcaagctgctgctgaccacggtgaacgcgtccggcgtgcccgggtacccgatcatcaacgcgcaggccgtctggggttgggccaatccgcaggtggaggtcatgccgcgtgaggccacggtaccggtgggccagagtgcggaccagtatcagaagaaagtcgaacaggacatggccggttcccaggattcggccagtgccgtcggtctggcgcatgccaaagcccatgcggacgaactgggcattgacgccagtacattgcaacacgccaaggtgacgatgcacgtggacagcatcggcggaccgtccgcaggcatgatgtacacgctcggtctcatcgacaaactcacccccgccaacgagagcggcggcaagaccatcgccggcaccggcaccatagacaaggacggcaaagtcggcagaatcggcggcatagcgctgaagatgcttggcgccaagcgcgatggcgccacatggttcctggctcccgcatcgaattgttcggatttggccggccgcgtgccggatggtctgcgcgacgtcaaggtcgccacgctggacgaggcgtatcaggcgttggtggccatcggcaaggggcaggccgacgatttgcctcattgcgaggcatgacacgcgcggccagtcgttgtttctggtgagacgactcgcatgggtctgcccacaatgcggcgattttcggccgcgttaacgcatttgttcgcgaagacttgctaatgtgtcccctgtgaatcaaacggcatcacagaacgctgaagaatttggtttcgagcccggcgatatcgtccaggagtggctctgggacgacgatgtggacgattccattcgtgcccagattgaagagctcacgggcgaggatctcgtggacgaggactacgactccgctgtggacggcgtcatcgtatggtggcgcgacggcgatgatgaggacgaattgtccgatacgatcgttgacgcctacgcggtactgggcaatgacggcccgctgtggatactgactcccaagcccggccgcccgggtgccgccagctcctccaccgtgcagtccgccgcacagaccgccggtatgaacgccgccaccccgctgaccgtcagctcggactggaacggcatccgcctgcgcgcattcggcaggggccgctgataagcctcaatcaatacgcttgactttaagcgtgttgactggcgtcgcgtgctgcgtagtgctgctgggcgtgactgaatgtcatcgcgattgagcgctacggcacgcgtatgcgacaccacgtgtcgcgcagtgccggccatacgctattgttgtcatttgcgggcaattagctcagttggttagagcgccacctttacacggtggatgtcgggggttcgagtccctcattgcccactttcatttttcatcacttcgtgcaatcccctcattccacagacatgggctgtgacgatattccctgacagtcttcggcaaggggttctgaaatctcagtgagatgcgcgcagaaggaaaccggcagtactgctacaaaatcgtgaatttcggtcttcttggtcagatgcgtctcaatagtcacgtaaagttgtggcagagtgtttatatccagcaggaggtcgaatagccgatggcgcaggaacttcgtgaaggggacggcaagtcgggcatcgcacgtgcgggcaagcgcaagtgggggtatgaccccgctcaggtggacgctttcttggagcgcgcccatgctctgtatgacagcgagggcatgaatctcacccagcatgacattcagaacgcgtcctttgatttgcgcaagaacggctatgtgatcgcacaggttgacgccgcgcttggacgtctggaacgtgccgtggtcgataagcagaccacatgggagatcgcacagcacgggcgtgtgacgtggaaggcgaagaccgagaagctgtatcacgaagtccagaaccatgcggagcgtgacgagcgcgaacgcttcaagtccggagcgcccaagcagccttcgtacgataagaagcaggtggatcgtctggtcgaccagattgtggacaaggcggcggccgcattgggcgttgacggcgtgaccgaagacgatgtacggtctttggccgatctcaatgcgaatacggtcaacaatgtgatcttcacccagcgcaagggcaagaaaggctatgacgagcgacaggtcgattacttcctgaacgcctgcgtgcagttgctgagtcgcttggaatcctatgcacgtgtggccgatttcgtgtccggcgagcccacggctcctgcccagaccgccacgaacgtgaccgttcaagcgaacggcgtctcgccattgttcgcttccggaacgcagcgcccggcaactgacgaacgttttgcgccgtctgccgctgctcatgacgaatcattcgatgccctgcatcaggccgagcagagcttgttcactgctccggctccggttgctcccgcggcgccggccgcggcggcaccgattgcctatgcgtcggctcctgcatcgttcgatgcttccacaagcaccaataacaccaatgcggaacagccggtttcctttgctcccgcagcatacccggtgcatacgtccaacgagtctgcggcgaagcccgtctccgagacgccttccgtggctcctaccgcagctgttgcggctgagcctcccgccagtgccccgtccgcaccggtttccggtgtgaccgctggcagcgccccctcgtttgctccggcacagtcgtcatacgaatccgcagctccgtcatcgaccccgtcggtgttcgcggaacagcccgtggatatggtgcaggacggttcctctctggccgctctcgcccacatggctgcggtttctcaggaacttccggcggtggatgcgccgtccttcgctcccaagatgcccagccttgatacaccgaatgcgctgaaattgaatgaggtaccgggttcggtttcatccccggcaccctctgccccggcagtacagcctgtgaatagcactgctgacgaggctgcgtccgctgccatgccggtctcctttgctcccaccagcaagccggatcgtaacacgaactccattccggttcgcgtatccgatagtcagcctgcagacagcacggtctcccgtccggctgtggaatcatctgaatacgttgccgcctcccacgacacggaagcagctcagccgtcacaggataagcacgattccaacgattcgttcccgctgctgttcccgcttggcggtaacttcgattcggatatccccgacctgtcgttccccacactgaacaatgacgatacgaagaaggaaaagtgagcatagcctccaactccaccgtcatcattctcggatccaccggatccatcggcacccaaggacttgacgtcatctcgcgtcaccctgaacgatttaccgtcaccggtctggcggcgggcggagcacatatcgagctgctggcgcaacaggccgcacagttccatgtgcccgaagtcgcggtgtttgatgagaccaaggttccagcactgcaagcggctctcgcacaggccggcgcacaaggtgtccgcgtgaccggcggtccggattcggtcatcgccatggccggatccggtgcgaatgtcgtattgaacggcatcaccggctcgatcggcctcgaaccatcgatcgcggcgctcaaggccggttcccagctggcattggctaacaaggagtccgtagtcgcgggcggtcatctgctgttcagcgcgcaagtgcgcgagaaccagatcaacccggtcgattccgagcattccgccatctggcaatccctgcgctccggaacccacgccgaagtcgccaagcttgtggtcaccgcctccggcggcccattccgcggctggaaacgtgtcgacatggagaacatcactcccgagcaggcgctgcatcatccgacgtggaacatggggccggttgtcaccatcaactcctccacactgatgaacaagggcctcgaagtcatcgaggcgtcccgcttgttcaatgtgtcgcctgaacgcatcgacgtgaccgtgcacccgcagtccatcgtccattccatggtcgaatttgtggacggcgccacgatttgccaggcttcgccgccagacatgcgtctgcctatcgcgctgggcctgtccgcgccggaccgcatgaccaatgtggccgccgcgtgcgactggacgcaagccgcaacttggacctttgagccgttggacgatgaggcgttccccgccgtgcaactggcccgccactgcctggccgcctccgagaagcatacggcggtgctcaatgcagccaatgaacaggccgtgcatgcgtttcttgatcatcggctgccgtacctcggcatcgtggacacggtcaaagccgtgctggaccagatggacgccgagcttcgtggtaacccgctgttcacggacgtggaggaaatgaaccagcttgagcttgaagcccgccgacgcgccgacaacctgataaacaagcaatgatgaataccttgaatacggaaaatcccatcgaaaagccgttccgcaaaaccggtgatccggtcgacctgaccagcgaatcgcccttgcacccgcgccgcaagtcccgccgcatcatggtgggcccggtgccggtgggcgggggagcgcccatctccgtgcagtcgatgaccaacacgctcacggccaacgtacctgccacgttgcagcagatcgccgaactgaccgccgccggctgcgacatcgtgcgcgtggccgtgccgagtcaggacgatgccgacgcactgccggaaatctgccgcaaatcgccgattccggtcatcgccgatatccacttccagtccaaatacgtgttccaagccatcgacgccggctgcgcggccgtgcgcgtgaaccccggcaacatccgtaagttcgacgaagtcggcccggacatctgcaaggccgccaccgacgcgggcatctcgctgcgtatcggcgtgaacgccggctcgctggacaaggaactctacgccaaatacggtggcccgactccggaagcgctggtggcctccgccttgaaggaagcgcacatgttcgaggacgtcggcttccatgatttcaagatctccgtcaaacaccatgacgtcatcaccatggtcgaaacgtaccgactgctcgcatccaagggcgattggccgttgcacctcggcgttaccgaggccggccccgcctggcaaggcaccatcaaatcctgcctggcgttcggtgcgctcttggccgagggcattggcgacacgattcgcgtgtccctttccgcgccgccggtcgaagaggtcaaggtggggtgcaaactcctggaatacatgggattgcgcccccgcaagttcgacatcatctcctgcccgagctgcggccgcgcccaagtggatgtgatccagctcgcatccgccgtcaccgaaggcctgaaggacgtgaccgcgccgatccgtgtagccgtcatgggctgcatcgtcaacggtccgggcgaggcacgcgaagccgacctcggcgtggcctccggcaatggcaagggccagatcttcatcaagggcaaggtcatcaagaccgtgcccgaagaccagatcgtcgacacgctgctcaccatagcgaacgatatcgccgcccaaatggaggccgacggccaagtgcccgtcaattccacaggcccggtcgtggtcccaatccagcatcccggtcactgattcggccgaataggccctcggcgtaaatatcgcggtcagattacaatagcgcacgtgtcgcaagaagaagagcatcgcctgactgttcgatccaagccgtggaccagcacccaccggctgatggtcagcctgcccatcttcattatcctgatcggcgtgctggtctccatttccaacctgaccacggtgccttggaacatcgaacccaccggccagtcgatggccacgctcaccgacgataccgaagtcaccttcgataacccgtccggagaaacgctgccggcgaaaggcacgtatgaggtcaccgagcgatacatcacgctgaacatgaccagcgacggcaatctgaccaaggagcctggtgatcggggcaaggccaatgcggacggcgtccaagccatcaaggtattgattcgggaacctcagaacgcatcaggcaagcgccccggcgtggtgttcatgcacggtgccggatacggcacctgtgacaactcctttggcgatgtggcctccgatatggcttcggccggctttgtgaccgcagtgctcgacaaacccgtctggagcaccaccgacatcaaccgcgattatccggcctcagccaaggcatatgatcaggtcatcgaatacctacgagcccaaagcgatgtagacgccgccaaggtcggcatctatgccacctccgaatcgacatggatctcctcatatctgctcgaggacgatccggacgtcgccttccagattcttctgagcccgatggtgttcagcccacgccaatcactgggatttttcgtcacccaggacttcactcttgtcggcgcgaacgagggctatcgatccatcgtccaacgcgtgttcagcgcggacaccggcctgttcggactgaacaattccgacctcgccacgctcaaacccgccgcttacgccgtacccacctatgtggcttacggttcaaaagacgtgatgacggcgcaggtcgacggcgtgcgtgcgattctctacaacgcccacaaagccgataactggaacgtgaccgtgcgcagctatccggtcgccaaccatgtgctgcgtttgggggatgagtccgaagcgggcaccccgtttgcggacgcctatgtggacgatctcatcgattgggccgtcggcacttccgccggactcacgcagaccagcgaaaaggtggccggcaccaatctgtaccaatcaatcggtctgccgggcgctttgaaggcaagacgcgtcggcaccatatatggtgtgatcctgcacgtcacggtggtactgctgctgctcgcatccatcgtgctggcactggtggcgctgggccgcaaaatcgcggcggatgcccgatggcggcgcgagaaacgcgaggccaaacgtgcgggcatgctgataccggaacggcctgtgatactcggtttcgcacatggtttcggcaacgcgctgctgactttgaccctcaccactcttgccacactgctcatcttctttgccggacttggacaggtgattatgggtgtggtcaaacttgcatggggcagcgctcctaccgagacgccgggcgtcatgtattggagctggccggtcatccaagtggtgtccgtgctggtgctatgggcttggtcccgcgtctttatgcatctgatagaggtcgcttccgcccgcggactgattcagataccccctcgtcgtgaatccgttcgagacatcgtcaccggtgccgacccggtactcgcctccacccgtctgggccgagtcctgttctggctggtggccttcaccatgctgtacatactgttggtgttcgccttctggggcctgtttatttactgactacttcattgagtagagtctgccgggcgtcgcggggaaaggagatgagatgtcgctgtaccgagacgaaggtgtggtgttgcgcacctccaaactgggcgaagccgatcgtatcatcaccatcctgacgcgtgagcatggcaagattcgggcggtcgccaaaggcgtgcgtcgcaccaaatcacgctttggtgccaggctcgagccgttcatgcgagtcgatgtgcttatcgctgaaggccgctcgcttgacgtggtctcccaggctgaagcggtcgccgcttacggtgctccgatcgcggcggattatgcggcgtatgaggccgccaacgtcatcgtcgagaccatcgataaactcgccagcaccgaacacgagcagctgacgaaccaatatcggctgctcatcggcgcgttgaacgcgctcgccaaacaatcccacgccccgcaagccataggcgactcctatgtgatgcgcgccttggccttggccggttggacgccacgattgggtacttgcgtggtatgcggcaaggcggagccggcgtacctgtccatcgcgtccggcggcgtgatgtgcgaagccgaccacactaccgatgcgcgccgtatcgcgccgttcgtgttaaaccagttcgatgcactgattcgtggcgattggtcggtgcttgatgccgcgcctgtggagcgggttgtgcaggagttggttgaagattggggggagtattacctcgaacgcccgattcgttcgctgcgcttgatagattcatgagtatggcttttgagaacgttgattacacgtcgttggacattcccgcagctccgttcagcgaccctgcccgtattcccgacttccccaagaacaaggtaccccgccatatcggtgtgattatggacggtaatggtcgttgggccaagcagcgcggcatggtccgcaccaatggtcatcaggccgccgaaccggtggtgttcgacactatcgccggtgccatcgaagccggtgtgcggtatttgagcctgtacacgttctccactgaaaactggaagcgttcgccccaggaagtgcgcttcctcatgggcttctcgcgtgaaatcatccaccgccgcgtggaacagatggacgagtggggtgtgcgcgtgcgttggtccggccgtcgccccaagctgtggaagtcggtgatcgacgagcttgaggccgccgaggaacgtaccaagaacaacaaggtcatcgatgtggtgttctgcatcaactatggtggccgtgctgaaatcgccgacgcctgcgccgccatcgctcgcgaagtgcgtgatggcaagatttccggcgaccgtgtgactgaaaagatgattgccgaccatctgtacaatccggacgttcccgattgcgacttggtgatccgtacttccggcgaacagcgcacctccaacttcctgccgtgggaggccgcctacgccgagctcgacttcgtgcccgaactcttcccggactgcggccgtgacgtgctatggcgctccatcgaccattacatccaccgcgatcgccgatttggcggcgtgaaataaagaacagtccggtggactgttcgttcacgccgcctggccgaggccgataggacatgaccaggtaatgatgagtccggcgaagccggtccttgattgctggggtgtgaaatagtccttgttaagcccctcaaaattgagggggctgagccgtaaaacaaacagcccgatgggctgtttgtaggcgaaggcgagacgagagtcgagccagaagaatgcgagcggcagcttgtccgtaattgcggtcgagctgtccgtgtagcggactgaggggagttaccggcacacctcagccatcctctctgcaaactcatccaaaaaacgtcccgaatccgcaccaagtgccacatgcacatgcggcatggaatgattcaccagcccaaccgggtctccggtggtccggcctcgtactccattgaaatcaccggtattggtctccgcgcgcaacgcaagatcaaaacaatcgaccagtgaagaatcaagtgcaaccgccgccgccaacggatcatgcaacggcatgccgccagagaacagtgcggggtcggcttccaaatttgccttgatggagaagtccgcgagatcagccaagaaccgcccgcgcttggtccccgtcgcacgccactggtcggccgccgatcgcggtagcaaacactggtgagtcacatcaagtcccaccagtgtgatgtctgcgccggaatgaaatactcgattcgcggcctcagggtcttggatgatattcgtctcggccaccgcatcccaacaattgccgggttgggtaagc

SEQ ID NO: 2481 - DNA, 9768 bp, Unknown
  R50_10m  MAG No. k141_19154
caacgaaccgcagaccgtcaagattcagctcggcctgatcgccaacgaactgcctgactccaccaaggaatatgaggcccgttacaccggcgaccttaaggatgctgccgcctcctacaaggattccgtgaccacctacaacaagtggtgggtcgataacgctccctacgtggacactccggaagacaatatcgataagaccgtggtctaccgctggtggctgagccgtttcaacatgctcgacgccaacatgcctggcaacaccttccagtacccgacctccatcgagggtgtgctcggctacaacaaccaaatcgtgctcacctccggcatgttcatgatggacaccaagtggttccgcaaccccgagtactcctacggcacctggctttccgccggcgataccgccaagaagagcaaggcgggctattactactaccacgacaatccgggcgacccggccaactggaaccatagctacacgcagtgcatcacgcgcgccggctgggactcctacaaggtgcacggcggtccgtccaccgtggccgaggagctggccgaccagggtgccgaggacgtgcaaggtctactcgcttccaagagcgagccggacaacaacgacaaccagaacaacaatgacaacagcttgattgactggtcctggtggtcgatgaccggtaacgatgccgacgccgtttccttctctgagccgggtcgctccggccagcgcatggatcgcgccgatggttccgccaatatgtgggccaacgccaatgcggctgctcaggcctacaaggccgctggcgataccgccaacgccgagaagatgcaggccatcgccgacaagatccagaaagaagccaccactgaactgtgggacaagtccgacaacctgctcaagcacaagtggctgaacgacggtgctttcgccaagtacaaggagatcaataactactacccgtactccgaaggcctgatgcctaccggcaacgaagattacaacaaggctctgcgcctgttcgaggattccaacgagttcccgatcttcccgttcttcaccgccaaccaggcggacaaggcggcgctgaacttccccggttccaacaacttctccattatcaacgcacagccgctgctgcaggtctattcagccggcatccgcaattacgatgcagccaagaacggttacatcaccaatgagcagttcaagaaactgctgtactgggtggcgttcgcgcactatcagggcggcgataacaactaccttgatcaaaacgagttctggaacgaggataacaacaacgtcggcgatgtaaacggtgacggcgtgatcaacaacctcgacaagaaccttgacgccgcacagaacggcggcaagatcacctaccgctcctggatccaccacacccagctcggcaccacgaactggacgatggtcgaggacgtagccggtatggtgccgcgcgaggataacaagattgagctgaacccgattgagatccccggctggaactacttcacggtgaacaacctgagctaccacggtcaagatgtttccatcgtgtgggataaggacggcagccactatggtggacctgctggctacagcctgtacgtggggggcaagctcgccttcacttccgacaagctcgcacacctcatttacgatccgtccacgggcaccgttgaggatgccgacaaggccggcgtaaccatcaccaatgccgctggttctgatatcaaggccgccaaccaggttgccttcaccgccgaccagcgtgtgaccgacctgttcgccaagtccggtgccaacgtcgactccgcttccaagtccaccacgaatgtggccaaggacgcggacgtgaccggtaccacctacgccgagaaggacaccaactacccggccaagaacgcggtggacggcaagaccgtgatggaatcgttctggggtaccaagggttctgagaacaagaccgacacgctcaatatcaagttcaaggacggcaagcagaagatcgacgacctccgcttgtacttctaccagagctcgtccagccagaccatctccggctatgccgagcccgccaactacaagttggagtaccagaaggatgacggcacatgggccccgattgcggatcaggtgcgcaccccgaactacgcgggcgcgaactacaaccgtatccagttcactccggtggagaccacgactatccgcgtcaccttcacgccgcaggccggcatggccgtcggtgtcaaggagatcgaagcctacaacaccggtatcaaggctgacggcacttccgagaaccaggctccgcaggtggatgcttacgtgtcttccagcacctcatccggtgccaagctcgtcggtacggtgaaggatgacggtctgcccgcagaaggcgacgtcaccaccaagtgggagctggtttccggccccgagggcggtaccgcgaagttcgtggacgatactgctgccagcaccaccgtcaccttcaacaaggaaggcgactacgttctgaagctcaccgcttccgatggcgagaaggaaggctccaaggaaatcaccgttcacggcatcccctctgacggtaccgtgaacgtagccccgcagtcgagcgcctctgccagctacaccaacggctaccagccgaaggacaacgccaagaaggtcatcgacggtcaggtggtatacaccaacacgccgaacgagacctggaacaactggggcgacaacactggtgtggagccgtggctgcaactgaagtgggccggcaaggtgccactgaagaaggccaaggtcttcttctggaccgatggcggtggcgtgccgatggcctcatcttggaagctccagtacgctgacgctgacggtaactggcaggatgtgaagctggctgacggccagtcctacacggtcaatcagaacgaaggcaacgaagtgaagttcgccgacaccgtcgaaaccgacaagctgcgcgtggtcttcccgaagggcgccatcgtgggtgcttccgagttcgaggcgtacgccatcgagccggtgagcgtggacgaagtcaaccgactggtgcagaccggttccaaggccgatgatctgaagctgccctccaccgtgagcgccgtatacaccgacggttctcgccgtgacctcgccgtcacgtgggataaggtgaccgacgctcagctggccgccgatgccgtattcgatgtcaagggcatcgtcgctggtgcgctgagcggtacggttgcacacatcgcagctcgttccgataccgcattgcagaccgtgggtaatgcgcagccggttgagcagaccgtctaccagaacgccaagtccatcgacctgcccgccacggttccggtgaagttcccgaacggatacaacgacgaccgcaaggtcacgtggaaggatgccgacatcaaggccatcgacctgaccaaggttggtgactacgaggtggctggtaccgtcgacgacggttcgtcttccgcagctgccaagctcactgtccacgtggttgccgacccgaacggttcctccactcctgagcctgagcctgagccgttggtcggttggattgaaggcaaggcgaccaagaccaccatttcgcctgattccgaggcgacctggtcaccggccgaaggcaagctcaacgacggcgtagtcgtcgatgatacttggccgaccacggatgatcagaacgtcaacgacaaggtctggggttcttggggcaaggcaaaggacggcatgtacgcccagtacgacttcggtcagtccgtgaccgttgaccagagccgcgcccagttctgggccaacttcgctgagactgacgattcgaagggtggtctggaagtcccggacgcttggaagattcagtacctcgccgaggatggttcttggaaggatgtcgagcccaccgaggattacaccattgtgcgtaactcgccggcttctcgtgcggataccgatgccaagggttggagcgctgtgaccttcaagccggtcaccaccaagtcgctgcgactcgtgctcactccgcacaccggcagcagcaccttcggggccgccgtggccgagtggggcgtgcatggtattgacggcaccgagcctgaacctaccccggtcgacaagaccgcgctcgagtcggctcttgacacagccaacggcctcgatgcaagccgctacaccgccgcttcatgggctgagttccagcaaatcattgacgctgcccaggctgtgtacgacgatgccaacgccaccgcagaacaggtcgccgagcaggtgaccaagctcgaggacggccagaaggcactcgttgcgctcgccaccgacgtggagaagtccacgttgcaggcggccatcgatgcggccaaagccgaggccgcttccggcaagtacacggataagagtgtcgaggccttgaacaaggccatcgaggctgcggaaggtgtgctcaaggtcggtgaggtcggtgaggtcactcaggccgccgtccaggaagcgtccgcttcgctgaacaaggccgtcaaggccttggaagagaagcccgccgccgaaacggtgaagaaggagtccctcgaggcttccatcgagcaggccaagaaggctgacaagtcgaagtacaccgaggaggcatggcaggctctgcagagccagattgccgccgctcagaaggtgtacgacgacaaggatgccaagcaggccgatgtcgatgccgcacaggatgcccttgacaaggcattttgggccaccaaggttgagcagaagcccggctcccagcagcctggtgtgaccgacactgataaggatgataaggacaacaagggtgatcgtgtgcctccgactggtgccgcggtttccgtagttgctgcggctgccgtgctgctcaccgccgcaggcgtgaccatcctgaagcgtcgccagtccggcgaccacggttcggctcgccactcggcctgacccgcaacggagtcattctgccgagtgagccccctcacagagggggctctagccttttccttctacccatcattactcttttcactcactcaatgaggagcactatgagtttccatgtatccgcgcaatcggttcgcgcggtggccggtggactcgtcgccgcagcgacattgctgtcaggccttgcccttgcgccgaccgcaatggccgccgattcagccaccgctgacaacgcgcccagcgttgccggtcacgcgtataacgaactgccgtataacaatcctgatgtcaccgtcacccaaatcgacaatagcgcactgcccagctacatgcgcaaccccatcgggcagaacgagggtattgacaccccgaacgatctttcgcagaactactactctgcagatgcatccgcgctgagctatgacggcaaactcttcgtcttcaccggtcacgatgaggcttcgcccgactacggctccttcaacatgaaggactggggcgtatacgtcaccgatgaagacggcctgaatcaaggcaaatggacacattacaagaccatcgccaaggcagacctgttcagctgggccaccggcgatggcgcgtacgccggccaagtcgtagccgacgataacggcaccccgagcgacacttccgatgattggttctactactacgtgccggtgaaggacaaggcttctgaggcggctggacaggacccgttcgccatcggcgtggccaagtcgaagagtccgctcggcccgtggaaggatgccatcggcaagccgctgctcaccacatcgcaaacccagattgaaaccatcgatccggcattctttgtggacgaggatggcaccggatatttgcactttggtacgttcggcactcagctcgccatcaagatgaagaaggacgccacaaccggccgcacctcatacaccgaggtggaaaccaaggctgatggcaccacgccgaacctccacaccatgaaggacacggacagcaacgcgaacggcccgaagggattcttcgaggcggcgtgggtgttccgtaagggcgatacctattacaacgtgtacgacggcggtaagcccggttcgggcacggccacctgcgtggaatcgaactatcaagcttgcatccagtactccacttccgacagcccgctcggcccatggaagtaccaaggcgtaatcgtgccttctggctcggccaccacgatgcacccctcggtgctccagttcggcgacaaatggtatgtgacctatcacaccggcgacaaggaaggcggcaccgatttccgccgtgccgtgtgcattgatgaagtcgattggaccgccgacggccagatggtttccaccgcccatccaaccaaggccgagaaaacgcagccctccaccaacgtggctccgtacgcaaaggtgagcgccacgttcactgaaacgcctgcttggaagggttcggtgaacgacggccgtgtgttgcaaaccgctgtggtcccgccgaatcactggaccaactaccgttctatcccgcaatcgcagtccggcgattctctggtctaccaatgggatggcactgtgcgcgtcaactcgtctaaggtttggttcgacgtggattccaacgctctgcgcgcgcccgcctcgtggaagattcagtacttggacgcggacggcacatggaaggatgtcaccaacccgagtgcctatacaacgaccacaggcaaggccaaccccaacgccgtcaccttcgatgcggtgaccactactgccttaaagctcgacatgaccggtcaagctgtggatggcggctatgcctccgtggccgttgctgaatgggaagtcggctccgactccagcgaatcgccggcaatcactgcgccgaagagcgtgaccaccgccaccggtactgcgcctactctgccggccacagtggatgtgaagtacgggaacccaactgttgcctccccagtaatttggcgtccagttgatgcttcctcgtatgccaaggtcggttcgtttacggcctacggcgtggtcgccggcgtgcccggtgaggcaagcgagcagggcaatgtgtcggtaaatgtcaccgtgcaggacggctaccagcctgccgctgataccacgaagccgactgtaaccgttgccgttactgctaacgcaggcaatagcgagtggctcaccaccgctccgttcgccaccgtgcaggccacggacgacaccgcacctatcgccaagctggagatttccgctgatcaaggcaagagctggaccaccatcgccgcgaatgcaaacgcggccattgccacgctttcccagcagggcgatgtcgaagtgtgggctcgcgccaccgatcaggccggcaacgtttccgacgtggccaaggccggcggcaaggtggactccgccgcgccaaccgtgaccgccgccgccgataaggaggagcgcacgctgaccttgaccgctgatgacggcaccggttccggtgtcgcatcaattgaataccgcattggcacagacggtcaatgggccacgtacagcaagccgattgctgcaccgagcgcgtcgcgcgccaccgtgtactaccgcgccaccgataaggccggcaacgtgtccgcttcggcgaaaaccgacattccatccgacacttccgtgccgctgaccggctacattgagggcgatgccaccgccaccgatgtggacggcaaggcatccggctgggtcaagggtgccgccgcgttgaacgacggcaagatcattcccgatatcaccattgccaacgaggatgtctggggcacttggcccaacaccggtgagatgcgcctcgactacgagtgggaccgtgaagtgactatcgactctagccgcgtgcaattcacctcggatgatggcggattgggtattccggcatcgtgggaattgcagtactgggacgccttggcgaacaacggtgccggcaacttcgtggatattcccgacgccacctacactgtgaccgccaattcaccgtctgctggctgggccaccggcgatgccaaggggtggtctgatggcacgtggaacactccggtcaagactaccaagttgcgtatggttatcacgtccggctcggcttctccggctgttgccgaatggcaggttcatgccattgacgacagtacgcctgagccgcctgagcccacaccgatcgacaagaccgagctcaagcaggcgctcgctgactcgcctaaggctgacgatgcctccaagtacaccgagacttcatgggcggagtacgcggcggtattggattcggcgcagcaggtgtataaggctgaggatgccaccgaagctgcggtggtggatgccgcaacccagctgaagcaggcagcgaagaagctggtgcttgtagctacggtgcaagatcgtgccgcgctgagcgctcagctcgatgccgctgctgccgtggatcgcacaaagtggactgatgaatcgctggccgtgcttgattcggcagtcgctacggcgaatgcgctgacgagtgatggtcaggccgcccagtctgacgtacaggctgcgactgaggcaatcagcgatgccatcgcgggtctggttgagaagagcaccacgaagcctggccagggtggcgataagcccggttccggcacggacaagcccaaccaaggcaacgattccaaccagaacaagggtgatgcagactccggcaagcacaagaagatacctgacaccggtgcagccgtgcttggtgttggcatcctcgccgtggtacttgctgttgcgggtgtaatcatcctcaagcgccgcaagtccggtacctgctagtcccactcgctcggcctagcatcaccaagcccccgcgcatgaacagcgggggcttcacttttgttcaataacaagcattatgtgcgcgtatgagactacgatggtggggaatctacgaacaggggcagcaatgacggcatacatggaccataaggatctcgccaacgaagttatcgatcaggcgcgcgcacaagagattactgatggtgtgcatcgcgtgcttgaccggattgcctcagcggagtccgcagccgggcgtgctgccggttcggtccaattgctggctgccaccaagacgcgcgatgtcggcgagattctggcggctatcgatgctggtattcgcgtgattggtgagaatcgtccacaggagattactgtcaaggctgacggtctggcaaaacgactgggggagcgtggttattcgctaggcgtgattgatgccgctgaggctgacacggccaatgccgcagctgcaacgcatattcccttccatctcatcggccaattgcaagccaataaaatcggcaaggtgctgccggcggtggacaccatcgaatccgtggattccatcgaactggcggagaagatcgcccgccgcgccaccatgcgcggcatcacggtcggcgtgttgctggaggtgaacgaatccggcgaggaatcgaagtccggctgcgcacccagccacgccatcgacttggcccagcgcatcggtgcgatgggcggactgcgcttgcaaggattgatgaccattggcgcccatgtggatgatgagcgcacgattcgtgcgggcttcgcgcatctgcgtcgcactcgtgaccagattcttgcctccggtgccgaaggcacggccgactgcaccgaactgtcaatgggcatgacccacgacatggcctacgccatcgaagaaggctccaccatcgtgcgcgtcggcaccgccatcttcggcgagcgcgccttcatctgattggagctatacgaaaa

SEQ ID NO: 2482 - DNA, 4654 bp, Unknown
  R50_10m  MAG No. k141_19205
ccaggccccctctgacgaaaagacccccgaccccctactcgccgccttccgcgccgccgccacaaccgccggcctcttcgatccggcggaaggcccggcctacgccgacaccatcatgggcatcctctccgccaaccccgccgatctcgacgaccggttcctgctcatcgagcacagggacggcggcatggccgccatgcaatggttctacgactactgtgtggccaacaattatgtcaagcgtgcccagctcgaccggaacccgcgcttcgactcgcacgggctgacggtgaccatcaacctcgccaaacccgaattcaagaacatgaagaaggcggcggccggcaacgccgtgtccggcggctacccgaagtgcacgatctgccatgagaacgagggcttcgccggacgtgacaagcgcacgctgcgcaccctgccggtcacgctcggcggtgagtcatggttctggcagttctcgccctacggctacttcgaccagcacggcatctgcgtgaacaccgaccacacgccgatgcacgtggaccgcgacaccttcggacatctgctcgacttcgtggaccgcttccccggatacttcctcggatgcaacgccgcgctgcctcgcatcggcggctcggtgctcgcccatgaccattaccagggcggcggcgaactgctgccgatgcacaaggccgccacttgggccgccttcacgctcgccgactatccggacgccgtggtcgaaatcctcgactggcccggtaccgccgtgcgtgtggtgtcgaaaaaccgccagagcatcatcgacgtatccgacatcatccgcgaggcatgggtcggttatgacgacgcggcgaacggcatcgccagccatgacgcggacggcaaccgccaatccgccctctcgcccagcgtaatcatcaccgaacgcggctatgagatgagtctcatcttccgcaacaatgcgatcagcgacgagtacccggaaggtattttccatgcacaccccgaatactggccggtcaagcaggagccgattggactgatcgaagcccaaggcctgttcatcctgcccggacggctcgtcgaccagctcggcatcgtcgaggaggcgctcgccgaaggccgcgatttgcccgatgaagtcagcgaattcagtctcgaatggggcgaactcgctgaaacattggccggaaaccgcgaccgcgaggccatccaccaagccgtacgtgacgagctcggcagtgtctgctaccgcatcctcggcaacacggccgtcttcaagcagaaagccaccacgcaaacattcctcgaaagtcttggttttgccgctaggtgaaacaggtcaagtgaagtacgctcaatactgaaggaaaaccgaaggcaagtccttccaaaggaggagatatgactactgttctggttacgggcggtgctggattcatcgccacccacaccgacatcgaactgctcgacaagggctacgacgttatttccgtagataactacggcaactcgtctcccgtggcgcttgagcgcgtcgagcagatcaccggcaagccggtcaagcgttacgacggtgacgtgcgcgatgaggcgcttatggaacgcgtcttcaccgaaaacaacatcgattgggtcattcacttcgccggtctcaaggccgtgggcgagtccgtggccaagccgatcgaatactacgacaacaacctgtactccacgcttgtgctgctcaaggtgatgaagaagcacaacgtcaagaagatcatcttctcctcctccgccaccgtgtacggcacgccgaaggaactgccgattaccgaggagacgccgaccggcggcaccaccaacccgtacggcacctccaagctgttccaggagcagattctgcgcgacgtacatgtggccgatccgtcctggaccatcgtgctgctgcgctacttcaacccggtcggcgcacacgagtccggcctgctgggcgaagatccgaagggtattccggcgaacctcaccccgtacgtggccaaggtcgcggtcggcgagctcaaggaagtccaggtctacggcgacgactacgacacgcccgacggcactggtgtgcgtgactacatccacgtggtcgacctggccaagggtcacgtggccgtcattgaccacatcgacaaggaaggcgtgttcgtctacaacctgggtaccggccacggctactccgtgcttgaggtcatcaaggcttacgagaaggccgccggtcatccgattccgtacacgatcaagccgcgtcgccccggtgacatcgccgcctgctacgccgacgcttccaaggcggagaaggagcttggctggaaggccgagctgaccatcgacgacatggccgcctcctccctcaactggcagaccaagaaccccaacggtttccgcgacgccgagtgatatgagcagatgagctccctctgatgagggagctcatctgtcgtttatcacacaatgcgcctatcggcggcccagcgggtgagctcggtgcgattcgaaagctgaagctttcgcagcaccgagctcacgtgcgtttcgaccgtcttgatcgaaatgaacagttcggccgccacctctttatacgtgtaaccacgcgcgatcagccgcatgacctcctgctcgcgggcggacagccggtccagctcctcatcatgagcccgtgccgcaccatcagcgccgccatcagaccccgccgccggcacaccctgaaaggccgaaagcacaaaaccggccagttttggcgagaacacggcatagccctcatgcacctgcttgatggatgaaatcaaatcagcgccggtaatcgtcttggtcacatagccctgggcgccggcgcgaatcaccgcccccacatcctgcggcgcatccgaaaccgacaacgccagaaacacggtagtgggggagtagggccgcgatttggcgaggatctcggcaccgccgccaccttcaccgccgggcacgtgcacatccagcaacaccacctgcggcttggtctgtgcgatcatcgccaccgaaccgggcacgtccgccgcttggccgacgatatcgaaggaatcacgcaacgtggcgattacgcccgcacggaacatctcatggtcatcgaccacggccacacgaatcttggctgtctcattctcgctcatcgatgttctccctgcgccgctttcagcgcgattggcatatgcattctgacctcggtgccccagccggccctggacactatctccactgtaccgccgcgccgtttgacgcggccgataatcgattcgcggatgcccagccggtcgggcggaatggcgtccatatcgaagccttcgccatggtcgcgcacgaacacttcaaccatcgtgtcgctggcctcgcaatacaaagacaccggctcgccgccatgcgtgaccgcattgaccaacgcctgacgggtggcgtccagcagcgcatcggtctgggcactcggccgcgcgtcgcccacggtgaccacctcaatcggcttgccgtgctcgtcctccacctcggcggcgatctgcttcaatccggctcccaccgaacgatccgatgtggaacgttcctgatacagccattcgcgcagctcgcgctcttggctacgcgccagggcgaatacggtggtcggttcctcggagtgcagctgaatcagcgccaacgtttgcagcacgccatcatgcagatgggcggtcatgtccgcgcgctcctcttcgcgttccttcaatgcctgctcgtgggtgagtcgttgcagcatcgcgttcgcccacggcatcaccgccaccacgataccgacgatcatcacgaatccgctggcaacaatgcgtcgaggagaggtgccccacccaggaatgctgacattatgcacatacaatgcccatcccatgaaaatcagtgcgatgccgcccaacatagacaacagctgcgtgcctcgcggactaagattcatccatgccagtgcgatgccgcccaaccctaccagcagcggaagcacaatctgggcatccgcaccggtgctggtgagcagcagtccggtggccatcaacgcgaaaccggccaatgccacgacggccggtttcggagcacgttggatggcctcggacaatgattccggtgcggcagccgattcgtcgtcatgagcggcaagtggctgattgcctcgcgcaagcggcgcctgatcaacgggcactgtgcgagccgcagccgccaccgggtctccggcgggcatgaacacccacaggaatacataagcgatgatgcctgcgccgtagaggacggtcagtgcgatgaacgcaatccgaacccatgccacgccgatgcccaagtgcagggcgatgcccttgcacacgccggtgagccagcggccctgccgggggcgcatcagcggcatgcgcgcgggcagcaatggttcgggagatgacgtcatactcctattgtgccgcgctcagggcgttgcggccggggttttacccggtgttcagggaacaatcagggtgttccccgagcgttgtggcagtggtcgggcggtgtaatggaatcatgagcaatccaaacgcgaatccgtatcagccacagccgcagcctggtccgcaaaaaaacaagacatcgcgacgcttcttcacttggg

SEQ ID NO: 2483 - DNA, 6918 bp, Unknown
  R50_10m  MAG No. k141_19214
cggaggtaaccatgctgctcaaggccgtgttttgggatttggacggaacgcttatcgattcggagccgctttggcatgacggtgaaatcgagattgcgcacaacaatggcggcgagtggaacgaggacctcggttgggagtgctccggcactccggtgccacacgtggcagaggtcatgattgcgcatggctgcacattgagcgttcccgaaatcgacaaacagctcaaggattatgtgttcaaggcggaggtcgaacgtctgccgtggattcccggcgtattggacgtgctgcactcgctcaaggaggccggcattccgtccatgctggtcaccacgtcgccgcgccgtatggcggagaacatcatgaagcagtccgagggactgttcgccggctacgtctgtggcgacgatccgtacgaacacaagccgaaccccgcgccctacctggccgcagccgacaagcttggcatcgcccgtgaagacatggccaagtgcgtggtgctcgaggattcctcggttggacttcaggccggtgcggcatcgggcgcgactctgatcgcgcagactggctggattcgcacggatacttccggcctgggccagttcgcgtccatcgaatcgtatgacggtatcgatgcggccgcgctggacggtttcgtgcgccagcgtttgggggagtagaaataggccgattgtatcggcattgcattccggtgtgtcgcaagtatttgcaatgtttatatcaaccatttgatgtctgttttgacaaacttctgaaacgttatagaattgttgccaacgaagaaatctgaaacgttctagaaaaaccggcgcacagcagcgtcggttgactggttttccgctccggcaaagcatgcccgagtattttctatggccagtttctgaaatgttacagaaaaagaagatgaggtccaagggaggtcatcatgacggcaattcaggaagccgttcccgccgcagcgggggcagcgcaaagccgtgggggagaggtgagcaacgcggctgcggcagccggcaaacgtgttcgtgcccgcaagcacagcggcgcatcgcagaactcatggcaaagcaagctgcgcccctacctgttcatcgccccgctggtcattctctccggcgtcttcatctactactgcatcggcttcaccgtggccacatccttcaccgactgggacggcatctccagtgagatggacttcatcggcctgaagaactacaccaagctgctcgctcccggctccgtgttctggacggccttgatgaataacatcatcttcatggtcgtcaccgtggtcatccaggccgggctcggactgctgctcgcggtgatcctcaaggagcgcctgcgcggttccagcttcttcaaggcgatcttcttcatgcccatcgccatggccccggtcatcatcgccgccatcttccgcatcatcatggatccgaacgtcggtgccatcaacgaggccctgcgcttcctgcacttggacttcctggcccaaagctggcttggcgatccgcacatcgccctctactcgatctgtgccatcaacatctttgaatggatgggcttctcgatgatcatctactacgccggtctgatgtctatctccgatgacatctacgaagccgccaagatcgacggctgcggattctggaacaccctcttccgcatcaccattccgaacctgtccggcaccaccaacacgcttatcctgcttggcatcgtcggctcgctgaagaccttcgatatcgtcatccagaccacaggcggcggccctggccgttccaccgaattcctgaacacctacctgtacaaggccggcgtgcagcagttcaacggcggtctgtccgcggccatcggcgtgatggtcctcatcatcgccgtgatgctctccctgattcaacttgccttcaacaagcgtgccaacaactaacgagaggacgtcatcatgaagcgtaaaaccagtgcgacggtcatcatgtacaccgtcctcgtattcttcttcgtcatctggattttcccgatttacacggcaatcaccaagtccctgcaggcaggcggctggaacagctacctgtccgtgatcaacaataaggacgtgcactacttccgcgtggtgttcaacagctttttcatctccgtggtcaccgccgtgatcgtggtggtcatcacctcgctcgccggctacgcctttgccaagatgaagttcaccggttcccaggtgatctacgtgctgctgctcgcctgcatggccgtgccgattgcctccgtgaccatgccgctgttcttcaccatcaagacattcggcctgaccaacacctacctcggcatgatcatcccgttggtggcgttcaacgccctgcagatgctgttgctctggcgcaactacttcaacggcgtgccagacgaaatcatcgaagccgcccgcgtggacggctgcggttccctgcgcatctgggctcgtatcttgatgcctatctccaccccgatgatcgccaccaccggcgtgctgaccttcgtctactcctggaacgaatacctgattccgttgctgctcatccgcgacgaatccaagtatccggtcacgctggcctccacctacttcatggagacccgcagccagacgccggagatggtggcccaggaatacgccgccctgattctgatgacgattccgtccatcatcgtctacctgatcagccagaagtggctgcagtccggcatcaccgccggcgccgtcaagagctgaggtgacccaaaatgaccgcaaccatcagcaacggtgtatccgccagctacagccctgcggaagacgagctcggcgcagctgaccccaccgccttgcttgccgaatctggcgatttgaagccgctggccgaacgcacttatacgaatccggttccatatgcggacggtaagtcccataccgcgcccgacccgttcgtgctcaaataccgcgacctctactactgctatgccaccgacgagcacggcattctggtctccacctcaccggacatggtgcactggacctcacatggattctgctacaccgaagccggacgcagaaacttctgggccccatcggtgattctcatcaacggcgtctttcacatgtacttctcgaatatgccggccgaggagaccgacacccacacggaaatcatgcgtgtggccgtgagcgaggatccgctcggcccgttcgaaaagaaagcggagctgttcaacaccttcgccatcgactcccaagtggtctatggcgatgacggccagttgtacttgctttacgccgacaatcaggtcaccggcctgagcgatgaccggcccggaacctccgtgatgatcgatcgccttgtgaccccgtattcgcgtgagaacaaaccgcgcccgctcatcgtgcccaccatggacgaggagatctttgcccgcaaccgtttcggcgatggccgcgactggcacaccgtagaaggcgccacatacttcgcctaccgtgaccgcgcgttcatcacctactcggccaacgcctacgagcatgaggactacttcgtcggatactcgtacgcacagctgccgaataagcaggccgacgcccacatcgatcagctcgattggacgaaacagctcaacgagaaccgcttcgatccgctgcttatccgcagcccaaaggttgaaggcacgggccacaactccatagtcaaagcgcccaatgccgttgatgactggattgtctaccacggccgtaacgccgatgacgagctgtatgtgggcaccgaacagcgcgtaatgcgcatcgacccgctgtactacgccgaaggagggctcgacaccccaggacctaccgccgccgctcaaagcgcaccgctgtatggcactgtgcatgatgattttgcggatggcctgaacgccggatggtcggttatttccggcgcggcccacaccgaatccgatgtggacggtcacgcgcttgttgccgacgaatccagtgtattcatcgctgtgtcgggcaaatcgtccgcaacccaagtgattgacgtctgggccaaagctcccgtcaccccactgggcgcacgattcggtatcgtggtgcggtaccaggatgccaacaacctcaccaaactcgaggtggatgctggccgtcaggtaattagcgtggtcgatgtgatcggcggcgttgcctccgaacgcgtgaccaatgccgacctccatgacttcgattcccatgcctggcatgagtaccggcttgagcgccgctactgcaggctggagatccgcattgatggccgtttcgccgcgtcctgcaccatcagtgataagcccggtcgggcgggattgttctcgttgcgaacgggggccgcgttcagcgcatatgcggccactgaacatgtgaatctgtggggtgccggattgcgggatctcggtcgagaattgcatgctgaccgccgactcgtcatcgacggcggcgtgaggtccagcggcgtgtgtccggtaacactcgaactggcatacccgctggtcagcaaccgtttcgtccttgatttcgctgggcagacgagccgtgggcaggcgctgttgtctcttggcgaataccgtttgtccggcacggcatcatccgtggagttcatgcgcaacggcaagtctctgccttccaccccggagccggccaggctgcgtgtctttgaagacaacgtccgccgtgaccgttcgggccgagccgtgctcaccatccgtatcgaagctctgaacggcacgatgcgactgcacctacgtggcaaaacctggcaggtgccgtttgcggacaatgcggcccgtgcccgtatcactcttgatcgcgcatccctgaccggatacgagaggacatcgctggaatccagcatcgaggaaaggagtgcgtccggcaattgagccaacatcagccgcacatatcgggtgtggctggcttcgccatccaattccgatgatcttccacaacgaagtgaaccaataagagaaacaaggaaaataaggagaacaatcatgttgaacatgaagaaggcgatcgccgcagtgggcgctctcgctatgtctgcaggtctgcttgccggatgcggttcgggcagcggcggctccgatgagggagtcggtaccaaggacagcccggttgagctgaccttctggacctggcagcctaccgatgcccagtggaagtcgatttacgccgccttccagaagaagtacccgaatatcaagatcaactggtggcgtacttctgaaatggccgactaccagaagaagctgcagacctcgatggccggcggcgaaggcccggatgtgttcggtgtgcaggccggttccactgtggaacagtacggccgtttcgccgacgatatgaaggagctggccgacaagtacatgcccggctgggattccaaggtggccgagggcgccgtggcgcagaccaccaacaaggatggcaagatggtggccatgccgaccatcacctccggctccgaatacatcctgtacaacaagacgctgcttgacgagcagggcatcaaggtgcccaccacctacgacgagctcgtggctgccaacaaggaactcaaggccaagggtctgatgccgctggccctcggcgccaaggatggctggcacctcgacgatatcttcgtgtggctgtccaaccagtacggcgaaggtgacgtgtacaaggccgccgaaggcaaggccaagttcactgatgagaccttcgtcaagaccatgaaggcttggaagcagatgatcggtgatggtctgttccaggatggtgcagttggtactgcgacctacccggatgctcgcgacaactacttctacgcccgcaagtccgctttcttcccgaccggctcctggcacgtttccgccgtgctgccgaacgatgagaccaagggcacggccgttgagaaggacgagctaggcatgatggaattcccgcaggtgggagacaaggctaccggcccgaccactggtgtggacttcggcctgagcgtgaacaaggactccaagaagaaggaggccgccatgaagttcatcgagttcatgaccaccggcgaaggccagcaggagtggatcaacacgctgcagggtgctccggtcgacaaggacatgaaggtcgaagtgccgtctgacgccacggaatccgccaaggccagcatcgatttggtgaccaagggccaggcctcttccaagcttgagcgcaagctcacctcccaggaactcaacgacgagatcggtgtgcagatgcagaacatctacaccggcgacgccaccgttgactccgcgctgaaggccattcagcaggtcaacgaatccatcgaaaggtgagcctatagataggaatatcgcatagtttctactcctcgagtgggcccgtccggtacgaattctcgttgtctggcgggccttctttgttggtttgccgaagtggccctgatttattaccgccggcggagtctgttgacggttgcagcgggagtcgtgggcggcgtgtcggacccgtccctgctagcggggctgtcggcaaggccgactgggggtgattctgcggacgcctaagcgaaacggcctgcgggggcgatatcccacatggtttatgctggaaacacacatctgaaacgttcgacaaccaatatggcgacgtggatggtgccatgccgagtggttgatggactgaatataagggggcgctatggttgcgagttcgcgcaaggcgacgctgcacgatgtggcgaaacgtgcgcacgtgtccgtggcatcagtgtccaattacctcaacgattacccctatatgaagccggccacgcgcgaacgtatccagcaggccattgacgagctgggctatgtgaccaaccagcaggctcgcaatttgcgttccggccgcac

SEQ ID NO: 2484 - DNA, 5638 bp, Unknown
  R50_10m  MAG No. k141_19333
cttgtcgtggccaccgatgatctcctgcagcagtgcggagtcgagcacggtgcgggagaccgggccgatctggtcgagcgaggaggccatggcgatggctccgaaacgggagacgccgccgtaggtgggtttgacgcccacggtgccggtcagggcgccgggctggcgaatcgagccaccggtgtcggtgccgagggcgatcggtgcctcgaatgcggcgactgcggaggcggagccgccaccggaaccgccgggcacgcgctcggtatcccacgggttgtgggtggtctggtaggcggagtgctcggtggaggagccctgggcgaattcgtcgaggttggtcttgccgagaatcggcatgccggcggccttgagcttttcgatgacggtggcgtcgtacggcggcacccagccttcgaggatcttggaggcggcggtggtctcaatgcccttggtgacgatcatgtccttgatggcgatcggcacaccagccagctcaggcagggcggccttgtcttcggcggacttggcgtcgaaggcgtcggcctgctcgagagccacatcgccggaaaccttcaggaaggccttgatggacggctcggcggcttcgatcaccttgaggtgggcttcgacgagctcacgagaggtgacgtcgcccttcttgatggcagcggcctgctcggcagcagacagtttgacgagagttgcggtttcgttgctcatcgattactcctcgcttcccaggattcgcggtgccacgaacatgccggcctcggtcttcgggccaccggcgagcgcctcttcctgcgtgagcggggtttcggcgacgtccgggcgcaggtaggcttccagaggaaccgggttggcggtcggcggcacatcgtcggaggcgacttcctggaccttgttgatggagtctgcgatgacgttcagttcgccctgcagacgggtgatttcctcatcggtgagcgcgattcgggccagatcgcccaaatgcacgatttcttcacgtgaaaatgttggcatggccataactatatgagccgtatgtgacacgcagttgtcgggaagcctcattttcccgcctactggagcccttcagcgaatcagaagctcaagccggtcgagcatttgccccgctgctggcttcttcggcggggcaaaaccgttgccggaccgcaagttcaccttactgagacgactcgcagcagagcaaaaccgcgagctgaccgatgaaacgccccgctcagccatcccagcaaaacaaaaccgcggtccaaccaataaaacgccccgctgagacgccccgcagcgaggcaacgccacggcccaaccgcaaatgtgccccactgaagtatctgcatggccaccctaataagctcacaatgagcccaaacacacctacatcgaacatatgaacgacaatcgccctgcgcacctcgccagttatccacattttgcatacccacccaaaagaatccacataatcagtccaatacggtcagatgcctgataatcaggcaaaaacacacatctaggcaccgaagctagaaccacataaccccagacagatagacaccgtgttcaccattggcataccgtcgaatcatgaaacatcacaaagcagtggacatactcatcacgaaggctgaagcaacgcaacagtgcgcttatggaacaaccaaggcacaccgctcggcgctggctcggcgcgtgcaggcgcgcgaactcaaacgtgtattccccaacatgtacgccgcttcggaatactgggattcgctgcaacccgacgaacgtatcagacatattgcacgaactcttcataacagacatccggattgggtgttcgccggggtcacggcagcggccatccacgattttgaacaccaatggcatcttcatgctggcaccatcactctcgccacaacatcacgaggccccaacgccagcagtgcaaaggtcaaacgcatcttcacgtcaagcagcacgccagaatatgccaatggactcccggtgaccagcaaagccagaacggtggtggattgcgggctgtccgtcgacttccgatttgcactgcccattatcgattcggcgctgcgcaacggcgtcgccatcacggacattctgaatgtgtgcagcactatgcgacgtgattgcacgccgatattccgcctactgcattatgccaatccggcgagtgagaatggtggcgagtcacttggacgaggcaccatcatcgcaggcggcctattagccccagaactgcaacaaaacatcaccgacccgcaaaccggtgctctgtatcgcgtggatttcctctggcggctacctgagaatcggcttatcgtgggcgaattcgatggctatgaaaaatatgtgaacccggatatgaatgaccgcaagggtgttcgtggtgcagttcaggcggagaaagaacgggagacggcactgtaccgggccaaagtcgacaccattgtccgattcacctatgaggaggtgatgcaacaacatcctttactcaataagctgcgggcagccggcatacctcatgctggaacagtgatgggagctggttaagcgcagtgaaccacggtggtcaaatccatggggtcagagtcaccagaaccatggtcactgcagaaccgccaaagccatagccatgacaaactgccaggaccatggccgaaccggcagaactgccaaagcagtaacccgcgttatttgatatctgatatccgcttttccggtgatgatgagaccgccgatccatgcggcggcagcccaggcgatgagaatcaggccggactgccaccattcgggaatccagtagtccggtttaacggcttcggccagtgtggactgcgcggagctgctgatgcctgcggcgagcaggatgccgacgatgccggcggcaaatgcgaattaatgccgcggcgatggatttggtggcgtagatcatgcctctaatgtggcccatattgggcagatgcggcaggattgtcggcgcatggctacacgcctgatacggcgtgttgggcaatccatgcgtgcatggccacggccgccgcagcgcctgcattaatggagcgcacggaaccgaattgagagatgtagaccacatcgtcggccaatgcgagagacttgtcgctcaatccggggccttctgcaccgaagagcagcaggcaccgcttggggaaggtataggcttccatcggcactgcgccgggaataatgtcgagggcgatgacgcgggcggcttgaagctccttgatgcgcgcatcacaagcatcgatttcggccagcagctcatgaaggtgcttgttgtctccatccacagccacatcatgcgcatggatggcggcggcaccggccttggctcgttcataggcgatttcaccggcgatgcgatgatgccagctttccaccagttcggcgatggaggggtggtgttcgacgtgctggtacagttcggtcatcaacgcgcccttgcgattccacttatgtggaccgacaatgtgtacgcgcttggcctggaaggcgttggcggtgcggaccatggaaccgatgttgaaatcgtgggtccagttttccaccgcaacttcgaagtcatgacgccctcgagcgtcaagatcggccttaatggcagcgacggtccagtagcggtaacgatccaatacgttgcggcggtcgccgtcattcaacagcaccgagtcgaaacgaccgtcataattcggagaagtcggatcgtcgggacgaggctcgccgggatgggtctcagaccacggcccaaggccgatttcacggaattccggttcacctgaagctttggcagccaaagaaatctggttgggtgcgtgcaatctttctcctcgataacgctattcaccggttcctcttagtcaacttcgcggctcagcccggctgactttatgcgagggaagtcaaaggtggatttaccgcagttcggattcgtcgaagacctggatgaaggggagcgtttgctcgtcgccggtggaggggttgaccacattgatgtctttggcaccgccaccgaccagcgaggcgatggccacgaccttggcacccagctgctccactatgccaaagtcgaggctcagctcattgccgttgcgcagggtgaccagcgagctggtctgcacgtacgacttttcggacagccaagcatccaacagcaccacacggcggccttcgatggaggggcccttgatggacgggtagacgaagtccatcacgaatccgtctaggtcctcgccacgagaggcggcggcctggatcatggcggacaccatgggcacagatgctgcggtcaaggcaccaacagcatcgaagtcatcaaccgaatagcccgcatcttccaaagcgtcaatcagtacatggcccatgacggtggcggcatggtggtcgaaagtcaccgcggcaagttcggagaacggacggcccaccacatgctccctcagcaaggtggctagctgttcacgcggctccagcatggcaaagtcattgtggctcttcgcgacggcgaggtccggggtaccagtggggcggaatccagattcagtcatgactccagactatcgcctgaggcagtcagatgagtatcaccttcatcggccggcaccacttcaggggcggacagttcgctcacattgcctttgtctgattcgatgatcggtacttcctcgatgatcttggtcggttcgattttttgcagcttgcgagcggtgggcaacacacggcgttccaagctggacgcgaacttgttgtaggcgctgaccgtcttggtgatctgggtgcccaatttgatggcataatcacccagcgtggagaaccgttcgtacagttctcgggacagatcgaacagctgcttggcgtcatcggtgagcgactgctgctgccaggcataggcgacggatttcagcacggcccacagcgtgaccggcgaggtgagcgccactttgcgagagaacgcatcatccatcagtgtggggtcggcttcgagcgcggcctgcaacagcgcctcattggggatgaaggccaccacaaaatcgggtgccacatcaaaggcattccaataggccttttcgccgagagcacgtacatgctcgcgcaacgccttggcatgggctcgcagcaaatcatcgcggcgggcaatatcctcggggctggcggtgtccgggatttcgcaggcacgctggtaatcggcataaggcactttggcatcaatcggaatggtcttgcctcccggcagatgcacgatcatatccgggcgcaacgtacgtccatcggcatccgtgaccaccacctgggtatcgaaatcgacatgttccagcaatccggcggattcgacaatgttcttgagctgggcctcgccccacgcgccacgcaccttgttgttgcgcaatgcggcggacagggaactggtttccttgtccaaacgggcctgctggtcgttgagccccttgagttgggctcccaatgcgcccatttccctcttgcggccctcttcgatctgcgtgaccttgttctgcaaggtatcaagatttttggccactggcgcaagcgcctcgagcaccttgctctgttctttcaaacgtgcttcctgttcagcacgcttggc

SEQ ID NO: 2485 - DNA, 7303 bp, Unknown
  R50_10m  MAG No. k141_19497
gggagctggctcgcaaagcgagactgagggtggcttacacggtaccgcttatgaccaccctcagtcgactccgccgacagctctcacagcgggagcatataattaaaaatctcctgcacgggtattaccccacacaggagacctcattccccggatgtgttttcggctccaatcgatactgacatccggcctatgccgtcatcgacttattgcagacgatggcggcataagtattattttgccggccagttgcgcgcaggccggcatatcgccgatatttatcgacgctggaagacacgcatctcgcctatctcgcggttggcccacgagtagtacggcaccaagcgcagcgtcgcgggctcacccgcacgcggttcgtcggcatccacgtacagcggcgcgtcatcctcgtcggcgtgctcgcgcactgccggcaaatcaacggtatcgactccacccagcaagtcggcctggaaagccacagcggcatccgcaccggtgacgccatcggccagacgatagttccacaaatcaccgggattatcgacctgttcggcgcagtagaccagcggtccgcgcatcacggccacctgaccggcatcggagcgcacgcgggagttggcgcgcacgaacttcacggacatgtcgagctcgagcgcaatctccaacgtatcgccggcgttgaccacaaggtatacgaagccgtcttccagcgaacccactgcgggcttgccgttcacggtcagcgtgtaggagccccgcgaccagccggggatgcgcagtccgaaacggaccgagctgtcagtggcgctggcgggcaggctcaccgtgtattccacatggccatcccacgggaagttcgaacgctgctcgaccgtcaggccggaagcgaattcggctgtgttggcgatgaactggtggctcagcacggtcttgccgccgtcgcgctcggtgtagatgtagcggtccacggaggcgatgagtcgggcgatgttggccgggcagcaggcgcagccgaaccagtcgacgcggtgggagagcacgtggtgacggtccgggttatccagtccgtcaggcgtggtctccagtgcattgacgtagtagtactgcttgccgtcgagcgagatgccggcaatggaaccgttgaacagttccttctccagcacgtcggcgtattcgcccttgggctcgaggtcgagcatctgctgggcgaacatgctcatagccacggaagcacaggtctcaccgtacatcgtgtcgttcggcagatcatagtcgtaggtgaacgactcgcccacgtgggtggaaccaatcgcgccggtgacatacatacgacgggtgacgatgttcttccagaaacgcttggcggtgtcgatcagtccccgatcgccgagcagtcggcccacatgggccacaccagtgcacaggtagccgacgcgcacggcgtggccatccgcggtctgctggtcgcgcacaggttcggcggcctggaagtaggtgggcttgtagaagccgaggtcggggaagatgttgtcgccgttcagggccttcagctgcttggtgtagaactgagggtcttggccgcgcacgtcgatgaggtattgggagagcgtcaggtaacgcttttcgccggtttcctcgtacagtttggcgagggcgagttcgatttccgggtggccgtcggcgccatgaatcttgccttcttcgggcccgaagttggcatccaggcagtcggccatcttcttggcgacttcaagggcctgctcgttgccggtcacctgatggtaggcgacggcggcttcgatgtagtgacccatcacatacatctcgtggctttgctgaatcaggctgaagcgcgggcggtcggcccatacgccggacttgatctggtacggagtgtccaagtagccgtccggctgctgagcgcgggcgatgagatcgaccgtgcgatcgcacagcgccttgagttcgggatccggatggtaggccagcgcataagcggcttcctcaagccacttgtagacgtcggaatcctggaacaccatgccgtggaattcgtcgtccaattcgccggcggcaaccttcagattggcgaccgcgtggcttttgctgtcagccagctggttaccggccgggtcgtcgggcactgtggtgtcgatttcgtcgttcatcacgccccactggtaggggatgacggattcgacaatctggtcgcgacgccgcttccagaacggggaagtgattgtaacgttcatgatcagcccttcacggctccagccataaagcccttgacgtagtacttctggagtgcgaggaacaggatggcgcagggaatcagcaggatcacgacgccggcctcagtggcaccgtagtcgataacacccatggtctgctgacgcatgttcaccatcgccagcggcagggtggacttggacgaagagctcaagtacagcggaatcatgaagttgttccatgcttcaaggaaggcgagcaggccgaccgtaaccatcgaaggcttgaccacaggcaccagaatcttgaacaaggcctggaggctgttgcagccgtcgaccatggcggcctcttccatgtccttcgggatcgcgtcaaatgcgttacgcatgatgaacgtgctcataggcagctggaacagggtgatgactaggccgacgcccagcaggctgtcgttcagaccgatgtccttgtaccagaccatcagcgggatcagcagcgaggcgtacggcaccatcaggatggacaaggtgaccatgaagccgaggttacggcccgggtagtcgaagcgggagaacgagtagccggccagtgtgcagacgaccacggagaacacgaccgcgaccagggtcacgattatcgagttgaacaggtacttgggcagaccttcctgataaccgaacagggtcaggtagttggccacgccccagcccttggactgggccgaaccggcctgcgggctgaacgagcagatgatgacccagaccagcgggctgatgaagatgatggcgagcagagcctcaaggattcgagcgatgacgcgcttccacaatggggtagtcataatgtgttacctcccctttctcacttggtgttgtcgcgcatgccgcgcatctggatggagttgatgatgaccagggccaccagcacgatcagcgagagcgccgcggccatacccagatccttcttggaatcgaaggcgaagttgtagatgagctgcaccacggtcatggtggagttgttcggaccacccttggtcagaatgaagaactgatcgaaggcgaggatcgagccggtcacgcagtagaccaggcacatcacgatggtcggcttcatcagcggcagggtgatcgagcggaagatacgccaggaaccggcaccgtccatgcgggccgcctcgtacagatcaccggggatggcctgcagaccgatcatcatcagcagcatgtagtagcccgagaatcgccagacaatcacgataatcgtggcccacagggccgactggccggtggccagcaccgaaccgccctcctgcatcaggcccaacgagctcagaatcttggtgacagggcccacctgcggggaatacagtgcgtagaacagcagggacgcggacgccaggcccgtcgcggacggcagcaggaagcaggtacgcagcacgttgttccacttcgagctctcctgcacgatcatggccatgcccaggcccaggaccagcaggaagaccgtgacgatcacggtgtactccaacgtgaaccagatcgagggccagaacaatttgttctcgaacaccttgacgaagttgtccgggaagttcacgccgcggttgccgcccagcaggctccaacgcgagcaggccatcaccaccagcagcacgatcggcacgaagaacaggacgacgatcatcaaccagtccggcagcgagtacaacaggccgcgacgcgtctcggccgccttcgccttggacttatgcacgggcaccgccccggcgctcttggaaacactcgacatgtttctctctcctttggggaataactgtgaaatggtaatcacggaatccgaatgcaatccgatgtcagggcttcgaggaaggaggactccgaagccccgccaacacaccgcattcaagaggtatgtaatgatgaaggaagaaaaggaatgaagaagaagatagaagttcaattatgtggttgagccggcccctgccctcacaaggaagggaccggctcaatctgttcagttgttattcagttattgctgtgatttgatgagcgatggtgaggagcatcaccaccgaatcactgggcagacaggacgtcggtgacggccttgttgtcggccttgaggtcaccggaaccccacacggcgttctgcacgagcagctgccacggggagccagcggcgttgaaggcttcattgaaggccggggacttcggggtctggccgttgccgtcgatgatcacggagttgatggtctggatgcgcgggtcagcgtcgttgtaagcggtcttcagggtctggatgttggaggcggtgtcgccccggtcagcgaaaacttccttctgagtgtcagactgcatcagccagtagaggaagttccaggcctgagcaacgtgcttggagtccttggagatacccatggcatcgccaccgaggaacgtggaggtcttgccttccttggtgcccgggatcggagcgacgccgacctcgaagcctccgtccttctcagcatcgaacagagcagtggtggaggtgttcgggtaaggcatgacaccgatcttgccgttcgcgaacggagcggtccaagtggcaccggtctcttccttggagcctgcgcccaaaccgttggtggtgttggccagttccttgtaagcgtccagaacgcccttcatggagtcgttgtccagagtggcctcggagccatccttgttcataacggattcaccgtcagcccacacggacgggaagaggtcgaagaccagagcaccaccggactgaccggcgaggtaggaaccggcaacgccatccttgttgagggcggcgaccttcttggcctgctcggtgaactcagcgatggacttcgggccctgctccgggtccaggccagcttccttgtacagggccttgttccagaccatcacggaaacatcggtgatgaacggcagggtgtactcggtgccgtccacggtgccggcctcaatgtggccctgctgcaggtcggccttgttgtccagaccgtcgatctgcttggtgatgtcagtgaagatgccctcggaagcccagtacggaatacggaccacgtcgccggcgaggatgtcaggcagagagtcggtctgcgaagcaccgccgaccttgccttccatatcgtcgttcgggatgatctcgagcttgacctggttcttgtggctcttgttgtaagcctcgaccacgttcttggcctgacgctccagcggggaacgggtccacagggtgatctcggtgccatcgtcggtgcccttggccgggatgccttcggcggtggcggtaccgccattgccggagccaccacaggcggccagcggaacaatcaacgcggcggcagcgatgccagcaagagtacgggtcagtttattgaaagacaccatgttcgcttctttctctatttatccgctcaactatgagaggcggtggcggacggtccgcctccttggtcttcgccctgctcgctcctttgctcggaacaggtaacactgcgaaagccttttctcaatataaacgaacatcgccatttttgcaaaaacgctttcgcactttcgcatattttcgcatatcgaacaggtttgatatgcattttgcgcgattgtttgactcaaacaaacacttatttttagcgctttcttacggcgtgtcgccaaaagccaacatattcgaacgtgaacacaacgctttctttcattctcttttcaatcgcacaaaaatgatcactgcgccacgccaaaaaatagacttgcgaaagttttcgcgtcatgtctacaatagaaaacaatacaaaggggtatcggtacaatcactactttcgcacgaaagagtgcagcaatatactgctgagaaagaaacgaggaatcgaggcattatggcccagacattgaccggacgcgcggcacggctcgaagacgttgccgctttggcgggagtctctttggccactgcgtccaaggcactgcacaacaagccccgcattagcgaagaaaccaagcagcgcgttctggacgccgcccgccagctcaactactcccccaacaaactcgcccaatccctggcccgcggcaccaccggcactatcggcctggtcacctccgatctgcagggccgtttctccacaccgattcttatcggcgcagagaacgagttgcgagcacaatcgacctcagtattgttggccaacgctcgtggcgacgccgcgctggaacgtcagcatgtcaagaaactgctgtccctcaaggtcgacggcctgctcatcgtgcagtgcgaaaccaacccccggcccacgcttggccatgactggggcgtgccactggtctacgtctacggcccctccaccgatatcgaagattgttcggtcacctgtgacaatgtggacgccgggcgcatggccatcaaccatctcatctcttgtggtcgccggcacattgccattatcggtggcgacgaaacctataccgccgccaccgaccgcaccaagggtgcggtcgaggcactggccgagctgggcatcgaaccggccgggccaatccggtacggcaagtgggacgaaggttggggccgcgccgccacccgtctgctgctcgatcagggcgtcacgttcgacgccgtggtctgtcaaaacgaccagctggccagaggctgcattgatgcgctcaagcagcagggcctgcgcattccggatgatgtcgctgttatcggccatgacaactggtctgtgctgacctccagctcgaggcccgcactgacgtcgatcgacaatgaaaccgagaccatcggccgccgcgcggcacgatacttggtcgatgccatcgaaggcaacccccatcacggtgtcgactacgtaccctgccgccttatccagcgcgaatccaccctcccgctggactgatatcaatcgataccctaccgcttcttggttttgcggccctttaagtagatgtcgatgacgatccatacgccaagggcgaaggccacgacgtagcccatgaagccgatgaccggaatgccgaagataatcggcttcatgccggcgtagtagacaatcgac

SEQ ID NO: 2486 - DNA, 10485 bp, Unknown
  R50_10m  MAG No. k141_19511
cggggtcaccttggcaaacggcagtttgaagtgaatcgcgtccagtgcctcctggccgctcagaccggccagctcggaatcctcgggagcgccgcccgcggcgaccaccttacggaacttcatttcggtgagcatgatcatcgtccagttgatgatgccggcaatggtggcaatcgacatcaggtagttgaacgcgaactcaggccacacgaacaccacgaccacggcgatggcggtgatcgcggcggacgtcagcacgccggccactggcacgccgcgcgagttgagcttgcccaagtaagcgggcgcattgccctgcttggccagcgagtacaacatgcgggagttggcgtacaggccggagttgtagacgctcatcacagcggtcaggcacacgaagttcaaaataccggcagccgcgtgaatgcccacggaatcgaagatctgcacgaacgggctggacttgccatcgatggtgttccacggcactacggccatgatcacacccagagcgccgatgtagaacacgaggattcgccaaataatatcattggtggcgcgcggaatcgtggtcttcggatcctcggtttcgccggcggtgatgccgatgagctcggtgccgccgaagctgaacatcaccacaaccagtgccatcagcaggccggtccaggaaccgtcggaattctgccccatcaggccgttcgggaagaagccgttacccacggtgaaccagttcgcgaagcttgcgcgcacgccggatgcggtgggcaggacaaagatgatgacggccaggccgccgataatcatggcgatcacggccacaatcttgatgatggcgaaccagaactcgaactcaccgaatttagagacgcccagcaggttggcggcgcagatgatcaccaagaacacggccgccgatacccatgtcggaatcgccgggaaccagtagttcacaaacgaacccaccactgatagctccaccatcgagacgaggatgtagttgaaccagtagttccagccggaaataaagccggcgcgcttggaccagtagcgggtggcatagtagctgaacgcgcccgccttcggatcctcaacggacatttcagacagtgcacgcacaatcgcgaaaatcgcgaggccgccaaccaagtaggcgagcagaatcgagggtccggccagcgcgatggattcactggaaccatagaacaggccggttccgatggcgccgcccagcgcaatcagctggatgtggcggtttttcaatgacttgcgcagcgtggccggcaccggcacgtcgtcggtttcgcgcggcttcttaggcgcatcagtagtactcattgtgctcttctctcacatttcttgggtttggcgcacgcggggcttgccgtgatgcgcaacgttcgttattctatgccgccgtatcgtctcagaaatggtcaatcgtctatttgtgcgctattgcaagcgcgggcgtgggcgcggccggtgagcaggcgaagctatagcgagcgatgcttatgaaaccgcacgcttcactgagttcactgagttcactgtgctcactgcgtggcaggcatacacatggtgaagatggtgtgggacaccgattcgggagaggccgcgagatcggtggcgagccaatattgcaaaagcccaatgctgccggacacggcgaatcgcatacgcatctgcgcctcggctgggtaacccgccgaagattgcaactgttcgcctacaccgcgctggctgtaaatcaatcccagcagctgctgctggaaaccgatatccgctttcgggctcatcagcacttggagatgattgcgattgtcggcaatgtactggcagatgcgctcaataacatgctcgatgccggcaggatctggctgggcgagtagctgttcgagtgcggtggtgacccaggccatggtttcgtcttcaatgtcgtgcagcagttcctcgatgctcgcataatgcgcgtaaaacgtggaacgattcacatcggcccgctcgcacaacgctttaacggtgatggagccgagcggctgatcgcgcagcaactcgataagcgcgtcctgcatggcacgtctcgtgtagcgggtgcggcggctttccgtcaattctttggccatggccttctccccaagttccgacaacccacaatccaactgttggttgcagaaccgacacagtgttgttttacttgagtatagcaggaagttctggcggggcctatggggctaggtggctgccacgagcgcgttggaggtgtgcgatggcgtatatcgaattcgaccatgtggtcaaggaatatccttctggcagcagtgtgattcgcgcgctcgacgaggccagcttcaccgccgaacaaggcgaattaagcgtgattctggggcagtccggtgccggcaaaaccacggcattgaacattctgggcggcatggataccgccacaaccggccgcgtagtggtcggcggacgcgatattacgggtctgcggaaaaaggaactggtgacctaccggcgcaacgatatcggcttcgtcttccagttctacaatctggtgcctaaccttaccgcgctcgaaaacgtggagctcgcctcgcaaatctgccctgaccatttcgatccagaggaaacgctgcgcaaagtcggactgggggagaggatggacaacttccccgcgcaactgtccggcggcgaacaacagcgtgtatccatcgcccgcgcgattgccaaaaagccgaagctgttgttgtgcgatgagccgaccggtgcgctcgattacgagaccggcaaggaagtgctgcagttgctgcaggatatttgccaaacacaaggcatgaccgtaatgatcatcacgcataattccgcgcttgcaccgatggctcacaaagtgattcgcttccgctccggcaaggtgaccagcgaggaggtcaacgcaacgccgcggcccatcgccgatatcgaatggtaggtgattggcgatgctcactgcaagacactctgtgaaacgccccgtgaaacaagcgaggcgattcgtgaaacaacctgtgaaacattctgtgaaacggcggaacctcgacgatagcggcggtcgaggagcgggcgtttctgcggtatttgccaaagatacgttgcgttgctggctgcgcagctggaagaggttcgtctcgatcgccgtcatcacgctgcttggcgtggccgtgctgaccggcatctacgccggatgccgcgatgcttttctggcggccggtcgtttttacgatcagcagggactgcatgacctgcaggtgctatccacatacggcctgaccgatgatgatgcaacggcactgcgccgaatcgacggtgtgcaaaccgtgcagcccgaacgttctcagacggtgaccacgttggtggacggcaccaagaaaaccgtgaccatgcaggaaatcggtaccgaagggcttgatcagccgtacatacggcagggcaaactgccgaacaaggccggcgaagtggcggttacgcagcaattcctgaacgatagcggactcaagattggcggcaccattactgtgacgccacaagacacctcttcatccgtcatatcggtagcggccacggagactgacgacgccaatacggacgccgacgccgagcaatccccgcagttccccacgaaactcaccatcaccggcgtcgtactcgacccgcgcgacctcaacaatccagacggctattcgggcatgacctccttccggtccacctcatccgaggactatacgttctttgcacccagcgacggcgtgaccggcaatatatacactgcgatatcggttgccgtcactggtgcgtccgattttgacacgttttccgatgcctacgatgaagccatcaaaaccgtggccgaccgtatcgaacatcagatacaggccacacgccagaaagcccgtcgtcaacagatcgtctccagcgcgcagcgcaaactggatgatgccaaagacgaggccaacgagcagctggacgaagcccagaagcagatcgacgacaactgggccgagctggaagccaacaaaacgacattgcaagatagccgtaccgaattggagaacaacaggacaaccattaccgatggcgaacggcagctcgccgatggacgtgcgcagattgcatcggcccgtcaacagatcgcgcaaggtcgccagcagatagccgaagcgcgcacccagctcgaatcgggcaaagcgcagctcgcctcggctcgcaaacagctcgatgcggcgcaaacggaactgactgccaatcgcacgaaaatcgaacagggcattacccaaatcgaccaaggcgtggcacaaattgatcagatgctgtccatgattcaacaggccgacaatctactggcgcaacttgacccgaatatcgacttcaactcacccacatggcaggccatcaagcaactgctcgcgcgccttggcattaccctgcctgaagtgccgtcaatcagtgagctgcggcaacagctggccgccaagcaaacggaactgcaaacgcagcgagacagtctgacccagcagaaagccgatttgcagcgcacattaaacgaaaccattgcccccgcacaatccaccttggaccagcagaacgcgcaactgaccgccaaggaacaggaagcggctgcaggagaggcacagctcaataccaaatccgcggaactcgaagcgaatgccgcaaccctcgaaacccagtcggcgcaacttgaagcgcaggccgcccaactggccagcggcaagcagcagctcgaagaaggcgagcggcagctggaagaaggcgaacaacagctcgcggacggcaaggcgaaactggatgatgcgcagtctgaactcgatgcgaagcgaagcgaagcggaaagcgaattcgccaagcagcaacggcgcatcgacgatgtggccaacgcacgttggtatgtgcagacgcgcgcttcgatcgacggattcagctcgctcaaatcagacgtcagttccatcgaatccatcggccgcgcattcccgattgtgttcctgctggtcgccgtgctcatgagcctgaccaccatgacccgcatggtcgaggaagaccgcggacttatcggcacctaccttggactcggctatggcggactcgccgtgtccagccggtatctgctgttcgcgttgctcgcctgcttggttggcggcggcatcggtctgctggtcggattcctcggcatcccggcattcctgctggtggtgattgagggactgtatatattgcccggtgtgcgactcgaatacgactggctgtacggttcggccggcatcgtgctgttcgtggtcggcgtgggcgtggccaccgcgctcgcctgtcgcgaggagatacggcacacgcccgccgcgctgatgcggccgaaggcaccgaaagcgggcgctcgcatattgctggagcggattcgcccggtatggagccggctgaacttcctcggcaaagtcaccgcgcgcaatatcttccgattcaagtcgcgcttgattatgaccgtgggcggcgtggccggttgcacagcgttgattatctgcggatttgcgattaatgacaccgtcgacacgattggcgtcaaacaatacgagcagatctaccagtacgacctgatggtcgtggccaatgacgatgacgccaccgcgatgcgcaagcaggtggcacaagatggccaaaccaccgaaacgctgaatctgcgcgtggatagtggcgagatgagcaatgcggcgcaggaaagcgaaaccgtgcagctgatgaccgtgcccaacgattcgctgaatatcttgaacgatatggtcacgctggaacaagctggcgatgatggatggtttgggctgcccaatatcttcggcaaagcgggtggcggcactgtagcgctggacgatagtggcgtgattgtgtcgcagtccgccgccaactcgctgaatattcatgccggcgacaccgtcacgctgggcaatggcggcagcagccgggccaaggtgcaggtcgcggccgtgacgcgcaatcttattggctctgatgtgtacatcagtgagcgactgtacgaccagaagtttgcggccggcggtgtgacgtcttcggcttcgggagatggcactgcctcgaccttgacgtggaacgcgatgctcgccaagctgaaaggttccgagaccgaacaggccgaatatgcggatcggttgggcgaggaatcgtcggtgctcaaggccgtgagctgtgcgcatctggccgccacgtttaagttcgatttgatgggtgccgtggtggcgctgattgtggggctcgccggcggcctggcgctggtggtgctgtttacgttggccaatacgaacgtgtccgaacgcatccgcgagatggccacactgaaggtgctgggcttctatgaccgcgaggtgcacaactacgtgaaccgcgagatgatgatattgaccggtatgggtgtggtggttggtctgccgcttggcaggtggataggcggattactgactgctgcgttgaatatgccgtcgctgtatttcgaagtggaagtgcactggtacagctatgcgattgccgtggtggcgacgctggcgttcgcgctgctggtgcagctgttcaccaacccagtgctcgatcgcgtagacccggtcagctcgctcaagtccgtggaatagaggtagaagttcaattaggtgttggtgaattgaacttttttggcggaatatttacagcatcatcgcatgtattcttgagctgagcgttttcgtgacatatttcggtgatacagtctgaacttgttttgaacgagtatcgcgtccggtgcgtaacaatcgggcggcggagaagagaaatgaaatcagtatggccgatacgaatgtgaatggtggtacacggcaggctacgggcaaactcaagtctgtcgaaagcctggaccggaccaacgagatggagcgtggcctgagcaatcgccacgtgcagttcatcgccattggcggcaccatcggcaccggcttgttcctgggttcgggcaagtcgctggcactgaccggcccctcgatcgtcttcgtgtatatcctggtcggcgtcatcatgttcttcctgatgcgcgccatcggcgagatgatgtaccgcgaccccagccagcacaccttcatcaatttcatcacccgttaccttggcaacgggtgggggcatttcgccggctggacgtattgggccgcgctcgtgctgctgggcatgaccgagatcacggccgtctccacgtacttcatcaccttcttcgacacgttcggcatcgacctgacccattggaaatggctgattgaactgtgcttcctggtgtcgctggtgtccgtcaacctgatcgccgtcaaggtgttcggcgaggtggaattctggttctcgatgatcaagatcacgctgatcggcgcgatgatcgtcaccgccgtggtcatgatcgtgatcggctaccattacccggccgcgcggattcatggcgtggatcatgtgagcccggcgggccacgccggactcgacaacctgttcgccggcttctcgttcgccccgaacggctggatggccttcctcatgagcttccagatggtgttcttcgcctatgagctgctcgagttcgtgggcgtcaccgtctccgagaccaagaatcctcgtgaggtgctgcccaaagccgtcaacgagatcatcgtgcgcgtgctcatcttctacgtgggcgcgctcgtggccatcatgtgcatcgtgccgtggacctcgttcaagccgaacgaggacggctccttcgcctccccgttcatcatggtgttccagtatgccgggttgaactgggcgtccgccctggtgttcttcgtggtgatcaccgccgcgtcctcgtcgctcaattcgctgttgtattccgccggccgccacctgtaccagctgtccgaggtgtcgccgaacccgatgctgaacaagctcggcaaggtgtccgatcgcaaggtgccggcccgcgccatcctggtgtccgcggcgctgatactgctgtcgccgatcgtcaacgccatccccggcatctcgggggcgttcgtgctgttctcgtccgccagctccgcggtgttcctgttcatctacatcctgacgctgctggcgcatcgcaggtatcgccgttccgccgatttcatcgcggacgggttcgtcatgcccgcgtggaaggtgctcaatacggtggcaatcgtgttcttcgtgttcatctacctgacgttgttccttgcggacgatacgcgcaattccgcgattgccggcctggtgtggcttgtgggcttcggtggattctctatgctgcgcgaacgctaccgtagccgcgatttgaaggccgcactggaacacaaggagtgattggacgggctgattggctggcggctattagttgggtggctgttggctgttggcggctgactggctagcggccgatagtcaatgactgggctgatcgtcagccaatcggctgcctataggtctcattgatacattcggtcatccgattagtgcatttgcgcggacaattagtgcattcgatcatcggattagtacatcagtgtgcaattattagtacaattagccgcctaattagtacattaggacataaaacaatgtcctaatgtactaattagatgctaaaatacgataagtgccatgtcctaatgtatgaattatcgctatgaagggcggaatgcgatgacgcaggatgaacttatgcaagtgctgcaggccggtgaatcatctatggtcgagttcaagcgctgcagcgaattgcctcatacggatacttttgagactgtatgctcattcgccaatcgttctggtggcagcatttatcttggcgttgacgatgacggtcaagtgctcggcgtcgattctaagcgcgttagtgagatagagcgcaacgttgtcaacgtagtgtctaatcgtaagatgttcgaaccggctccaatggtggaaacggaacatatcgagtacgacgaacggattattgttcgtatttgggtagctccgagttcttcggttgtgcggttcaagggcgcagtgtttgatcgcattgctgatgtggatacacacatcgaaagcgatatccagattagtcaaatgtatattcgcaagcagaactactattccgaacggcgaattttccgttacgtgactccgtttgatttgcgtcctgagctgattgcgcgaatgcggcagctggcggtcgctcagcgagctgggcacccttggggaactatgtctgacgaagaactgttccgcagcgccaagctatacgatcgtgattacacgaccggcgaagagggctttaatcttgctgcagtgctgctcttgggcaaggatgaagtcatttcctcggtttgcccagcgtatattactgatgccgtggttcggcgagacaatattgaccgatacgatgaccgacttatggtgcggaccaacttgttcgattcgtacgagcaactccgtgaatttactgagcggaatctgcctgaccgctttgtgttaaagggcgataagcgagtgagcccgcgtacgatgatcgcccgtgaattggtggcaaacagcctcatgcatcgggagtattccagtccggtggtggcgcgtgtcaccattgataatgaatccatccggacggttaatgcttcgcgctcattctttgaaggtcgaatgaagctgggcgagttcacgccaatgccaaagaatccgattatcgctaatgtgtttgtgcagaccggcatagccgagcagctgggtagcggactgcggaatctgataagagcgtcccggcaatatactgagcgagagcctgagttccgcgatggtgacatattcgaggcgacgattcctattgttcctgcgctgaagaccgtggatggttctggttttgctagcgtgagatctgtagttgagaaagatgccgaagagggtgcgaggctcattggcggggaacgtgtggatggtaagaaagcagatgcaaccgcatcgggtgaaattgattcgcgggcagcgatgctgtcggcgatgaatcgactcttgacagaggttgactatgtgactgtacctgaactcgccaagataacagagctcgataacagaacagtccgcaaattcctaaacggtttagttgcgcaaggaaagctgattgctgaaggcaacacgcgtggtcggcgttatcggaagggatagcgggcgcgatatctcgatgcagtgggattcacttaagggctacggcaaatatgattcgtagcgattgggccagcgcaattcgaatggctcatgactttgtgcgtcgtttgtggtgataacgcccgattttttgcgcactttcggattccgggtctgacgtaagagggcatggcccgcgtcctgtgtacgattttcattcgccaaaacaaaaaaccgcgattggaagccaggagacggaaccaagacccttgaaca

SEQ ID NO: 2487 - DNA, 6610 bp, Unknown
  R50_10m  MAG No. k141_19609
gcaaggcttgaagtcgagtggttccacgacacgaccgatccatggacgctgtccattaccgcgcatcgggattaaggcgctatagtgacgtggcgaaaacgttttttccgaggagatgacatgtttgggggaagcaagcaggaacaactggagcatcggctcgaccataagctgaacgcctcctcggacggcatcgacatggacgtgcccgccaaagtgatcagtagcgaaaccgtttataccgggcgcatcttccacgtggacgacatgcgcatcgctctgaccgacaagcagggcaaggaacacgagatcggccgccaggtgctgcgtcacgccccctgtgtggtcatgctcgtgcacgacatgtccaccgaccgttacctcatcgaacgcgaataccgtgccggatcggacatgttcgcctacgggcttcccgccggtctcatggacgagggcgaggacatcatggacgcggccctgagggaactggccgaggaaaccggcgtggtgccggaccgtgacaccatgggtgttgacttcgtgggcgatttctactcgtccgaaggcatgaccgacgaactggcccacatcatggtgttgcatttgggcccgttcagacgggagcagcgccatttcgacgcggacgagcacgtggaatccgcgtggattccgtggagcgaccttgccgccacgcgcatcacctcatccaattcgatgatcgccatccagcatgaggcgttacgcagactcatcgccaggaactccgacaaagacaagccgtcgctgttctcctgacgttcaactccccggcacatcagtgacacaagaaagtgggatactgaaaactatgcagatcagacctggatcaatgtatccgctgggcgccagctatgacggcgccggtgtgaacttcgcgctgtactcacaggttgcgcagaaagtcgagctatgcctgttcgacgagcacgatgcggaaacgcgcatcgaaatgaccgaacagaactcatacgtatggcataactacatccccggcctccagcccggccaacgctacggctaccgcgtctacggtccctatgacccgatgcacggcctcagatgcaaccccaacaaactgctgcttgacccgtatgccaaggccatcgaaggcaacatcgacggcgacgaaagcctgttctcctactggttcaaaagcccggacgacacctcggcgatgaacgaccttgactcggccgcccacaccatgaagtcggccgtcatcaatccgtatttcgactggggcaacgaccagcacccctacatctcgtaccacgattcggtgatctacgaggcgcatgtgcgcggcatgaccaacctcaacatggacgtgccgccggacatccgcggcacctacgccggcctggcctatccgagcgtcatcgaatacctgaagaagctcggcgtcaccgccatcgaactcatgccgatccaccagttcgtcaacgactccttcctgcaggagaagggcctgtcgaactactggggctacaacaccatcggcttcttcgcgccgcacaacgcctactcctcctccggagagcgcggcgagcaggtcaacgaattcaagtccatggtcaaggcctaccatcacgccggcatggaggtcatcctcgacgtggtgtacaaccacaccgccgaaggcaaccatatgggccccaccctgagcttcaagggcatcgacaacgcctcctactaccgactggtggaaggcgaccagcagcactacttcgacaccaccggtaccggcaactcgctgcttatgcgctcgccgcacgcgctgcagttgattaccgattcgctgcgctactgggttaccgaaatgcacgtcgacggcttccgcttcgatctggccgccacgctggcacgccagttccaggaggtcgacaagctgtctgcgttcttcgacatcgtggagcaggacccgatcatctcgcgcgtgaagctgattgccgaaccgtgggatctgggctccggcggctatcaggtgggcggcttcccgtccagctggtccgaatggaatggccgctaccgcgacacggtgcgcgacttctggcgctcgcagccctccacgctgcccgaattcgcctcgcgcctgatgggcagttccgatctgtatcaggtcaacggccgtcgaccggtggcgtccgtgaacttcatcaccgcgcatgacggtttcacaatgaacgacctggtcagctacaacgaaaagcacaacgaagccaatggcgagggcaatcgcgacggcgagagcaacaatcgctcttggaattgcggcgttgaaggcccgaccaatattccggacgtcaacgacttgcgtcagcgtcagatgcgcaacatgttcgccacgttgctgttcagccagggtatcccgatgatttgcggtggcgacgaagtggcccgcacccagcagggcaacaacaacgcctactgtcaggacaacgagatctcctggaccaactggcatcttgacaagggacgcaaggaactgctcgccttcgtttccaaactcattcatctgcgtttggatcatccggtgttgcaccgccgtcgcttcttcacaggccgtgagcccggcgacgattcgaacatgattccgcaggtcgaatggttcgaccacaccggttcgatcatggatatggacgactggcagaacacgcatgcgttctccatgatgatctatctgaacggttcggatattccggaggtagactggtacggcaaccggatggtcgacaatgacttcatcctgatcttcaacgcgcattacgagccgattatgttcaccctgccggatgagcgatacggccgcaaatggcagctggtcgtggatacgcacaacccgaatgggccggaactgagctatgaggcgggcttcatgatcaccgcccagtcccgcagcttccttatgctcatgagcgacaaaaagcccaagaagcccatgggcctataaccagaccgaatttaagctccctctgacgagggagctcccagtatagccgggtgagggagagaccgcagcaaagccgcgaacccctactcgcgccccttacgctcctccacgagccgagcatccccgaacgcaagtagatgctcgccggcaagcgggcgcggctggtcgagcagctcgcggaaatccaggattccatcgacttcatcgacgccaaacagcgcttctacgacgacgtcctgtctggcgcaaccccatacgtaagcgtgctcatcccatccgcggcgctcgcaaaggagtcagaggaaccgggagaattgaagggggtggagaggaaataggttcgaccgagccgtttcttcctccgggatgcaagtgcgaacaacggtttgttgtacccgcgcttggcgaacgggacatgcccttagactggaatcagcaagcgcacagcgagacgcgcgaatcgttttccgatgtcgggaggtagtcatgtcgatcggtcaggttatcaaagtcgtgcgcgaggagcgaggtcttacgcagtcgcagttcgcgcacgagctgttcgtcacccaacaggcgctttcccgctgggagaagggaacggcagagccgagcatcgacatgattcggctgatcagcacccgttttgaggtgccgatggcgaggcttatggaaatgccggacaatggtttttgccaaagttgtgccatgccgttttaccgcccggaagaccatggcaccgaaccggatggaacgcgaaacggagattattgcaactactgctatgaagacggcgtttttcttcaggactatgccaatagcgatgaattggtcgccgcatgcgcgccgatgatggcggaatcctgccatatcagcgtcgaacaggccgaggactgcatgtcggcgctgctgccaaacctcaagcggtggcggcgtcaggacgagatcgatgcggtggcggaaggggaatgagcgatggcgttcgattataagaaggagtataaggacctgtatcagccgaagaggatgcccgccatcgtcacggtgccggcgatgcggttcgtcgcggtggacggtgtaggagatccgaacgaagaaggcggcgactacgccaaggcgatgcaactgctgtacggcatttcgttcaccatcaaaatgagcaagaagtcaaagaacccggccgagcatatcgacgggtacttcgactacaccgtgcctccgctggagggcttatggagcatgggggagggtgtgcccggcgtcgattacgcgcacaaagccgacttccattggacttcgatgattcgtctgccggaattcgtgaccgatgaggtctttgcgtgggccaagtcatcgtttgcctccaagcatcccgaagtcgacatcaatcgtgcatatctcttcgacttcgatgaaggcgtggtcgcgcaggtcatgcacaaaggcccgtacgacgacgagcccgcaaccgtgacgattctggacggctacgcgcgttcgcaaggctacgggctcgacttctccgacacccgccgccatcacgagatctacctatccgacccgcgccgagccaaaccggaaaatctcaaaaccatcatccgtcatccggtagtgaaggtgggttgactttcggcgaactgctcgaagcgctcaccgcgcagtagcgtgaacaatctgccggaatcctcaccgtggtcaaagagcgctaccaagaactcgataagcaaaataactagaagcactggttcctctcggagagattctgcccgagcgaccttataaatccttgcgcgggtcacctttcccggtgcaggaagcatccaggctcatgtgcattgatgacgccgatggattgcagataggcgtagacgatggtggtgccgatgaatcgcatgccgtacgtcttgagatccgctgcgatggcgtcggacagaggggatgtagtcatgcctgtctcgtagatgacgtgacggccggtgaaccgccaaatatagtcgtcgaaactgccgtacgacgtctggatatcccggaatgcgttggcattgccgaccgtcgcgacgattttgcgacggttgcggatgatgcccggatcgttcatgagttcggcgatcttgttctcgtcatagcgccggatccgttcgatgtcgaacccatcgaacgcctgacggaaacgctcgcgtttgttcagtatcgtctcccatgacagtccggcttggaaggtctcgagcaccagcatctcaaagaggtggtggtcatcatgcgacggaaccgcccattcggcatcgtgataggcaacatagacgggattgctgagattgcaccagccgcagcgtgggttcatgtcatccatgtgttctccctatggattgtcggagacggttggttttaaccgttagtgtgatgtgcgattcagtataatcggatttttactccagccgtggataccgtgaactgaaatcgatgtctgtgttcgcgtcgccatgctgatttgaccctcacatgatgtcatactttagcctgtaaccatgaatgaccggcaatcacacgacatggacactccggcggagcgtatttcccatctcaacgtaggggatgtgtcgcggctgacgaacatcagtattcgcatgctgcggcattgggacgaaatgggtctggtgtctccgcaacgcgactggaatggataccggctgtattccgattcggatctcagacgactgcgcaggctgctgctgtacagggagctcggcatacccgtgccgcgtatcaagcagctgctcgatgccaagccgagtgaggtaatacgcgagttggcggatcgtcggggccaacttgcacgcaaggcggaacatatcaatcaggcattggccgatatcgatcggcttatgaacgttgcacagaaaggaatcgatatgaatgatgcgacgcagcaatcccgagaatgggccgaagaagcgcagagccgttggggcgggagccggcagtggatgcaggttgcggaataccaggtgaggagaacgtctgatatgcaggagcgcgacatgaagcaattcgaagccatcgagcagcggctcgccgatgccatgcgtcacggcgtgaagcccggcagcgatgagggcaatgagctggcggaagcccaccgtcgttccttggtatggttcgatgtcaccccgtcaatgcacgtgtgcctcggccgcatgtacgtggccgacgagcgtttcgtacagcattacgatgctttggaaccgggtttggcccagtggctgcttgcactgattgaagccaacgcgacaagattcggtgtggatctcgacaatttgacgtggcagtgagatgtgatcgggaggtatcggaattatcgtgacatgaatgtcgttccggtcagttggctcacgaattggctcacagcgtgtgagggattgcgacgatccatcgatcataccgaaaccattggaatcacaaggattacaggcaccaagctgcgttaacagaaaatgttaacggattcagccaatccgttaacactggaattgtgttagcaaacgcccccagagcaaaaaagaagaagccctacatcccaagtgggagtagggctttcattgtcgggctgacaggatttgaacc

SEQ ID NO: 2488 - DNA, 30721 bp, Unknown
  R50_10m  MAG No. k141_19674
gtcccacagattgtattgaggaatcgttgcaatgacgccatttcttcgtgcggcgtcatcagtcatatgtggagtggtgtgggccgccgcgaaaaaatcgggcaaaatcgcgtgccgtcccacaacaatcccgcagagtaggagactttctcatcattgggaatgattgacgttgatcattccttgcccattgatgatttcctcccccattcccaatgcaatcgaaacgcagtgccgtattcttgaagagtattgcacgtgtgatcggtccgtttgcggccagtgactatgggggataagtatgagcgaaccaatgccgtcggcgcagcagccgcaacaaaccccacgcgattggtggttcacggcccatcgccggttttcgacaatcggctcggcgctcgccattatgatggtgttctggatcgggctgaatattctggccactgaagcactacgaacgctgcttggcgccgatgtgcccgcttgggctgtgctgctcgcctcctccgggccgctgtatgtggtggccatgccgctgagtatgttggccttcactcgcgtaccggttattcgcacccggcagtaccccatgaaggcgggggagttcattcggattttcgtcatgtgcattccggtaatgctcttgggcaatatgatcggcaatatattgtctgccggagccactgatggtcaggccaccaatcgcatcaacgacgtgattcttggcagcgactggcgggtgaacgcattgttcataggcctgttggcaccggtttgcgaagaatggatttttcgcaaggagattatctcccgcctgcgccggtacggagaaaagaccgcaatcatgttctccgcattggcgttcgcgctattccatatgaacgtgttccagttcttctacgcctttggcctaggactgatgttcggatatgtatacacacgcacctcccgcctgcggtattcagtggctatgcacatgctgatcaacctgaacggggcagtgctcgccccattggtgatacaacagatcgatccccgcatcctcgacggcacaatcagcgaggccgaaatcatgcgtatggctgaaaccggcaacatgggcggcatgggcatcatgatgttgtacggcacagtgatgttgggcctctgcattgccggtatcgtgctgcttatcaccaagcgtaagagctgggagttctatcttgcgccagaggagttgccggcggggcttaaaatacgcaccgcctatgccaatcccggcgttattgcgtacctactgctgactgtgatgcttaccggttggatgctgttcgcatgactgtcatagccggacccagagaggcgagccgggagatatcacagattgtctgacgagccgccatcttcaacaaggtatttggtgcccgaaccggcgatggcgcgcgcggccatatctttgatggtggaaggcagcacaccctcgcgcgcgaacacaagcacttggccggtcatgccgtaaggggagaagccggtgaacttgaccagcggtggctggccctccagtgccacgtcggcggtggctttggttacgcggtcgagaatatcctgactgatagcggacgggtcaccggaggccttggccgtgaattcaagcgcggccatgccttcgctgaccggcgtgagcttggtcagggcggcggtattgagtaccgaattggggatgaccatcatgtctccggaacgggtgcgcaccacggtctgtcgccaggtgatgtcgtgcacggtacctgtgacgccttgaatggtcaccagatcgccgggttggatcacgcggcccagcatcaggccgaagccgccgatgacgttggcgatcgtatccttcaaacccagtgaaatcgccacgcctccgacgccgagggcggtgaccagggtggtcggattgatgccgaacaccggttgcagcaccatcgccgtaccggtgacccagatggtcacgcgcgtgagattcacgaaaatcgaggcgctgggaatctgcgaactatccagaaccctgcgcagcacgcggctgatcacgcggtcggccgcgaacacgacggccagcacgacggccagccagatgagtttgccggcgttcacctgaaaccagcgtgcgatgtcttgtgcatattcggtcatatgccctactgtatcgaccatttctggtgaagtcgtaaacatgcgggcccacgtcgggttttggccgttgcggtggtgccgatggtgcgataccggtggcgtgccgtcggcaccaccggcaccaccgcggcaccgcggtgcagcatcgtcgtggtgatgacgtcgccgtgacgcctagtcccgatgctcgcggcaggtttggccgaggccacgggccagtcgaatcggatcgagaatctcgtccagctgctcggcgggcaggtcggtgcgttcgccggccacctcgcgcacggtacggccggtgtgcacggcttcggcggcgatgtcggccgcgtgctcgtagccgatgtaatggttgagcgcggcggaaatcgacggtgaggactgggcatatgaacgccccaggtcagcattgatttcgaggccttccacgcagttgacgcggaacgtctccatggcgcgcgtcagcaacgccatgccggtcagcagctcatgcaccatcaccgggtcgaaggcgttcagctgcaactggccctcggccacagcccagttcacagtcacgtccatgccgaagatcgtgaagcagcactggttgacgcattcggggatcaccgggttcactttggccggcatgatcgatgatccggcctggcgagccggcacgttgagatcgttgaacccgcagcgcggcccggaattgagcagtcgcaaatcgtcggcggccttcttcaggtgcacggcaaggctcttgatggcggccgacgtggccacgtacgcgcccatatccgtcatggcggccaccggatcgggcgcggcggtgaccggcaagccggtgatctgcgccagatgcttgatggcggacttgcggaatcgcagatccgcgcaaatgccggtgccgatggcggtggcaccgaggttgagctgggccagcagcggcaccacgcgatcgaatgcagccaaatcagacttcaacagcgtggcaaacgcatggaattcctgaccataggtcattggtacggcgtcctgcagctgcgtgcggccaatcgtcacgtcattgatatgtttgtcggccagatcgtggaaggccttggcgagtttcttggtggactcggcgagcggcccgatcgcgtcgataagcgcgagtttgcaggcggccgggtaggtgtcgttcgtggactgcgactcgttgacgtcgtcgttcggatggatgtatgtgtaatcgccacgctggtggccggcgatttccagcgcacggttggcgatcacctcgttcatgttcatgttcgacgaggtgccggcaccgccctgcatcacatcgaccgggaactgatcggccagtttgccggcctcgatttccaggcaggcagcgcgaatggcctcggccttggccgggtcgatcaggcctaattcctcattggcgatggcgcaggcgcgcttgaccgtggcataggcgcgaatcagctcgggatgttggctatcggtgatgccggagaccgggaagttgccgatagcgcgctgggtgtgaatgccccagtagacgttcgccggcacctccatctggccgatgcagtcatgttccagacgggttttgttcgatgtttcgctcatgcttccatcttcctgtgtgagggctggaaacgccagcatgagaggctgattgcgccttgtgagaaacctcacgcagggttcattcgacggaaacaatccagactcactggttttcggtcaagcggtgtacccggggaatcctgcggggccgttcgacggtgagatgggggatggcgcggcatgcgtggcggtggcctgcatgccgggggcggccgaatcctgcgcattgtgcacgaagatgcgattccagtaattaagcatgtccttttggctcatggccaggtatatgcccatggccagcacggccacatcttctttaagcaggtctttgatttcgatggcgtcgctcaattcgggccaacgttgcagcacggcgagcatgccgcccacggtgaactcgaccatgagatcggttttcaggtcaaggttcttggggtcgcgttgcaatgtgctgagcatttgcagacggcagaagtcgcgcagcgattcggtcagttcaagcgtgctgtgcgggccggccaacagggccaggcggtcgaggcgctgccgctgctccgggtcggagagcgtggcggtgacgcggtctcgccattgttcctcgggattgccgttcgggtcgggggtgcggttgatcggaatcgattcgacctgatgcaggatggctgaatcggccaattcgggcaggctggagaagtgataatagaacgaattacggttcacgccagcctcacgcaccacatcggtgacggtgatcttgcggtagtcgcggtcggcgagcaattcccagaaagcgttctctaggcgttctttggcgggcagcacctcggaatcatggcgtggacgtggcatctcttcctcctgatgcaccagcgtgatatggtcacgctgtctaataacttatcgggcagtataactattatttgtggacatgtctatgagctaatcggcgatttcagttgcgtcctccgctgagggcgaagctgcggtgtcagtgtcggtgtcggtatcggcgctggccggggccgcgctatctgttcctgtcgcagttcctgctggggtttcggctgttcctttggcggtcgcagaactcggcgcggaagccggggcgggcgtcggcctgcgtttggccgtggacgccttgaacagtatcgccagggcctcaaccaaatgacgccggtctgcgggggtcagccctacatacgcgccaagcatcgccggaatcgaagcggggaagttgctcatcacctcgctgaagctggtggcgccgttggcgtgcagcacggtgaacagcgcgtccaccgcacgctcgcgctgttcgggcgtaagcgtggcgatccaatggttcagctcctcgttaaacaactgcgagctggaactcaaatccggctcggtgatgaactggtcgccatccaatagccaggtgaaggcggaatgctgcataatgccatccgaatcggaagagaccacgcggcaaggctccggggtctcgaaaatcatgcccacaatcgacgaacttggcacgattttcgtcaccttcggctggatggtgcggtaggcggggctggtcacaatctccggcgggaaaccggggccgtccagtgaatagacatgctgaatgcgcttgcgcaccttggggtcggcgttcatggccgcgtaaatcgccagattgcctcccttggaatggccgaccagaataatcggaccctcccacagtcgcgccaccgtatccagataggcgctggctgaacgttgcgccggcaccggatactggaaagccatattgaaatcttccttccatccgatgagcgaatcatcggtgccgcggaaggaaataaccaacgtgcctttgtaggtcggctttcggcgcttgtggccgtcgggcagttggaaggtggcggcggcgaattgggtttgctcaccctgattgatgtgctcgaccaccgcgcccagacgaacgttggcgtagcgggggttctcgcccgcggcctggaacaggtcgtgggtcaggtccggattgaccactgaaaccatttgggcttcgtgcggcttgtcgtcggcatgcgtttccggcgaacgatgcagctcgcggttggcctcgtcaaggcttaccgattcaagctcgggatgccagatacccttcagccagatcagtggatgcttgggctcgaaagcgcgaatgcgtgcggcgaacgagcctgactgcgtctcatccagcatcaacgtcggacagatactggccacatcctcatagatgagcgtggagatgatcaaggcgtcgatttcattgaacggcaagtcggcgaaggagcgcgtttcggtgtgcgcgtaatcgataatgccggtcatacgcacctcctgcttccgttgatattgcatatccccttgggccatgtggtcttgcgattgcgtgcggccgtgcggctgcgcgcagcaattaaccatatacattccattgtagggattgtacggttttggccggcgcgatcgagcaagactgcaccgacggcgaacaattcgtgggaggattcccgtcagcttgtcgaaaattgtcgggtagcgggggttgcgatgccagccagccgaccaccctccggcgttacgtgccacttcccgccagcgggaggggtaaccactcaatccttttgacgaggcggaccgctggggccgtcaaaggttcggcagatcgaagcgggccagatccacgccttcgtggtcgagcagttcggccttgatgtcgagtcggccgccgtagccgccaaatgcgcggcccgagccgactacgcggtgacagggcacgatgatagtaaccggattgcgcttcactgcgcctccgaccgcctgcgcggccatgcggccgccaccgcgtcgttcggccaattcggcggcgagttcgccgtaacttaccgtcatgccatagggaatctcggccaccagattccacacttcatgttggaatggcgtgccggcgggatgcaacggcggcgtctgatctaggccggggcgctcgccggcgaaataggcggtcagccatacgcgggtcatacggaacacatcgggttcacgatcggattcgcgattcgaatcgagaacggcttggtgatcggtggcccaccaccagtcttcaagacagagttcggtaagtccctcgccgtccgaggccatcatcatcctgccgatgggcgtttcgactgtggcccgcatcagttgtcgttgcgtcataccgccattatcgcgcgttgagggatgaagcccatactgtgcctgatttcatgaaggacgggtcgtgctgtacggtcagtattgcgtgctgggcagcgatatctgacatagtgggggttcttgggccggcatgagtgttctttccgacatcccaaccgtctaactccgtttcgaggggctgatttgggctgttccggaggtctatctccgtttcgaggggctcctcatccgggaaaccacaagtataaacggctccgggctaacgtcattacgccgtttttggcccgtgtctactcagccaccagccccttgaaacgggagtagacctccggagaaggccaaatcagccccttgaaacgcagcgacccctctgattggagtcaatcagaggggttcggcacattgctgatgcagctggtccgccgtccgccttgaggcggaacgtaaccaagattcgggcgggattactccgcaacgagcgccaggaaggcggcggccacggcggctgtcgggttcgggaattcctcgtcctggttgaagaacggcacgtcggcgtagttcaggaacttcacttcggcacggtcgccgatcaaggccttggcctcttcggccagctgatcggttatcgtcatgcgttcctgatttccacggccatggccgtgccagatgtgcccatcgcttggttctacccgctgtttatgctggccatgcccatcgcttggctgctgtatacggtcaccgcgagttatgtgcacggcggcacccgataatcgttggaaaaccggtgggacacgcgggggcttggctttttcctgagattggcgtatctttgtcacctgttgcccgtgaaggtaacacatgcggacatagcttagttggtaaagcgcaaccttgccaaggttgagaccgcgggttcgagtcccgttgtccgctctcggatggctggttcaggatgattgattcagcctgaggatgacccgggcggttggcgcagtggtagcgcacttccctgacacggaaggggtcacaagttcgaatcttgtatcgcccactcgatgaatcgccggcagaatgttgccggttttttcatcacaagctcgggcgattggcgcagcggctagcgcacttcgttcacaccgaaggggtcgtaggttcgattcctacatcgcccacccgatatcacgctcgtcagtctatgatggcgggcattttctatatctgccgtgccacggttccttatatggcgtccggcctcgggtggcatttggctgtgagcggtttccgattatgagtggcgtccggccgtcgtgcaatcccgctgcgcgcggtgccgtttgggctgtaatacgggtgctttgaaccggccataacttcttcatatgtcccggggcttgtgtcgtgtgccgcggcgcgcttccatagtggatatggcggtgtggaaggggagccgccatacttacttacacaaggacgtcttggtccgccagggcaacgcgcatggaaaggggtttgcgatggtgtgcaccacgctgaatttcgcggagaaatacctgctgaaaaccgaagtcaggtccgttgccggtatgtccggcggtacttccgatgctggtactgatttcgatgtcgatttcggtggcgagggcgacctcggaagcgatcatgccaccggtttcaatcgctcgctatcggccgacgattattgggctgcagccggatatgccgatgagtcattgtattgatggacgtgatgacgcggtaagggcgcgtcgataagtgcggctggtgtcgcggctgatgccgcatctggtgctcgtggtggtcgcggctgatgttccgtacggaccgcctgcaatggttttgcatcggtggtgcgtcaaaatccggaccgtcgccgacgctgttgacgtctggcggcgttggagggacagataatggattgtcaacgccgctgagaacgattggcgacggtggtgggacagcggatgccccaccaccgtcgccaagagtggtacttgtgtcggtggcgtccaaaacatggcccggcaccgacatcagatactctgaacgtcggcggattcccgttctgtgtcccagcgccgacgtttgattcctgcttatgcgagctggcgtcggtaaaaaggcagaacttggttcaccggcgatgtctcagcacgtttgcgcgcgtcggatccttctggagcagcaggaaaacgagcgccgcgacgagcaggacggcgatgggcagcacgccgagcgaggcgttgccggtcagggacgtggtggtggctaccaggaaggtgccgatgattgaggccgttttaaggaagaaacaatagtgagaccggggaacccttgaaatcattggggaatcatggtggcgatgcatgcgattaacacatgttgttaacacagatgtggaatgaggaggcgcgtgaggctcgtggtctgcgacgcatgagtgtgaccgtgagctccccagctgatgagcgcaaaggcagagattggtttcacgcgggacttgtctgccgaagagcggcgattgatgcagggtctgtgcgatgctctgcagcagttgctgaacaagcagtatcagcggcacatgtgggactgttcgatagcctgaaaaattttgccgcagacaatctaggcaatgtgcttggcggggatttcaatctcggttcgattggtgatttgccggcggtaatcggtgagcatttcaatgccgatcagttgggtgaaatcaacaggtcgttggcgaccatttgaacgccgaccgacttgacgagctgcaggcgctggcggaggaaaacatctccgccgaccagatcagtcaggtcgctggcgcaattcaggagcagggtgccaatctggacctcggatccattgccgaacaagcaggactgcccgctgacatcatcagccagatttccggactattgggcaagtagtcgccttaagctttaacgctgacggtgttgtctcggctattgcgtgttttgcggtcgctcagcaaatcatatgggtcgtaggtaaccgattgcgagcgctgctgtacacagatgtgtacgtgggtcgaagcggattcgtggtggcaggtgagacaagctgccctcgcatggctggaaaagcttcggtctcgtggagtgcgatgttaaagctgctcaggtcaacggaatggcggaattccgccgatgcaacttgtggttgcgctcgaataaccggcgattgcaacccaaagatggtggcgggtgacatggacggcatgccatagtgagcccatcggccgaacatgacatgataaagattacgtatgaagggacattccaatgagttttcgcgctaacctgcagtacctacgtgcgcaacgcaacctgacccaggaacgattggccatgttgcttggcgtctcgcgtcaggccatttcgaaatgggaatccgaaaaggcctatcccgagatggacaagctgcttatgatctgcgacctgttcggctgcacgcttgatgatctggtacttggcgatgtgagtcggcctgccgcgtcggcttctgcggccggttcgtcgaatgttgactcctcggctgagacggcatcgcctttagccgcttcttccaaaacggcgggcataatcgctcctatcgcggagcttgcgcaggatatcactggctacgatgaacatcgccgccgattcgcgctgctgattgccggcggtgttgctgcgattgtcgccggggttggcatcggcaacctgttcgattccaacaattccattctcggagcgacgccgctcaacgattttctgacgtttctgtgcgtctgcgtgggtgtgattgcggggctggcgatgctgattccaggaggtctgtcgcgtattgacttcaaacggcgtcacccatacgtagaagatttctacaccggggaggaccgcagccgagaattgcggctgctggtaatcggcatcgtcggtggcatctcggctattctgattggcattgcggtgacggtgtatgccgatgacatgctcggcgtctccgatggctggcccaacgcaatttttctgctgctctgtgcgcccggtgttttcgggtttgtctactgcggcatgagatacagtctgctcaatatcgacgcatacaacaaagcggccgaggacgaccgcaaggagcatgcgggcgaacaggatttctatgccagactgaccggcgcggtgtgcggcatcattatgctgatagccacggcgactggcttgtgcctgctgtttttgaaccctgcggcattgcgcggcgattggtcggccgtcgggtcgagcgccgcggacggggcgatgttctggctgccgtggccgattggcggtgtgctgtgcggcgttgcggccgtcgccattcagctgatcaaggattatcgcgagcgtaagtgatcaagtggcgatggtccattgctattagggcccggtgcaggggttgcgagatgtcgcccgcggcgcagagttgccgagggccggcaaatcactcccgcgtcgggtccttctgcaggagcaggaagatgagcgccgcaacgagcaggacagcgatggagagcacgccgaacgaggcgttgccggtcagggacgtggtggtggccaccaggaaggtgccgatgattgaggctgtcttgccgaagatatcgtagaagccgtagtactcgttggcgtggtccttggggatgatcttgccgtagtacgagcgggagagcgcctggataccgccttggaacatgccgaccagaatcgccagaatccagaactccacggccgatttcatgaagaacgcggcgaagaacacgatgcacatgtatgccacgaccgccgccgtgatcatcactttgcagccgagccggccggccagacggccgtagagaatcgcgcaggggaaggccacgaactgcgtgacgagcagtgccaccaccagctgggtggagtcgatgccaagctcggcaccgtaggaggtactcatcgaaatcaccgtgttcacggcgtcgatgtagaagaagaacgcgatcatgaacatccacaacggcttgttcttcacgattttgccgaacgtgcccgccagttcgctgaacgtgccgcgcacggccgagcccagctggtcgcgggtggcacggtagtgcacctggcggtagctggtaagcagcgggatggtgaacgccacccaccagatggcggtgatgatgaatgaggcgcgcgtgcaagccaccgtggaccagccgaagagcgacgggccgccgaaaatcagcgcgatgcagaagatgaacggcacggtggagccgatgtagccccagccgtagccgtgcgaggagaccttgtccatgcgctcgttcgaggtggtgtcgatgagcatcgaatcatagaacgtcagcgagccgttgaggccgatggtcgccagaatgtagacgaccaggaacggcagccaggtcaggggcagggccattgcgcagcaggtgaccacgccggtgccgaagaagccaaggaagaacttgattttcatgccttgcacgtcggcgatggagccgagcaacggcatgagcagcgcgatgaccaaggaagcaatggtttgcgcgtagccccaggcggacacgatgttgccgtccgccggcatcagcgatttggcgtaaatggggatgacggcggtggacagcagcacgaatgccgagttgccgacgtcgtagatgatccacttcttctcgcgggcggtcagtttggcgctttgcggcaccggttcgtggacatttgcgggatcagtcatatgcactcctcgacagtattcaactcaatctatcgtagaagcgcggactagggtagaaaaccgccaaagttgaacggcgggtgaataatgccgggcccctttctaaggggagccagagcaaaaaaatagctcccctcgctgaggggagctggccgcgaagcggactgaagggagccgatcgtggattcccccagatgaggaaatccactcaatcgtccggaaactattcgccgatcagcgcgatggcctcgtcgtaatcggggcattgcggcacgccgttgaggctgcgctggatggcgatggatgccgccgcgttggcgatctttaccgattcggccagactatggccctttgccagcatcgcgcacatcacgccggtgtggcaaccgcccgccgaacgggtgtgtacggccttggtcgggtatccctcgatatgaatcgtctcgccacctggctcacgaatccaagcgccgcgggcgccgacacgcaccaccagcggcgcgcgcagtgtagtgcccaagccgtcacacaactggtgcatgaagtcgtcgagtccaccgccgatggtgaccttgctgtcgtcgatcggcgcgcccaggcgctcggccagcgtcatggcctcctgacggttgcaggaccagaccgggcgcgcaagcaccagatcctcgagcatgtggtcgttgaccagacgcaacgtattggtgggattgatcaccagcgtgtagtcgcgtgtagccgggtcggtaccggccttgagtaggaatccgtccacgccggtggccgtatggtccatcagtgtgttgccgctgatgtgcaccacgtctttgggctgcggctctagcgtgttgaacgtgtccgcgtcgccatgagcctcggcgccataggaagcgatgaacgtcttcttcggcgcgccggagctcagcaccacgcggaaaccggaatcctcatcaagacgatcctggccgatatgcgtaatgccgttgtcctggaatgactggcggatgaaatgcgcccacaggccgttgcccagaatgccggcgtgctcggtcggcacgcccatgcggctggccgcctgcagcacgcgatagctgccgccaatggagggcttcggatgatcggccacggcgaatccgccctgtgccggcacctcgtccacattgagcatgatgtccacccagacttgacccagtgaaatcacgctgggctcgtgagtgccgatacctcgcctgagattcaacatgacagcctccttcgtcgtaagttgcacgaggaccccttcgtcccttgccgtctcttataccgagattatatgagagtttgttggatgcggaataggcagtccggcgtgttttatcgggtaaacgctacgatttgcagcgtaattcgccgctggcgaaccgctggcgaactacttgcggaccgctggcgaaccaatgccgaaccgctcgcgaaccgctgatggcccactcgcaagttacgctcgaaccgcgcgtgaaccgccgaagttcgcccatgatacacgcaagagttgcggttgtcggtattgggctatatatttgtgaagttgtgtgttcggcatgtcgggtgaaaccggcggtcgaatgcgtgaaagacttgacacatcaaggttaagggagtccatcatggcagctcgttgcgcagtgtgcggcaagggaccgcagaccggtttcaccgtttcccattcgcaccgtcgtaccaagcgtagcttccgcccgaacctgcagtctgtacgcaccacgattgatggcgagaacactcgtctgcgcgtgtgcgtcaagtgcctcaaggccggcaaggttcagcgcgtggccgcgtgaatcgcgtactaacgtggagcaaaacccgtttgagcttcggctcagcgggttttgttgtttctgcggcctaaagaggccgtgcgaatagaataggccaatatgagcatcactatggacaccactctcgcttcgctggtcaccaacaagcgtcgcgtgtccgcgctcaaatcgctgggaatcgtcactgtcggcgacgccctgacctactatcccttccgcgtcaccgaaccggtgccgcttcgcgccatccgcgaggccgcacccggccagcagatggcatttgccgccgtgatacgagacatgcgcgtggtgccgatgaacgctcgccgcggctaccgactcgaggcgacggttgacgacgccgacttcgcccggtctcgtcgcgtacccggcagcacggcccggcttacgttcttttcgtatcgtaaatcgtatgtggattgggtcagcatgcggctgcgcgccggcacgtctgtggtggtctccggtatgcccagcgaatacatggggcagctgcaattcacgcaccccgaaatcctcactgtcgcgcccgggtcggccggagcaggagcggggcttgagggttacgctcggggtgcggcatccggcaatggtgcgtttgcgggaagtgccgatccgtatgccagtgcgcagtccgcgtatccgccggccgcggctgcctcttccggggccgcgctgaaatacgacgccgataccgtgcaagaggcgcttacccgcgtctgccggccccgcccggtatatcacgccagttcgcgtatctcgtccgaacatattcatgagacgattctgggattgctgtggatgatgggggcccgcacgtcatccacgcctgacgggcaactcgctggcgctgggtcagccggcattgtggctcccacgaccgacaccatcgccgtccaaaacggggaagagaattccggcacgaccgccgaatccggtgctgaggcgctctcccaatccatcccagatgtgctgcccgaatcggtgcgcaaggccaagaacctcatgcatcgggctgaggcgttcctggccattcatgatccggcctccacgacccggttcaaggaggccatcgaaaccctgcgctatgaggaggctttcgtttcgcagacctcgctgcttaaagccaggtcgcacgcccataaatccgcggctcactcttgcccgttggtaaccgacagtctgcgcgatcagttcatcgcatccctgccgttctccctcactgcagggcagcagcaggttattcatgatattgccgccgatttggctcatgactggccaatgcagcgtctgctgcaaggcgaggtgggctccggcaaaaccgtagtggcgctcgctgccatgctccaagccgtagacgccggctatcaggccgtgcttgttgccccgactcaggtgctggccgagcagcatgccgaaaccattggccggatggtggagcaactcaagccagcgattccagtcacgttgttgacgggcggcatgaagcttgctgcgcgacgtaaagcacttgctgcggcgtccagtggcgagccgggcattatcgtggccacgcacgcggcgttttccaagaccttccaagccccgcacttggccttggtggtaatcgacgagcagcaccggttcggtgtggaacagcgcgaaagtctcaacgccaaaaccgatgacggcaccacgccgcatctattggtgatgaccgccacgcccatcccgcgcactgccgccatgacttggtttggcgatctcgatatttcctggctcaccgaattgcctggcggccgcaaaccgattcgcaccgtggtggtcaatgaggccgacgccgccaccatgggccgtatgttcgcgcacattcgcgcgcgagtcgacgcgggggagcgggcctatatcgtgtgcccgcgcattgatgcggatgatgaggggaacgaaggcggttccggcgtttcggcagcagccggttctgcccgcggacgcgccgcagcatctggttccagtgcccgcacagctgcgggcggccgtgcaacgcgtgcggcggccgacgccatcggcatcgacgatccctacgaaaccttcgacgaaaacggcgaaaccgtggctcgcccgccattgcatgcggtggccgaaatcgccgaccggttgcagaaactcccgcaattccaaggcattcggtttgcgactctgaccggccgcgacaaggatgacgtcaaaacccaggtcatggccgattttgccggcggcgagactccgattctggtgtccaccacggtgatcgaagtcggtgtggatgtgaaacaggccagctgcatcgtgatctttgatgccgaccgatacggcctctctcagttgcatcagctgcgcggccgcgtggggcgtggcggcaccaactcgtgggcgttccttatttcccgtgcggaacccggctccccggccgagcaacggctcgaagtgattcaccactcgctcgacggtgccgaaatcgcccaagccgacttggaattccgcggtgccggcgatgtgctcggcgacgcccaatccggcggcaagtccagcctgaagctcctgcgcgtggtcaaggacgccgacatgatcgccgacgcccgcacccgtgccgagcagcttctggctgccgaccccgaactggcagacgaggtccaactcgccggtgccgtcctcgacttcacccgaggcaacgaaaccttcctgacctccagctgaggctagggctgcgcccccccccgtaatcgcacgatattgtattttcatctggtaaacagaagtaaatgcttgtgccagagacggattgcatatgcatgggtgcttcgtggaagctgattctgtgttccgttgctgagttacggacgtgctggcgatacgcagctttcgcgttcgacaagctgcgtgggaaaaatgaagtaattctgttccacctttccttcccgcgcttcgagaatcaggttgatgcattgtctggcgatgaggtcgaatggctgcctgatggtcgtcagggatggacacatgcttgccgcaggatagacatcgtcgaaaccgatgatcgataattgttcgggcagactgatgccgtgctgtcgggcggcgcgatagacgttgatcgcgccgagatcgttgaacgcgaagatggcggtcggtcggtcctgctccctcatttccaggagatcgcatgccgccttgtatgccttgtcagatacgtagtcgccaaccttgatgagatgtggatccgcgctgatgccgtttttctgcagcgccgccatgtatccgctcagtcgcgcctgcgaggactgtgaattagtagggccagtgatgacggcgattcgtcgatgccccaatgatatgaaatattgcgtggcgagcattcccccggtccagttatcaatgcccactcccaatgcgtcagcggagacctgaccgaccggatcgacaatcacatatgggatgttcctcgtctgcagcagcgattcctcggccgatgagatattcgataagagaagtatgacgcctagtgggttgcgttcgatggcgttacggaggcagctgctggcctcgtttcttgttgcgtattctccggaatccggtccggcgcagcttacggtgatgccgaggccaaaatctctggcgtatgaagctgtctccttgaccatttccacggtgccgttgttggtcatttcgctgacgaccagttcgattgaccgtatggtttttgttgtgggaagttttttgcggaatccggcttcttcgaggagcagttccaccctatcgcgggtctcgtcggagactccatcacggccgttgatgaccttggacacggtagcgggggatactcccgccgcttgggcgatgtcggagaccttcggtctgtttgttgttttgattgtggccatgactcttctcttttcgtatgcgacgctgcaaaaaaagcgttatatatagagtagcgaaattttcgctactctaaaacagcttttttatcggcgtattgctgtctatatagcggaaatgggtgttgtagacatggattggctgctgtttcttcgatgagtacgatttgtgcatatcgttgcaataaagcccttttaaggcgaaaaaacaagataaagaaaatttcgccacgcgcaacgaagttttatttgctcttttttgcagaaccttgtatattgaacgtaccgatgaatgaaacggcaatggcaacgatgttgttggcgggctcattcagacgggttaagaagaaagagaaaaactatgacaaatgcaacggcgaaaccggatacttccgggatgcgcaagccgaagcgcgagtacataggcatgttatattgtcttccatacgtggtggtcttcctattcggcatgatcatcccgatgttctacgcgctttatctcagcttcttcaagcagtcccttcttggcggcaccacattcgcaggcttcgacaacttcatagctgcatttaaggatgaagcgctgtggagcggtttcagaagagtgctgatttatgcggcgattcagattcctctcaatttgatcctttcccttgtggcggcgctcattctggattcccagagaatccgccatatcgcagtgccgcgaatcctgctgttcctgccttatgccgtcccaggcgtcatcgcagcactgatgtggggatatatctacggcgacaagtatggccttgtcggccagattgcgtctatgatcggggccactgcgccgaacatgctttctgaaaagctcatgctgttcgccatcgcaaacatctgcacttggtgttctcttggctacaacatgctgatttattattctgcactgatcggtattccgaacgagctgtacgaatccgctcgtatcgatggcgcatccgagctgcgtatcgcatggtcggtaaagattccgcagattaagggatccattatgatgaccgtgctcttctcggtgatcggcacgcttcagttgttcaacgaaccgagcatcttgatgaattccgcgccgaatgtgatcaccagtaactacacgccgaatctctacgcatataaccttgcgttcaacggccagaacctcaactatgctgcagcggtctccttggtgattggtgtcatcgttatgggtcttgtcgcagtcgtgaaggtcattggcaataagtgggagaacaagtgatgagtgaagcaatcgcaaaaccacgttccaagtcgctgcagcgcagagacgccaagctggcgctcaaggcgagccaacgctataagcgtatgcagcagcgtgaggcagctccaaagctgaccggcaagcagcgtgtgcttaactggctgctgcacattatcatgggcctgatggtcatctactgtctcgtgccgttgctgtgggtgttcttctctgcgacaaagaccaacgagggcatgtttagctcctttggtctgtggttcgatgacaagaatgtgttctggcagaatgttcaggaaactcttgcatatcagcatggtacatacgcacggtggttgcttaacacggtgatgtatgcagttgtcgccggatttggtgccactatcatcgccacacttgcaggctacgccattgccacaatgcggttccccggacgtaatagtctgttggcgatcaccttggcattcatgtccattccggccacggtcatctctgtcccgctgttcctcatgtactcgaagattggtctggtcggtaccccatgggcagtgattattccacagctggccacgccgttcggactgtacctgatgattatttatgcgcagacatcggtgcctacttctctccttgaagcggctaagctcgatggtgcaaattcgtggaccatcttctggaaggttgccttcccgctgctgtctccaggtttcgtcaccgtactgctgttcacgctggtcggtgtctggaacaactacttcctgccgctgatcatgctctcggacaccaacgactacccgatgacggtcggtttgaacatgtggttgaagatgggtgccgaaggtaccgcggacggtcagattccgaacaactacattgtcaccggctgcctcattgcagttgccccgttgatcatcgcattcatgttcctgcagaagtactggcagtctggcctttcggctggtgcagtcaagcagtgaatcctcgccgcacggttattggcgatcacccattcgttgctctaatgaccgtgcggcatccacatccatttgaagaacaacaataagacagtaattcatgacacacaaaggagtaatcatgaagaagatgaccaaaatcgtcagtgcgctggcggcgcttactatggtagccagcgttgcggcttgtggctcaagtactggtgccaaggacactaaaactgcagtcactgtagaagacattaacaacgctctcaccgatacttccaaaaaaatcgagctgaacgtatggggattctccgggaagcagatggcaggaccgattgaagctttccagaagaagtacccgcacatcaaaattaaattcaccaacaccggcgcggcaagcgaccatttcaccaagttccagaatgtcgttgctgccaataaagatgttccggatgtcgtgcagatgagtgctgaccgattcgaacagtacgctatttctggagctctgctgaatttcgccaacgatgatatcgaaaaggcgtggagcaagctttatgcaaagaccgcttggagccaggtgcattatgctggtggcctgtggggcgtgccgactgacgccactcctttggccatgtatgtgcgtaaggacattctcgacgagcataatctcaaggtgccaaccacttggcaggaattctatgaagaaggcgtcaaacttcacaaggaagatcccagcaagtacatgggcgtcctcatcaataacgatatctcctgctttacggatttgctgcgttcggctggtgcgcgcccttggaaggtcaattctgtcgatgacatcagcttgagcatgacttctggcactaccaaggagttcattgaattcctgcaaaagtgccttcaggatggggtcatggaggccgctccaggctggaccgatgcgttcaaccgcgccacgaatgagggcacctatgccacttatatttctcagaactggcaaggcaactcctacaagggacagaatccatctcttaagggtctgattcaggtaacgctgccacctgcattcggtgattctgccgatgatttcaagtcttcttccgtcggctccatgatgagtgtttccgcggcatgccccaaggacaagcaggctgcagcccttgccttcatcaattggcttgattccgacaaggaagcaattcagtcttggcaggataacaaccacggcaactacttcatggcagcttccgcttaccaaaatagcgaagacatccgcaacatgaaggaaacagatggatactttgtcaatactgacgtgaactccgtctacttcgagtccatggacaaggtcaatactgattgggagtatcttccgttcatgtctcaggttggagtcgtatataaggatgtcatcactcctgaaatgaaggttggcggtgacatggtcggcgctatggccaaggctcagcagaagctcaagacctacgcaaaggacaacggcttcaaggtcaccaccgacgccgactgacatccggcccgccactgctagggagggcggccgaatggccgtcctccctttttgagattaaccattttccaaagaaggaagcgcatcgtgagcgttattaccaaagtcaccacctatgatttccgattcccgacgtcggccaccttctccggctccgacgccatgaaccctgatccggattattcctccgcctatgttgtcatcagcacggatgctggtgattccggcaacggattcgtcttcaccatcggccgcggcaatgatgtcgtcgtccgagccatcgactccatgtccgaaacccttatcggacgtaacgtcgaggaactgctcgacaacatgcgtctcgcatgggatctgttcgtgcgcgattcgcagctgcgctggctcggccctgagaagggcgtcgagcatatggccattggcgccgtgctttcggctttgtgggacctcaaagccaagcgcgccggcaagccgctctggctgctcctttccgagatggagcctgaagagctcgttgcgacgcttgacttccgttacctgaccgacgccctcactccgcaggaggccatcgatatcctgcgcgccgcccaggaaggcaaggcggagcgtatcgcccacctcaaggaagtcggttatccgggatattcgaccgccgccggatggcttggctattccgacgagaagatggtccgcctggccaagcaggagaccgaggtcatgggcttcaagcagatcaagctcaaggtcggccagaacctcgaggatgacctgcgcaggctcaagctcgcccgtgaagcggtcggcccggacatcgccatcgccgtcgacgccaaccaggtctgggatgtgccgcaggccatcgaatggatcggcaaattcaaggactacgacctcgcatgggttgaggaaccgacctgcccggatgacgtgcttggacatgccgcaatccagaaggccatcgatccgattccggtggccaccggcgaacagatgcagaaccgagtcatgtacaagcagtacctgcaggccggcagcttcaaggtcatgcagattgacgcgacccgagtcgccggtccccaggagatcgtcctcgaatacctgctcgccaagaagttcggcgtcaaggtctgccctcacgcgggcggcgtcggcctgtgcgaagccgtcagccagctcgcgatgttcgactatgtgtccgtctccggcgagatggaggaccgcgtcgtcgaatacgtggacaaccagcatgaatacttcgtgcatccgaccgtcatcaagaacggacgatacgtcgctccgctcactccgggcaacggcacggagatgaagctcgacgaatgcatgaagtacctgcacaaggactgaccggtcgggaggacctgagatggacctgcatcttaaagacaaggtgatcattgtcaccggaggcttcaaaggcatcggcaagggcataacgctgcgcttggccgaggagggcgccattcctgtggtgctgaaccgtgatgacggcgccggcgacgaattccgacaggacattgaacggatcaccgactcgtatgacacgtatctgatcgacctgaacaacaccgacgacatcgcccccatcgtcaagtcggtcatggagaagcacggccatatcgatggcgtggtcaacaacgccggaagaaacgacaacctcgcgctcgagaccacgtcgtggcgtcagttcgaggagtcgattcacggcaacctgacccactactacgagctggtccatcagtgcgtgccggcgctcaaggccagcaagggctcggtggtcaatatcggttccaagaccgcattgaccggtcagggcaagaccagcgcctacgccgccgcgaagggcgcgattctgggactgacccgcgaatgggccgccgccctcgccccggacgaggtccgggtcaatgccgtcgttgtggccgaggcatggacaccgctgtacgcacagtggatcaagacgttcggcgacgagcaggcgcagcgcgcgcagcttgagaagatcaccagcaagatcccgctcggccaccgcatgaccgagacgtcggagatcgccgacaccgtggcgttcctgctgtccgacaggtcgtcgcacaccaccggacaatgggtcttccccgacggcggatacgtccacctcgatcgggcactcggctaggagataccgcacgggggatcatcggttcgcgttcgcgcgtccggatcccctgttttcgattcatcgctccaacaccgctcggcccgcggacatattcgccaccgcacgcggaacgcctaccatatcgtcgaaaggaaaaaatcatgacttgcaacgcccaattcgaaggcgtgttctgcccttccatcaccatcacgaacgcggatgggaccattgactacgataattggggcaagcacctcgatcatctcatcgacgcaggcatcgacggtgtgttgctgttcggcagtatcggagaattctacgccatcgacgtcaagacgaaggcagaagcggtgcgtttcgccgtctcgaaagtcgctggacgcatgaaggtgctcgttggcgtgggagacaccaacttggacaatgtgagaacattggcggcggaaagcgaaacagccggagccgatgcattggttgcagtatccccgtactatttcggaccatcaccggattgcgcgaagcgctacttctctgcggtggccaaggcgacgacgctgccggtcattctgtacaacttcccagccaggacgggcaacgaccttacccctgagctggtggcggatctcgcagcggagaaccagaacatcatcggcatcaaagacaccgtcgacaccatcagccacaccagaaaggtcatcgctgccgttcgtaaggtgaatccatcgttcagcgtgctgtccggattcgacgagtactacaccgtcaaccgaatcagcggcggcaatggcgtgctgtgcggattgaccaatgtggagccggagacattcgtcagcctgcatcgtgcatggcagtccggtgactatgccacggccatcaagtcggctgagcgcatttcctatctgatgcgcctgtacgacactgccgacctgttcatcagcgccatcaagggcgcggtcaaggcgaagggactgccaatcgacacgtccatccatgaacccgccgtgcagctgaccgatgaacagtaccgcaatatccagagcattctaggcaagtaacaatcaaataagtctgaagacaagcaggagcagctatgctgaaagggataccgtcgatcatacagcccgatttattgaagattctcagtgaaatgggccatggcgatactatagttctcgcggacgcccactttcccgctgaatcattggggattcattcccatgtgatcagatatgacggtcagcccatcgaaccacttctcgatgcagtgatgcagcttataccgttggatcaatatacggagcatccggtgtttttgatggataaggttcctggagacgccgtcgacaccccgatatgggatcggtatcgtcaggtaatcaccaagcatgagtctgacagacaaacggctatcggcatgctggaacggttcgccttttatgatgaggccgaaaaagcctactgcatcgttgcaacaggtgagcagtcacagtatgcgaacatcatcatcagaaaaggcgtcattcgctaataaccgaataggagcaatataatgagcaatcctgcagatgcgggcatcaacctgaactatctcgcaaacgtgcgcccatcgtcgcgccagcttgcctggcagcgcatggaaatgtatgccttcatacacttcggcatgaacaccatgacagacagggaatggggtcttggacatgaggatccggcgctgttcgatccacagaatgtagatgtggaacagtggatggatgcgctggtggctggtggaatgactggtgtcatcttgacatgcaagcatcatgatggattctgcctgtggccatcgcgttacacgcagcataccattgccgcctcgccatggaggggcgggaaaggggatctcgttcgtgaggtcagtgagtcagccagacgtcatggactgaagttcggcgtatacctgtctccgtgggatcgaaccgaagattcctatggcaaaggcaaggcatatgacgatttctacgttggacaattgactgagttgctcacccagtacggaccgattttctctgtatggctggatggtgccaatggtgagggcaagaacggcaagactcagtattacgactgggatcgttactacaacgtcattcgttcgcttcaacccaatgcggtgatatccgtatgcggtcccgacgttcgttgggctggaaatgaagccggacatgtgcgtgacaacgaatggagcgtcgtgccccgacgactgcgctcggcggagctgactatggaaaattcacagcaggaggacgatgcgtcctttgcctctacggttcgctctcaagatgacgaccttggaagccgtgaggcggtttccggatacggggatgatgtctgttggtatccggctgaggtcgatacctccattcgccctggatggttctaccacaagtatgaagacgacaaggtcatgaacgcagatcagctttttgacctctggctttccgcagtcggcggcaattcgtcgcttctgctcaatattcctccttccccagaaggactgttcgcagaaccggatgtggagtcactcaaggggttgggaagccgtatcaatgaattccgcaaagcattggcttcggcttgttgcgaagtcaagaccagtagcgcgaacgaagctgcaatgcgacttattgatgggaatcaagacacgtattggtctcctagcaccgatgacgtggcccctgccgtcacgctcactttcccgcaactgacgacgatcaatgccgttgtggtcgaagaggccatagagtgtgggcagcgcatcgaacatatgcgcgtcactggcgtgctatctgacggcactgagtgtgtactcggacagtccggcacagtgggataccgcaggatactccgtttcgacgatgtcgaagtatcttcggttacccttcatgtggatgattcaaggctcacgccaatgatcagccgtgcggctgcggtgcggatataaggcgggtatatcaccatgaaactcacattcgatggaatctcttcgtgctgggaagaaggcatcccgctcggcaacggacgcatgggagcggtcctgtgttccgaaccggaaaccgacgtgctgtatctcaacgatgacaccctttggtctggatatccacacgcggaaacctcaccagtgacgccggaaattgtggccaaggcacgtcaggcggcatccggcgacgattacaccgccgccacgcgaatcatcaaggaagccacactgcaggagaaggacgaacagatttacgagccgttcggaacggcccgtattcagtactcgacccctgcagacggccgtgagagcatgaaacgccagctggatcttgcaagggcgctcgccggtgaaacattccagatgggtgatgccaacgttcatgtcgacgcatggtgcagcgagcccgacgacctgttggtctacagaatgtcatcggatgcgccgattgatgtgaacgtcagtgtctccggcactttcctcaagcaatcacgcgcctcgttggaagcggtatccgacggccatcgggccaccctcatcgtcatgggccggatgcctggactcaacatcgggctcctgcctcacccttccgaacatccttgggaagatgagcaggacggaaccggaatggcgtacgccggtgcgttctcccttaccgtcacaggtggcggcatcaatgtgggggacaacagtctgcaatgctcgaacatcaccggattatcgctccgcttccgcagtatgagcggattcaagggaagcgaccagcagccggaacgaagcatgacggttatcgccgaccatttggagaaaaccatcgacgagtggtcgactgacctgcagaccatgctcgaccgccatatcgcggactaccgcagatatttcgacagggtggccatccatctcggttcagcccatgatgacgatacggaactaccgttctcggcgatccttcgctcggatgagaaaaaggaaccgcatcgtctggagatgctggcggaggcgatgttcgatttcggccgatatctgcttatctcctcatccaggccacacacccaacctgcgaatctgcaggggatttggaaccataaggatttcccgaactggtacagcgcctacacgacgaacatcaacgtcgagatgaactattggatgaccggcccctgcgcgctcaaggagctcatcgagccgctcgtctccatgaatgaggagctgctggcaccggggcacgacgccgctgacaggattctcggctgccgaggatcggctgtcttccataatgtcgatctctggcgtagggctcttccagcaaacggcgatccgatgtggtcgttctggccgttcggccaggcatggatgtgccggaacctgttcgatgaatatctgttcaaccaggatgcatcgtacctgtcccgcatctggccaatcatgcgggacgacgcgcgattctgcatggatttcctatcggagacaaagcatgggctggccccgtcccctgcaacatcaccggagaactgtttcctggtgaatggagaaccggtatccgttgcgcaaagcagtgagaatgccacggccatcgtgcgtaatctgcttgatgatttgattcaggcttctcacgatttggaaaaccttgacgaagaggacagcgctctggtccgtgaagcggaatccgtccgttcccaactggctgaaacgcgattgggagctgatggaagagtccttgaatggaacgacgaattcatcgaatccgatccacagcaccgccatctgtcccacctttacgaactgcatcctggtgcaggcatcacgtctaagactccgcgtctggaggaagccgcgagaaaatccctcgaagtgcgtggcgatgatggttccggttggagcatcgtatggcgcatgatcatgtgggctcgtctgcgtgatgcggaacacgccaaacgaatcataggcatgttcctacggccggtggatgcgaacgctgaaaccaatctgctgggcggaggagtgtacgacagcggattatgcgcccacccgccgttccagatcgacgggaaccttggattcccggcggccttgtcggagatgcttgtccaaagccacgatggctggattcgcgttcttccggccctgccggaggattggcatgagggaagcttccatgcgctccgcgcaagaggtggaatccaagtggatgcgacatggacggatcagacagtggaatatacgttgcgctgttcgaagcccacggagattacgctgaacgttctggggactgatatgggacgtgtcgcattgtctccggataagccattcaagggaaccatccggcgttaacgtattgcgttatatccgttactaaatgttgcggaccgtctttcctaatagaggaggacggtccgcaatctttttttgatgggaaaggagattccgccattttccacgattggtatgcgcagatgaacctgtacagtgaaagctatgcgtgtaatttctggacgattcaagggtgtggcgcttgctacgccgaaaacgggtacccggcctaccacggatcgcaccaaagaggcgattttctcgcacctcgactcatggggagtgctggatgatgcccgtgtactggacctgttcgccggtactggtgcgttgggcatcgaagcgctgagccgtggcgcgcgagaactcgtggccgtggaaagttcccggcctgcggcggcgctgattaccaagaccttgtcgcagttacagaagaatcgttcgtgggatgcctcgctcaaggcccgtgtgttcaccaaaaaggccgagcaagtggctggcggctttggtgaatcctttgacgtgatattcattgatccgccctacgcctatgagaccgctgaatgcaatcagttgttggccaatctggcggtgggcagcgccaccaacgagaacaccgtgattatgctcgaacgctcggtacgctccgacacccccaccgcccccgaaggctggcaaatcactgaaagccgcaactacggcgaaaccgccgtcttctacatcgagcccgcggatgacgactcggatatagagcgttccgacgattccgccgcgtagtgaatctcccaccgtgtggtgaattaatcggcgagccggcgcggatgggcggcggagacctcccagcccaaggccatcagggtcttgcggtcggccttatccagcgccttgcaatccagtgccgcgataaggtctgggcgaatctcggcggtgcgggccagcgcttcgtcgcggcgaaaa

SEQ ID NO: 2489 - DNA, 10675 bp, Unknown
  R50_10m  MAG No. k141_19782
gtcggtgccacggaaagccacgtacagcgtgccgtcgcccagttcgaagacgcaggccgagaactgtttggtggtttcggcgtcgaattcatccacgtattcgccgacgcgcaggtcgcgccagcgcgggctctcccccatcgcacgcagcagatcgacgttcatctgcggcgaccacaccttgccgaacatggcgtcatagcattcggcgcgtagcaggtcgcggatggagaccgtgggaatcatgccgctgacgtccgccgaatcctcgtgatagcgcggcacgttatccggcatgcgcgcgtaggccagctgggacagggcgagactgtccgcctcggtgaacggcagtgcggcgaaggtgtcgaaatgttgccggatatcgtcggtgatgttccccatggcggccttccttgttcgaatgtaacgaacctacggtaattctacgccgagcgggttttcatcacaggcgagtcggtcccagagtttaaaaccctatctcgccttcaaggggctgatttggccttctggagacatctatctccgtttcaaggggctgttcatccgtcatatcccgagtatgagcggcatcaccccaacgtcattccgccattttcatgctgcttctacttgggcatcagcccctcgaaacggaagtagatctctagagaccacgacatcagcccctcgaaacggagatagcatcaatttaggcccagattgcccgttacagcatcgggtaatacttaccgtgatcgattttggcggcgatatcacgtaattcggcagcatctcggcggtcttcttcattaccttgcgacaacttgttcgctttactgtccagatgatgctcgatgccgaagtaactgcatacccccacgagcgcaaatagccctataccaactaaccagttcatagcacgctccttgccaaagcttctgccttaatatggtactgctgttcatggatcgtaataaaaaaagcgggctcgcaagcccgcttttggttttaggttgaagacgatcaggcgccgtattcctcaaggtaggcggcggcgcgctgctggatgtcgtggctgagcagcggggtgccgtcggggttcttcatcttggcggcggcgtcgaagatctcgcgcacgttggcgatggagagcaccgggaagccgaattcggcttccacggccttcacggcggacaggtcggagtccttggtcttctccatgcggtccacggagagcacgagacccacgacctcgacgttcgcctcggccttgagcttggggatgacttcgcgcacggcggtgccggcggtcatcacgtcgtccacgagcagcaccttcatgccgtcggtcagcggggtgccgaccatccagccgccgtcgccgtggtccttcttctccttgcggtcgaaggtgtatccaacggtcatgttgtggccggcgttcagcgcgatcgcggtggacacggccagcggaatgcccttgtaggcggggccgaacacggtgtcgatgttgcggggaatcgtgttgtgcacgatggcctggctaatcttttcggcgtagaacgtgccgagcgcggcgatcttcttgccgtcgtcgaaggcgccggcgttgatgaagtacgggctcttgcggccggacttcagcgtgaagtcgccgaacttcagcgcgttggattccaacaggaattcagtgaagcgatgtgcgagtgtttctgccatgatgttccttacctccaagtctgtcctgcggccagtttagcagcgagttcgggacggctgtccagcaggtcgtcaagttcgcgggcgacgcgcagcggggccaccgggtcgaagagcgcggccgcacccacttcgacggcgttcgcgccggcgtacaggtattcgagcgccttctcaccactgtcgatgccgccgagtccgatgatcggaatctccggcagtgcggtgcgcacccgatagacggctgccaggccgaccggcagcacggccgggccggatacgccgccggtgacgttggcgatgatcggctggccggtgcgaatgttgatgcgcatgcctttgagcgtgttgatcatgctcaacgcgtcggcgccatgttccacggccgcacgggccggcacggtgatgtcggtgacgttcggcgtgagtttgacgatcatcggcttgtcggtcatcgggcgcagccggtccataagattggcgagggccaccgggtcggtgcccacgctcatgccgccggcggaaacgttcgggcagctgacgttgatttccagcatgtccgcgtcggagccggcgagcttttccacgaccgccgcgtaatcgtcatcgcaatgtccggcgacattggagatgacgaacgcgcccgcggccttgagcttgggcaggtcctcggccaagtaatggtcgatgccgggattctgcaggcccacggcgttgatgttcgcggccggcgattcggcggtgcgcggcgaggggttgccctcccacggcacgggcgaggcgcccttggtgcatacggcgccgagctggctgacgtcgtagaaccagcggacggcggcgtactggaaggtgccggaggcggtgccgaccggattcttccattccagaccggccaccttggtgtggtgcttccacacgtggggctcgtacaggttgatgtggttgtcgctgccctgcgcggactggttgtttgcgctcatcgtcactccccccatccgagctgttcgcgagtgaacacgggtccgtcggagcagaccttgagccggccgtccacggtgtcgatggtgcacagcacgcaggtgccgtagccgcagcccatgcgctgttccatgctcagctgcgcggggatgccgcgttcggcggcccaaacggccacggccttcatcataggcagcggtccgcaggacaagatgatcggcttgcgatcgtaggccttcaggtcgtcgccttgttcgagtttgttgagcaggtcgaccacgttgccttcggcgtcgtcgatgctccacgaccagtccgcgtaccgggagacgtattcctcagcgaagtggtcgttgcggtagccgaacacggcggtggcaaaggaggcgtcgtgttcggcgagcttttgcgcggcgtagattagcgggggcacgccgagtccgccgccgacgagaatgtagttggcgtcttccttgaggttgaagccgcggccgagcgggccgagcacgtcgacggtgtcgccggcctgcagccttgccaactgttcggtgccgtggcccacgacggcgaagatcacgctgacttcgtcgccgtcgacttcgctgacgccgaacggacgcggcatgagcatgaagtcgtcgtgcgtgaacaggttgacgaactgggcgggcttggcgtgggaggcgatgaacgggtcgcggaatgtcagtcgcatcacgcggtcggtcagttccgtaacctgcgtgatttcgacgttgtggcgcggcgggaagaatccggccgcagtcgcctccgcaaccacatcatgggtgggggtgaaagttgtcatttcattcctattcagcacatcaagctcccccctatcaggggagctgtcaaccgcaggttgactgaggggtagttaaacacactcggctccggtttccagcccacactcacgtatagcccacagccggacaatctacctacctatatacggcaacccgcagattatcgcgcatgtcgagcgccgcctggcgcgcgctgctcgccacaaggtccagcgcctcgtcggcggtcatggattcggagtacttgccgctcttcttccatgcgccgatgatgccgcgcgacgagttgacgatggcgccgctgccctgcttgtcgaacatgcctgccacgtccgcggccgtgccgccctgcgcaccgtagcccggcacgaggaagaacgtgtgcggcatacgttcacgcaacgccttgccttcctcggggtgggtggcaccgaccaccgcgcccacgcgggagtagccgtggctgccgatggtctcggcgccccagccttccacgagatcggccacatgctcgtagaccttcgtgccgtcggccaggtcgagcatctgcagttcgctggaggacgggttggaggtgcgcacgagcacgaagatgtccttgtcggcttcggcggcggcctcgacgaacggggtgatgccgtcggtgccgagatacgggttgacggtcaccgcatcctcatgccacgggtcgaagtcgcccacgccgttcaggtggtgggcgtaggcggctgcagtggagccgatgtcgccgcgtttgatgtcgccgagcacgtagaggccctgctgggccgcgtattcgcaggtcatcgtgtagatgtccacgccggcggggccgagcgcctcgtacatggcgatctgcggtttgacggcgggcacgatgtcggcgatggcgtcgatgatcgtgcggttgtattcgaagtaggcgacggccagctgcgcggattcgatttcctccggggattcgaccgagtcacgcacctcgtcggcaaagctcgccacgacctgcggcggcaccagcgcctcagtggggtcaaggcccacgacgctggggttctgagtgttgtcaatcgcttcgatcaggcgatccatgctgctccttatgttatctacagacggctgaacatcagctgggagccgatgatcgtggcgagggggcgtccggtgacctgccagccgccgaacggggtgttacgagccctggagtggaactgttcagggtccacggtccattcctcagcggtgttgagcaccacgaggtcgacattgtcggcgtcatccacgcggctcaggtcgagcagtcggttgacgccttcacgctgcggctgagcgtcgctctcccccgcaatcacgccatccggatcatccccagtgggcgcgggttcggcgtagtcctcgaccagcgcggccacgtcggttggcacatgccccatgagttcggcgggtcccacggacatgagctcgatcagacgctcatcggaaatgaagccgccgtcgacgagcaccttgtggcacacgccgtacgcgcattccagtccgatgatgccgttgggcgcctcaaggaagccgagttccttctctgccaacgtgtgcggcgcatggtcggtggccagcagatccacggtgccgtcggcgatggccgcgatggtggctttgcggtctgcttcggagcgcagcggcggattcatcttggcgagcgtgccgtacttgagcagcgcctcgtcgctcaacgccagatagtgcggcgcggtctcgcaggtgattggcaatccttcggccttggccttgcgaatcgcctcgaacgagatggcagtgctcacatgctggaagtgtacgtggacaccagtgcggcgggccgcttctatatcgcgggccacgatcttgagctcggtgtcttccggaatgccgggcacgccaagttcgcgcgagaccgggccttcgttcacggcacctgtatcgtgatgctcgcaatgctcgattaggtacaggtcggaggccttgacgttctccagcacctggtccaggatctccggcgtcacagcggaaccgtcgtcgctaattgcggtgatggggtgcgtgagcatggccggcgtcttggcgtcgtcctcgaatccgggcacgtacctgagccagtcggcaacgtcgcttgcctcatgaccggcgcgatccttggacgcgcacacgcacagatcgtaacgaaccggcaattgaacatcgtgcacagtatcgtactgctgcaggaagtcgatgacgttgtcgaagccggcatccagaacctctttcgcaccggccgcttccaggtcagacacggtctgcccatccagtgccggcaacgtgttcggcatgatgagcacgttcgtgtatccgccggatgtggacgcgcggcagccggagaccatagattccttgtaggtctggccgggatcgcggaagtggacgtgcgggtcttcgaaaccgggggccacggtcagtccggtggcgtcgatatcggcaccgtcagccacggcggaggtgtcggcgaagtaggcggcagcggtcccgggcaccacgaggtcgatgacttcgccggtgttccagaccttgatgttgcgtagggtgatgctcacagtttggcttcctcgtcgcagtagtcgcagcggtattcgagccgttcagagtgcacgaggtggaacatctgcttgatgccgggctcggtggtggtcacgcagcgcgggttcacgcaggagatcacgccgacgatgtgctcgggcaggttcggctgattcttttcgacgatcttgccgccgcgcaccacgtctacggtggcctggcgggccacgaagccgagcacatcgaggtcgatgtccttgtcatcctcgattttgatgatgtccttggagccgtaacgcttggagttggcgttcatgatgagcgcaagcttggttttggccgggtcgattttcaggtattcgagaaccttcagcgaggttccggccggcacatggtcgatgatgatgccgttctgaatgctggtgacttccatcaggcctgaacctccttggggttgagcggttcgtatccgggtagttcgtcgcccaccacggtgctttcgagggccatgcgcacgagcatgccgttcttgacctgttcgaagtaggcggcacgcgggtcgtcgtccacgtccacggagatttcgttgacgcgcggcagcgggtgaagtacggccatggacggcttggcgagctgcagcttttcttcgtcgagaatgtaggtgtcgcgcaggcgcaggtagtcgtcttcgttgaagaagcgttccttctgcacgcgggtcatgtacagcacgtcgaggtcgccgatcacggaggccaggtcgcgcacttccacgtaggagcagttgtcggtggcgttgatgcggtcgatcacgtactgcggggtcttgagctcgtccgggctgataagcacgaagcgcacgttgccgaagcggcacagggtctcgatcagggagtgcacggtgcggccgaaggtcaaatcgccgcacagtcccacggtcaggtcggtgatgcggccgaagcgcgactgcagcgtggccaggtcggccagcgtctgcgtggggtgcatgtggccgccgtcgccggcgttgatcaccggcacggatgcggcgcgggaggccaccagcgcggcaccctccttcgggtgacggatggcgaccacgtccacgtagttggacacggtcttcaacgtgtcggcgatggattcgcccttggtcacggaggccagctgcgctccggcgaatccgatgaccttgccgccgagacgcagcattgccgtctcaaagctcaggcgcgtacgggtggagggctcgtagaacagcgtggccagcactcgcccatcgcaggtatgggcaacctctttgcggtgggaatcgatgtattcggccttatgcagcaggtcgagaatctggtttgtagacaggccgtccagcgttacgacgcttttgccgaccattggcgtttcttcagacaaggctcaccttttcgctcgtggttttcaggtggccacccttgtgtgacctaatataacttacgccatttttcggacagccgcattcaccgagtgttcacctgaaaatccaacgaatcggctgtgtctgtatagctgatatctgctttggaacgccagagctcattcattaggtcgatttgacgttcattaggtcactgcaccctcgtatctgttgttggaatgccgccattccaacaaggtatgcggcggcggaccgacctaatgaacgatgaatcgacctaatgaacgtagtgaacgcaatacaagacaggtctatcgctgcgcgcggcgtcggttccgctccagtcgcggtgcgatcacgtgcatacgcgggcgaagcgcggtttgcggctgctgcgttgcggcggaggccgtggcggtggttgccgcagtcgcctcgtcttcggcctgcccgtagaacaggcgctggcatacgtcacggcatttgcgcatcacggccagcaggtcgttctcgaaatgctggccgcggtgggcgccgtagccgaggtagacggcgatgccgcccagcgaatagatgtcatcaggcagaatatcggcctggttggcgcgcccgctccacagatagttgccgttgcgggccgcggtgcacaacgtccatgccttgcgcagctgaatcgcatcgatagcgctgatgagcttcttggcctccagcacgtccaatgcctccaatgtgccgttgacgcgcagatctttgatatcgccggcgtgctggagctgcatgagttgcacggtccattccacgtcagacagaccgcccttgccgagcttcagatgccgttcacggcgcacgccgcgcggcagacgctcggcttccatgcgggccttgagcttgcggatgttctgcaattcggcctcggtcagctccgtggtcgggtagcgcaacgggtcggcgatgttgatcaggaagtcccgcgccagttcggcgtcgccggccgcgtaccgggcgcgcagcagcgcctggcgctcccaggtcgaggcccaggattcgtagtattcctcgcaggaggcgtaggagcgcacgagcgggccgttcttgccttccgggcgcaggtccaggtcgagttcgatcttgggttccagcgtcgtcgggccttgcaggatgttgcgcaggtcttccacgaccttcttggcgaaggcgttggcttggccgtcgtcggcatcgtcggccggacggtagatgagaatggcatccgcatcggagctgaagttcacttcgcgcccgccgtaacggcccatggcgatgacggtgatgccggccggcgcggtttcgacgccgaacgcggcgatctggtggcgcacggcccaggtcagtgaggcgtcgatgatcgcgtcatacacgtcggtcatggccttgagactgtcggagtcgctgatcacaccgctcatccaagacaggccgatgcgttcgatttcgtggcggcgcatggcgcgcatggaggtggcgaactcgttgatgttcgagccgaaacgttccagcgccgagccggtctgcacatccaatgcctcgcgcgtgcgggcctgcagattgccgtcatcaccgagccaactgatcgattcgaccgacttgttgagcgcgtcgcccaggaatcgcgagttggacaggatgtggcacagacgctgggcagcggaggtggagtcgcgcaggaagccgaggtagccggattcggtgccgaagttctcctccagcttgcgccagttgagcaggcccatgtccgggttctggccctcgcccagccactgcaagacggcgggcaggatgatgcggttgattttggccgcgcgtcccacgccggcagtgagcgcctgcacgtggcggatggcggcgtccgggtcgccgaagccgatggattcgaatcgttcctgtgcggcctcgacgctcagcacgatctggtcgttctccatctgggcgttgaccggcagcatcgggcgatagtagatgtcgaggtgcaggtggcgtacttcgcgacgggtgtcgtcgtatttgtcgacgagttcttccgggtgcaggccgaatgcgcgggcgaggcgacgcagctcctggttctggttgagctcatccacgtcgatgtcgcgcttcttttcgaggcctccgaccgaggcccggccgaggtccgggaacaggtgcgtgcgcttcagggaccagatctgctggcgatgctccatcacgcgctcgaagcggtagtcctgggacatgcgcacggcctgtttgcgcgagacgtagccgccttcggacaggcgctgcagcgagtcgagcgtgttgctggtgcgcagcgattcatcggtacggccgtgcacaagctgaagcatctgcacggtgaattccacatcgcgcagaccaccgcggccgagcttgatttcgcgatccttcagaggtgcgggaatcagatcttccacgcgcttgcgcattttctggcagtcgtagacgaagttcttacgcttggacgcgctccacacgaacggccgagtcatatccatgtaggcccggccgaggtcggggtcgccagccaccgggcgggccttgagcaacgcctggaactcccagttctcggcccactgctcgtagtagttcttgtgcgaggagagcacgcgcaccagcgcgccgtccttgccttccgggcgcaggccgccgtcgatctgccacagcggctgctcggccacgcccatgatggcggactggcagacacgctgcagcatggtgcccatcttggtgcccacgcggatcagcgtctgatggtccacgtccttgtcggccggttcgaccacgtagatgaggtccacgtcggagacgtagttcagttcctgtgcgccgagtttgcccatgccgatgatggtgaagcgcacgtgctcgctgccctcggtttcgtggcgggcgatggccagcgcgccttcgagcgccgcgtccgcgaggtcggacagttcgcggctgatggtcggttggatggaggccgggtcgtccgccacggcatcctgggcgatgatggcggccagttggttccggtagctggaacgcaaggccgtggccgcttcggccagatccttggaggcgacgggcatggccggttcgtccgggtccgcgccgaccgccttga

SEQ ID NO: 2490 - DNA, 6686 bp, Unknown
  R50_10m  MAG No. k141_19817
ctcacgagccatctggcgcccgaaggagaagaccaccagcaccaccagcagcaggcccatggccagtgcccatgaataccaaggaagtaccgagccatccgcagcggtctgatccggcggaaccttgccggtcgggaaaggtacgatgacgaaaatcagagaaatcgcgccaaacaccaaagtgacgatacgatccagcatgctgccgcggaacggccagaatactacaaatgcggccaacgtcagagcggcgataatcaaagggatgatggggacggtgccaggggagggaatgaccgtggctgcgatgagcagtacataggacgtcagttgggccaacaacatgctcagggctttgttcttccaaccctcctgggtgatctcggtcatgatacgcctctcagataatcgaatttccatcccaatcctacgtcgggcattggaacggggaaagcaaacaaaatagccctttctggtgaaggggcttatgacactaaatcagaacgcgataacgcccaaatgctccaacagcactttgacgccaagtagaatcagcaccacgccgccggcgatctgcgccggctcctgccagcgggagccgaacgcgcggccaatgtacaggcccgcagcggagaacagtccggtgaccacaccgatgctgaggatggcgaatgccatatgggctttggtgaacatgaaggtcaggctcacgcccacggcgaacgcatcgatgctgcaggccacggccaggggaagcatatgcttccaatcgaactgggcggtctccttggagttttcctcatcttcttcgaaggcttcgtgaaccatgttgccgccgatgaacaccaacagggcgaagatgatccaatgatcgaattgggttacgtatttgctgaatgtagatgccgcgaaatagccgagaatggggaacagcatctggaatccgccgagccagagggcgcttttcgcggcgtcttgcactcgtacgcgggatacggccagacctttgccaatggatacggcgaatgcatccatagctacggaaacagaaataagcaggatttgaatgattatcggaatcatggtgcgacagaaggttcatcgccggattaccgtgcgatgggcctcgaccagcgttcctacacgccgcctacgcctagctgaaaaatacaccagcactatatcacgcgatgcacgtcgaatcaaaaaggcgggaggcctccggagaggtctcccgccgacgattcggaatcgaatcacttgccttcgttggcgaggcgttcgcgtgccgcgatgatttccttttcggcggcgtccacaccagtccagtagtcgcccggcaggacttccttgcccggctccagagccttgtactgctcgaagaagtgcttgatttcggccttgtggtactcgttgacgtcgtcgatgtccttgatgtcatcgaaacgaacgtcggcgggcacgcacagcaccttgtcgtcgccgccggcctcgtcgaccatgtggtacaggcccacggcgcggcactcgaccacgcagcccgggaacacggagttcggaatcatcacgagagcgtccagcggatcgccgtcctcgcccagggtgccgtcgatgtagccgtagtcatccgggtaacccattgcggtgaacagggtacggtccaggaagacgcgaccggtctcgtgatcgacttcgtacttgttcttggagccgcgcggaatttccacaacgacgttgaaggtttctgccatgtcatttctccttgaaaatcgacagttacgttatcgtctcaccacaataccctgtttgcgcctgcaaaacaggtgtggaactcaagaaaccgtgctgagattatgccgacactatgtctaaacagacgaaatcctcccctcaaggggaggatttctagcggtttacgcacacgataaacccatgcacgtcaacggcatcactgttgcattaccgttgcactaccgcatcactgcacggacaggatgtgggccacatccgcccaaggcgccagagacacgtagttgtcccaaccccactggaattcgcggccggtcagctcgtcgcgcacgttgagcgggcggtcggtgggcagacccagctcgccgagttccaggtgaatcatcgactggtgtgcgttgtgtccatcgaggttcacgaccacaatcagcgtgtccgcttggccggtaccggtcagttcggccggcgtgtggcgtgcgaaagccagaatattctggtcggacgtaggcagcacggtgaggttgtggtagctcaacgcggccgggtgggcgcgacgaatcttgttgagcgcggtgagcatctcggccacgccgtactgcttggccttgctccaatcgcgaaccttgacctcgtacttctcgttgtcgatctgctcttcgaagccggggcgctgcttgttctcgatgagttcgtaaccgttgtagataccccaggacggcgagcccatggctgccagcaccgcacgcacgcagtggccggctacgccgttgtctcgcacgtaagcggtgagaatatccggcgtggtgggccagaaggtgttgtgctggtagtagccgtcgtcgccattggtgatcggcagatactcttccagttcgtccttggtgttgcgccacgggaagtagcagtgggactgggtgaagcccacgtagctcagggcacgcatcatgcccgggcgggtgaatgcctcagccaggaacaggatctccgggtgcttcttggtcacggcggcaatcacgtcctgccagaaacgcaccggcttggtgtgcgggttatcgatgcggaagatggtgacgcccgcctcgatccacagattcatgatgcgttcgacttctttttcgatgccgggcatgtcggcgttgaagtcgatcgggtagatgtcctgatacttcttcggcgggttctcggcgaaggcgatggagccgtccggcttgtggcggaaccagttcgggtgggccttgacccacgggtgatcgggcgagcactgcagtgcgaaatcaagcgcgatttccagacccagttcatgtgcacgctggcacagggccttgaaatcgtccatggtgccgagcagcggatccacggtgtcgtggccgcccagctcggagccgatgccgaacggcgagcccgggtcatcggggccggcgaccagcgtgttgttgcggcccttgcggttggtcacgccaatcgggaagaccggcggcagatagacgatgtcgaagccttcggcagcggcgcgttcgaggccggccatcgaggtcttcagcgtaccctgaatgatcttgccggtgttcggatcgatggtggcgccttcggaacgtgggaagaactggtaccaagccgcgaagctggacttcgggcgttccaccttgaaacgctggggctggctgggggagatgccatcgcgcagcgggtgagtctcgtgcagggcggcgatggtagggttgtcgccggcggcgaggcgatcctcggcgctcagcgtctgatcggccatggtctcagcggccttctccaaggtcttgcgatcgcgtgcggtcaggccggcgtccggggttgcggcccaacgggccagcagctcggcaccggaattgagcgcgttgtccacgtcgtccatcacacgcaccttgatacgggcgtcatgcagccaggagacgtacgtgtcttcccaaccttcgatggtcacggtccattcgccgagctgacgcttgacggccgcgtagccatcctcccaaggcttcagatcgctgtgttcgccgcacttgaccatcacggtccaacgatcgaggccgggatttacgcaggtcatggcccggcgcatggtttccttgccgcgcgggttgcgcacgatggcggtggcacccaccttggtacggccttcgatgaacacttgggcggtcatctcaaacggttcgccgagttccacacgggcggggaagatgccacgctcctcggcgggagtgatgtccatgacattgatgcggccgaactggccgggctcgtttgcttcgatggacggtgcgggggcttcgacagccaggcctttcagcgctgctgcggcgcgtgccgtttcggcgctgactctcttgcgcttggttgcggggctctttcgggcagaagtcgtctttgacttcgtcttcgtggtgttgttatcggtattactagtgcgcgtggtcgcgcgatgttgtactgctgccataaggccctattctagaggcttttgaacatatgttgcacattgtggataacttgcaggtaaacgttcggtcaaccgcatgaggtggataactcggcggaagagttatccacaactcgccggcaaacggcaagctcggaccacataggtcgaaaaaccggctgtagcgaatgaaaatctgccatgatcgtggcctacccgcacacagtgcagtatgcggggaacgtaccaggaaaggacgaatgatgataacgacatggcggcaacggggcatggccatcgtagcgatgctgaccggtctgataataatggtgggagtggtgttcggctcggcgaatacggcgtatgccgcgacgttgacgcccgccgacgaaagatatcacgtgatgtttccatacaacgatatggaatattacgtcggtgtcgcggggctggacgcttcgggcaacaagtactactgcatcgaagcggggaaactgagcgactatgtgataggccccaccacggtgcttgcctccgatgagaacgcccggcgtatggcatggatccttgaccggtaccgcgacacggatgccgccacccatgcggcgatcggcatcatcgtgcaggatcacttcgggcgcgatcgggacgagtgggcgagacagatggcggtcattcaaggccggtatcccgagatcgtggcgaaggcggcccggatatgggatcaatcggccggcaagacgcctgcgggcacgacggtggaacgcaccgatgccgaggctttgcgcagcggttccatctcggtgaaagtggtgaaccgcgacggtgacgcgatcgcgggagtgccgttcactgtcaccttgcaggggccggcgcggttcatccaaggcggcaacacgttctcgggggtgtcgacgagcgccggatcctcgatcgcgtgggaggcgaccggcgccggcgaggtgacggtgaacaccacatacgagtatgggcggatgcacgtcatggacagcactcaggacatgctggccttcgattcgatggcttccgccggcggttcgtcgtcgacgttccaggtgcgcaaggatttcgttccgtcggtgtccacgcaggtgtccgataaggtgcttgatgcggcttcgccggtgttcgatgatgtgaccagcggcgtgggggacgagggcagtcattgggtgcccggtctgaagctgcaggcgcgtggatactatttcgacgggctcggcaaggacgatctgggcaaggtcatcgcgccgaacgcacgggagagcgcggacgcttttctcgcccggctggcgtcctcgggttatgagccgagtgcttatggcaaggcgtccttcaccggtgtggggcagcgggttcgtgtgcgggccatggccaagccggacggtgacgccgcctatctgactccgaagaccggcggctttggcacctgggtgtgggtgttccggcggagcgagcaaagcaaacgggcgcaggaataccttaccggcgactgggtgagcccgttcatggaggcttcggaaagcaacgtggggcgcgggaaggtcgaagtcatgtcgacggttaccgaacattcggcggatatcggcgccgaactcagcgacaccatcaccgtgtcggggttcccggcggaccacggccagttcatgggtgatgaaacctatggtttcgcggcggatcagccgtatgcgacggtgagcgtatggtggtccggcgatcccgacaacccctccaacgatgaggcgtacaagccatccgggggagaggtccccacggaagacgacaaccaccggttgctggccacctgggagattcccgcgatgaacggcacgttcaaaatcggcgccggggcgttggacgcgcatggcgctcccatgcatctgaccgccgaacggcatgggtggtacgtgttcgtttggcggttcgagggggatgaccgtgtttccccggcgtccagccggtatgacgatgcctgggagcgtgtgcgggtgttgcccccatgcgagtcggagaaaccgtgcgaaccggagaaacccgagacgccaccggcgccggcggaggcaaccacgcccaaccctcgcccatcactgcccgtcacgggtggcgatgtgtcgcttgcctcggttctggccgtgtcagctctggcgataggcgccatactgtccatcgtcgttcggtggcgtcgttgctatgaccgatccaagcactggacgatgcgctggccgatacgttgacccgctgcggcatgatgccgatgatgtcggctggatggtgaaccgcactccgcttctgagcagaaggacgggagctgggcacgaagtcgattgtgacatacgacttgtgcccggcttccgcttcgttgagaaacttcacgcctgtcgcctcccgtggattagacaactgaagatccgcgatgaaaatgacgagacgtttatgatcgccgacttccctgggcaccgtagctgcc

SEQ ID NO: 2491 - DNA, 7455 bp, Unknown
  R50_10m  MAG No. k141_19905
catgtcaatgtgggtctaacagggcattccgaaaagcactgtctggattaacgcttgtcatagttttgcagtactagcgcaacgcacattgtcatacgctagcgtttgctgcgatgtttgggctttcgcttgcggtaggcgcgtccggagttgtgcgcgccggtcgattcgcgggcggtacgcacgcgcacgagcacggttacgagcgccaccagtatggcgacaaccagcagcgcgacgatgatcgtggtgaacaccatggtggtcggatcatcgtattgcgtgttgtccggcgtggtcgggttcgggatgcgatgcccgcgcaccagcagtcgatgcgagttcacaccgtagggcgtgcaggttatgagcgtggcgaagtccattgaggtgctgatgttcaatgcgctcaggtcatccggcagcactactttgatctgatcgacctggtacgtgtaggtgtcgtcgagcacgtggaacgcgaaggtgtcgctctttttcagctcgtccaagccggtgaatagtcgcgcggacggcaggccggtatggccggagatcaccgcgtgcgtggtcggcccgccgaccggcagtgaggtgcctgccaaatgcccggtggcgacctgcagcacgccttcatcggtgccgtggtagatcggcagtttcactttgatgcggggaatggtcacgtagcccatgatgccggtgccggtgatgtcgagcgtgttcttgtactgctctttctgtgtggcgttcatatgccagcggtcgctggtggcggcgagtttgaggttgtaggcgtgcgcggcgtcgaggagtttcttcttctcggctttggacatgtctttggttttggccacgtacccggcgacagcgtatgactggtgcattcggttccaccagtcggccacggacgggtaggcgatgaggccgaggccgccgatcagcaccacgactaggaacccgatgatgaggttcaggccgagattgtcttttttgcgttttttgcgcaggtcgacgcgggtcatcgtttccgatgactgggatgcggaatcagattgcccggattggctggacgggtctgccgtgtcagtctgatctgcttcgttggcctggtctgccgtatcggtcaccgcgtcggtgggcgtatccgcagccgtgttttcggtggctgtgttttcggtgtctgggacttcagcggatgcgacgttttcggcgtcgctatccgctgtttgacgttcgtgctgacggttgccggcacgttttccgtgtgtttcgaacatcactcgctatcgtccgaggaaggctgttccgtggaggcctgctccgaaacctgttccaagggctgttccgtggagttctgctccacgtcgtcttccgaagtgttcttcttgcgcacgattacggcgattgcgatgccggcggcggccagtacgactacgatcacggcgatgatggcaacgctcgcaccggttttcgccgattcggtcttggcggtgttggttaccgtgtaatcgttgttttcacggtcgacgagcgcggtgtagttgcccggcacgttcgcttcgaccacggtgtattcgtgcttggtttgcaagtccttccacgtgtatttccagtcgttggcgttgttgagcatgatggaatcgtagatcttgccgtcttgcagcaggttcattgtcacgctttcggggcgcttggactgatccttgtctttccacaccttgttcacgctgatggtggtggtgggcggcactgcgcagtcggctttcggttcgatgctgagggcgcgctggtcgtcgacattcttgtgcacgttcggcagggcgacgagcatggcggcggtctggcaggtgagcacgttgccctggtatggggcgacgaccgcgaggtagaggccgtccttcagttggttaaaggtggcaacgccggcgctatcggttttgagggtgctttccgcggtgggcttgttcactgcgatgtatccggccatggtgttggcgaaatcgcgcagggtctgctggtcggcgttgagaatatcccagtcgaccgggtatttgccgtgatcggcgaagtcgcctgcgggagtgtagccgcctttggcggaccagtcggccagacggtacaggctgatgtcggcgttgttgagcgcggctttctggtattggtaggtgacggtgaggctgccttccgcagtggtgccggatgccgtggcggcggtggcggcgggtgcgctcaagccgatggttgcgagcatgagtgcgaacatgcagcacaacgccatgatgatgcggtgttttgccgttctgttgttcatctctgccctctcgttgtggcttgtcatttctttcccctcgtcggaagttccctagttttcctggtcagggtccttaggatgcggacagctggcaaccgtgttcggcgcgtttgctggccattcgtaacataaggacaagttcagggcacacggctcaacatatgttgtgttgggcgacgtggttgggcacaacgtgcgctgtgatgccttgataggcgggtacaacgtgtgttgtgtgtagtttggtgcggttgggcactgacggccggatccggtgcgtagccggatccgggtcatgtgcatgttaagttattttggctttgccgtggggtggaatcaagcggatgccgcaatagcaggcccaaatcttcacccattgaacgaccactattgaagcatcgcgcttgacccacgtctattttcttggctggccgtggctacgctcagcgagcgttgcgacgacggacagcgaaggcgatgccgaaggcagccaccaggacgatggcagcgccagcaacatacagaatcgtggtgcccatgccgccggtggacgggaggaaggagcccttcttgttcacgacgtcggcctgaacggtaccattcgtcttatcaccgtcagtctgattaatcttcaaagaagtcagcttcggatcgtcagacgaaacatcatgctcagcggtcacagtgaacagcgtgtcggcagccgtgttatagccggccggagtataagattccacgagcttgtagtcgccatcatcaatacgcgggaaggaggcaatgtacttattatcagaggtcttagccacttcaatttccgaaccgacctgtacataaccgttattttcggaaacaccatgggtcttcttgtacagcttgaacttcggcagatcgttatcagccggagtcccctgatcgaaggtcttgttgacattgagctggtaggtgaagacaatgactttatccttcggagtctcgccggtcggagaattcgcgcctgtaccagtgtagttcgggttgttggagtactggagcttcgcctcgttcgggttgccggtggaaccaatcacagccttatcgttcagcgtggaagtgtattcaacaataaacttgccgcctgcagcgacagtaacatcagctttgttggaatccttgagagcaaggctcttgacatcattaatagtaatggtaaaagaaccgtctgccttttccgtggcctgagtcactaccttggtatatgcgctgctatcaagagtcgcggtctttgtcccatccttcgaaacgtacttaacggtgaaggaagagacagaggatcccgcattctcatcatcataagttagacctttagactggttatcagtaaagaccagcttataggtcttgtacgccgcgaaatctttggtatccgtcggcagagttgcagccaattggaacggaacatggtcgttcacatcgtaatcggcggaatcctgccaatcagtcgtcgttccatcagtatcattcttgtccttgaccttcttctggaaggtcggcttatcggccttacgggtgatggtcactgcctggttaccgacaacctgaacgatgtacagagtagctgcatcattaccggttacatttttctggtccttggcgaggtaatagccagccggaacgttgctcagcggcttgccggccgatactgtaccgtacgcaattttagtcatatcaatgaactttttgatagtttcaagcttcgtcgaatcggaagcattgctatcaagtccagccacagtctcggcagctttagcggctgtcaggtcagcaccatcagtaccggctgcgttcttggccttgaagttctggccagctgtaacgttgccaagagaaccatccgtaccgtacgtacctgtgaaaatctggtagacggaataggtgtgggtatctccgtcagcgactttgataccaccagttggatctgccgccatggcggtggaggcgccggcgaaaccggcgacggccatcgctgcggtggctgccacagctacgaggcctttgagaaccttgttcattgttctccctttctttcttgttttgttaaaacttgggttgttcatattcagttattgcctagagggcagcgagttcgctacgttatgggccggtcccccttctcctagacgtttccatcattgccgcctcctgaggctcaaggccagaccggccgcggcaatcgccactgcgaggaatcccgcagtgtacatcttgttcagcccttcgccgcccgtgccaggcaggacaacgccaggggtgttggtaatagatccaccgtcaacggtgaatgccgtattcgcgtcgtatacgccggtggcgttcgcgttgaaaccgctggacgtgtaccattcaccggtcacatcggagccttcggcgggaccaatgcggaacgtgtgcggcgtgctgtccagatcgtatccgtcaggagccttggtttcgacaagctggtactcaccccatgccagtccctgaagcttgaaccggccggcctcaccatcgatgtccgcataggcattggcggaagcggcgcactgcgttgcggaagagtccacgcaatccttgatggttgcgagttcattgttcgcgtccgtgtacgaggccttgccgctcacccaggagaagctcttcgtccaggtcagcttccattcggaaccgtccaacagcttggtgccatcagtcttatcgaccttgttccacgtgaccatgccggtcttgcgggtgttcggcagcttgttgccggccttggcgggatcccacgtagcctgaccgttcttgatggtgatcttgtactcgccgccgacatcgaagccgttcggctcgccggtttctttcagaacgtagtagccgtccgcaagattgctgatgcggaacgcacccggatcggtgtcttcatccttcaactcatcctgagcggcgttggccgcacgactggttccactcgcctgcgtggcagtcttcgcagccttgcgaaccgccttagcggacttggccgaccgcgtgctggcggacacggcgcaaccgttcggagcggtggtgctgtagctagggcctgcggaaatggtcacgttctcagggagtgtggttccactggtgaacttgaagttgccgtcgctcttcggaacattcgcattgcccgggccgtaccaatcactaccgtccagatgctggaagccgaactggctgtccacgctgatcttgtccataggaatccgcgcatacgcatactggccgcaggaaccgctcatctgagtcatcttctgatcggtccaagtgccactgttcaagcggtagtgcacctgcacgtcgttggcgtaccactttccctgattattcgaatcaaagtacaggatgagatacttctgcgccgatgtcacggtaatttcagcggaagcagatgcgccatccgcggtgcttgccgtaatggtggcagtaccagcggaaacaccggtcaccaaaccgttctggccaaccttggcgaccagttcattattagacgaccaagtcacattctgctgggggttgacggtcgccgtaagctgcgtggtcttaccttcaaccaccgtcgcagcgctgggggaaaccgtcaccttggctgcggtggcaccggtcaccttgaacttcacggacgagcagacaccggcatttgatgtcgagcatgccgtaatagtgacgtaatcattgccgctgttggacttcggtgtcacgatgccactaccggcgtcaacagtggcatagtaatcgttcgacgaggtccacaccacgccggacggagccccgctcggagtgacggtggcggacagcgtgaatacgttgttgaccgccttattacccagatcctggccatcggtgtatgccgcgccatccgaaccgacaatgctgacgcctgtcaccgcgaccgtggtgtcatgaatgctcttcggccaaccagattcaacatccgcacgctcctcatcggtgtacttggtcaggttccacatggacccggcaagccttgtatccgtatcgtcggaatcgaccttggaccattcgagggaagcgcccctcttcttgttgacgatcttgccattcatcagaagcttcaccgaagcatcagtcacttcgttaccttgcttgctatagacggcggtgacggttgcggatgaagtgtcttcgttaccagtattgatttgatagatgttttcgttcagctcataatcatagctgccggtcgacgtttccttgatgtaatacgtggcattgggagcaagaccagcaagcgagaacttgccatcatcctcatcgccatcgttccaaccgttatcggtgatggtggtaagcggggtagccgcagtaacagcattgtcttccttaccgtacaccgaccaggtggtgccacccaacaccttgccatcagcgtcgaccttggaccactgaatcgtggaacaggaggatgtcagctgaccgttccagggaaggttgtggcgttcttgatccatatcgatcacggaggaggtcgcgccttcgcccatatccacgccgatgttgttcgggttgtacatggagaagtcgccgccgacatacacacgaccattggtggttacgtggctttcgaagctgccgttcagcaccataatgctgccgagcatggctgcggcggggtcatcccgggaggtcaggatcttggtggaatccgtcgggtaaccccgcttatgataatccccgttaagtgcttgcccgcccttgatagtgagcttgggagtttcggcgaagttccacatgatcttctgcgcggccttgctgtatgcgtctcgcatctctttggtgactgcaccattcacgtcagtcgtcacataaccgttggagatttcctgaccgttccaccagaagcgccaaccattattgaacgtgatcggattttgaccctcgacattgataaccactgatgccgtatcagagatgttcgtaaaggcgaaagagataccactgtagccttcagaatccaacattgaggcattaacatcgaacacctcaagggatgggttctgcgtaccagtgaaggtaatcagcttttccttctgctggtttgcgtcaggagcgccctcaacgaagttgaaatcatacttcgtattctc

SEQ ID NO: 2492 - DNA, 11310 bp, Unknown
  R50_10m  MAG No. k141_19945
aatatatggaatatgggtattgtcttttccgactttttcctgtacggaaaaccgcgaaaacacttactgtatattgggcaaacatccgtttgttaattttgtatttcctgagcctttgctggacatgccttatactttcgtgtcagcagtccgccggcccggatggtgacagtccccgccgccggcaacggattatccatcagcatcatcagcatcagacaggggcatcatgacgacagacgccagcgcacgggccatcaaacccgaacttctacgcacgtacaccgaagacttcaacaaggaccgcgccaacctgatcgcggcggacgcggcggtttcggccggcgtactcaaggcggccaccgactatcgcggcgtgcgtgcgctgccgcgcgacttctccatcgaactcaagcagggttcgatcaccaatcaggagcgttccggccgctgctggatgttcgcctccctgaacacgctgcgctacgagcttatgcatcgctggaaccttgaggacttcgagttctccgagacctacctcttcttctgggatgcgatggagaagtcgaacacctacctggagaatgtgctgcgcacgctcgacgagcccaccgactcgcgcctgttcgaggccatcaactggggcccgtccgatgacggcggctggtggcagatgttcgccgcgctggtgaacaagtacggtctggtgcccaagagcgcctacccggagtccgagaactcccgtaattccgatgatttcaagcagtacctcaactccaagctgcgcgagttcgcggctgagctgcgccgccgttcggctgcgggcgctggcgaggacgagctgcgcgcgctgaaggacgagtacatgggcaccgtgtaccgcatctgcgccgtgtcgcttggcgagccgccggagaagttcgacttcttcgcgcgcaccaaggatgacgccgaggataagaagggcgaggcctgcaagtgcaaggccgaggccgacgcagacggcaaggccgaatcctgcaagtgcggcgactcctgcaaatgcgagggcaaatccgacgccaaggcctgcaagtgcgataaggacaagtccgacaagccgaaaaccggcaaggacgagcgcccgcagattcgcgagatcggtatcaccccgctcgagttctacaagaagtacgtgccggtggacgtcaacgatttcgtgacgctggccaacgccccgctcaagaaccgcccgttcaaccggcgctaccgcatccgcttcagcgcgaacgtggccgaggcgggcgatatggagttcgtcaacgtgccgctggacgtgttcaagaaggccgcgcttgaccagctcaccgccggtcacccgatctggttcgcctgcgactgcacgcagttcgcgctgcgcaaggatggcttcttcgaccagtccgtggtgcgcgtcgaccagctgttcggcactgaattcactggcgacaaggcccacggcctcgaatacggcgacagcccgagcaaccacgccatgaccttcaccggcgtgaacctcggcgaggacggcaagccgaaccgctggaaggtggagaatagctggggcaaggacgccggcaaggacggctactacgtcatgtccgacgcctggttcgaccgctacgtcaccgagctcatcatccgcaaggaatacctcgacgacgccacccgcgccctgctcgccgccgaaccggtcgagctcgacccctggcagcccctcacccgccgctgccgctgacgttccgctggcgggagcatatatttcgaatgtcccttctctctgttcagagagaaggggcattacgttatgcgagtacgcccggccgcacctattcgagactatcgcggctgagctgagcaaaagtgccgtcatcatcggccaattgccggtaggttccggcctcgctaattgttccgaactagttatccacagagttatccacatctcccgcaagctagagccacataccccggttttcatagcgagcatgtgaccgctgcgctacggtggcgtcatgaacgacatattgcccactccaccgcccggcgtattcgacgacgaaccgtccggctggacccggccccacacaccgggcgttgcgtctgcgcgcaccatcaatcctgagctacgttcatcaccacgtatggcgagttccgcgccaactgtgattacaggccctgtgtcgccagcaatgagcgaaaccctcacccaacgtaagcgggaaatgcttaaacgatgcacggacgccgcgcaacagctcgggcaaccggtgctcttcggcatggccacatcgctgatactgcaatccgtgccgcttcccaaggattgcgatatcgaccccgccgagctccataccgtctccgactcacaccgcacacgaatacgtgccatcgtgccgccaacgacaccacacatctggaagccgctgagcgatgcgcacaatgtgcgtatcaacaaacatgtgtacgcactggatctgatacacacttgggcacaactcgccgctcatatatcgctcgaatcgctggtcatacttggcgacgcaatccttacggcaatcgcccgcaagccgggtctggcgaacggccgcactgctgacggcatttatcaggacttcgtgcggcaagtcactggactcccgaaattcaacgcaaaatccaagtgcatgatcgctcttgcattcattacgccccgcgtggactctccaatggaatcaaagacccgcatcgcgacgacgaaatacgggcttccgccagccgtgacaaattacacggtgcccggcgcgacattcagcaacggcgcgccgataacgctcgatctcgcttggcccgaatttcgcgtcgccatcgaatatgacggcgatcatcatcgcgccgacaaaaaccagtggcggcgggacaacgacaagcgcgaactgctgcgacatcatcattggatcgtcatcatcgccactgccgcgaacatggccgatgagccatcccaagccgaactcgcctaccgggtcgggcggcagttggcattgcgaggtgccgtattcgatttcactttgacggcaacgccactcgatgagctcgcccggcggaggcgacgaagagtataacgtttatcgcgaaagtcgtacagtatccatgttgcgccgacgctgcgcgactcggtgtccgtgtccgatgtcccggtagcgatgtcaatcgatttatgtgtggaccgggccagatttcgctgtcccggttctccatttcgcccctttttgagcaaccaagacaaaatttcattcacctatcaccccaccgtgcaatattcgccatcgtacatcggcggaattccggggttttgggattacggataatgggcgtttacaaggggggctgtcccggttcccaaaaagaagccgaaatcacgaaccgggacagcgaaatctgtcccggtaatcgcgtcaatcggttgccgtcatcaccggaacatcaactgcgcataggtcgaacgcttcaatgcgcaacaggcatgcgaccatatcgcgatagcgatattccgacggaagtatgggactcaccacgcgaccaatattatttgccgagctttggagcctcgtgcttggcgtggcggatcacggcatcggggaaaccggcgtggatgtagtcggacagcatccgcaatagcctctcgtcaaaggtgtgccgctcatcgctgctggcatcgaccaggatgaaatcccatgagtattcggtgtcaccgtcgttgatgatgagtccgcggccagtgatttttgcggccagcaacgcggcgatctgtatggcgcctcgcttgaccaaggccgattccgcttgagtcaggttgcccgaaaatgtgacggtatacatcatcagtccccccttctttgttattttctagaacagcaatgccttattgtaaacagacagcactctgccataatccttttttcaatatgcggcccatggcattcccagcattaaaaaaaaagaaacccggcggagggggccgccgggtgagagagaagagagaagaagggttcagttatggggttcgaagaacctcgccaccggtatgaacttcattccgttgacatcttctatataaccgctccatgcttggcgaattgatgtgcttgtctgggaaaagtcttggcggagtgtgacgaatttgtgacgcccgccgacaaccggtctcgctttgtcggggcttgaccgcacatacggcaacgggccacctcgaaacacttaatgtgcgaggtggcccgtcagctacgagctagcaatgccgaatcactcggcggcgagcttggccttctcggcggccagacgctcggcttcggcggcacggcgagcagccagcgcttcatcgaagcgagccagctcctcttccacggcctcggtcggaatcttggcgaagatcggtgcgggcttgggcaccacggcgccgacctcgattgcctcgctcttccacgggtgcacgttcacaccgagctcgtaatcgccggtgatgatcgggtacgtgaagccgggcttgtcgagatcctcgacttccttgagctcaggcagcggcgagaaggtaccggtgccgccgagcgcctcccacaccttctgtgcggagtgcggcaggaacggcgcgagcaggtggttcgcgtcagacacggcctgggcggccacgtgcagcacggtgccgagacgagcctggtcgtccttaatcttccacggttcggtggcggaaatgtacttgttgatgtcgccgaccacacgcatcgcctcggacagggcgtgcttctggtggtgggtttcgatggaggagccgaccacgtcgaacgcggcggaagcctcttccagaaggccacggtcttcgttggtcatcgaatcctcgtccagcggcggaatctcgccgaagttcttgttgatgaggttggccacgcggttcaccaggttgccccacgaggaggcgagctcctcgttgttgtggcgcacgaactcggcccacgtgaagtcggaatccgaggattcggggccggccacggaaatgtagtagcgcacggcgtccacggggtagcgggcgaggatgtccttgacgtagatcacgatgccgcgggaggaactgaacttcttgccttccatggtcatgaactcgctggccaccacctgctcaggcaggttgagcggacccatcgggccggtttcgccgcccttggagcccttgccgttgtacgccagcatttcggacggccagatctgggagtggaaggtgatgttgtcctttcccatgaagtagtaggccgggcagctcggatcgttccaccattcacgccacttctccgggtcgccctggcggcgggcccattcgatggaggccgacaggtagccgatcacggcgtcgaaccacacgtacagcttcttgttcgggttgtcgatccagcccttcaccggcaccgggataccccagtcgatgtcacgggtgatggcgcgcggcttgacctccttgaacaggcccagcgagaagttgatgacgttggtgcgccagcccttgcgggtctccagccatgccttgttggcttcggcgagcgccggcaggtcgaggaagtagtgctcggtctgctcgaagcgcggggtttcgccgttaatcttggagacggggttgatgagctcgtccgggtcgagctcgttgccgcaggcgtcgcactggtcgccacgcgcaccttcggcgtggcaaatcgggcactcgccctcgatgtagcggtcgggcagggtacggccggtggacgggctaatcgccacctgctgggtgcccttgtagatgtagccgttctccaagcactgcttgaacatctcctgcaccacgtgctcgtggttaccggtggtggtgcgggtgaacaggtcgtagctcaggccgaggtcgcacagatccttggcgatcacgcggttgtaacggttggccagttcctgggcagtgaggccttccttctccgcctcgacgagaatcggggtgccgtgctcgtcggtgccggacaccatgagcacgtcattgcccttcatgcgctcgtagcgcgcgtagacgtcggagggcacaccaaatcctgcaacgtgaccgatatgacgggggccgtttgcatacggccaagcaacattcaccaaaacatgactcataaggcttgattatccggcgcggcggggacacgcccggatagctgccgcgccgccatcctcatcccactcacctatccacccgtaacttcccccacatacttatccgtacaccgcttgcgcgcttatccgcatacgcattcgcacacgtatccgtacatgcatccgtacacacgtccacgcacccatccgtacgcacgtccacgcacatccgcacacacttccgcctgtcgatatccaccgagttatccacatcattcgcgcacctagtgaagttatgcacttatccaccgttttcgcttatccggtggcgcgcaagccgcatttctgcatattgttcggtcatggatatcacagcaggtccgatgacggacatcacaacagtcacctcgccggcaaccgcgcagcccgcggtgccgccgatactgtttaccaaggatctgccgggaccgctcagccttaaccgtctggccgccttcggcgcgttacgtaagctcgacgattccgccggctactggatcgagcattcgggcacactgtatggtcgcgcaaaaatcgtcgcggaggtcgccccgtttggcactgtggtgtgttcgatgaccgccgcttgggtatggctgggaggccccgactttccgagcaccatagacgtgatctccacatcgcacttccgctcggcatccgtcagccgccgcatccgcgtattcaaaagattgacgttgccggagcaaatcatcaagctcggcgggctgcctgtcaccacgccagcccgtacggcttgcgacctggtgatgagtcctgaagacatccccgatccttccaccgtcaacgcgctggtgtgccaactgatgtccgcgtaccagtttcggccaaacgactgtctgcaaatcgtcaaggagcatcggcatcacaagtatgccggacgcgcacgcatgttttttgaatcggtgcagaaggagattgacgaaccggctttggagcaatgcgcatgacgaggggattcatcgccaaaggacatcgcagaggccgccatgccgctcaccgtttacggcatttgcggcaggcgcaacggttgcctcgccacgcggcggcggcacactcatccgaatccgcatcgcgcgcaatctcggatatgaccgcgccgcctgaaccacccatcagacttacgcccgcggtggcatgttcgcccgatacggatgttgccgtgctctggcacatcgcatatcacgtgcccgaactgcgtaaatggctggttgccaatcccaaagccgacgcgcctttgctggaattggtctcgcagcgtggtgggcccggggtccggcaggcgttggaaatattgttcgagtcgatggaagcgtaacggggagataatcgccggctgctgcgctatcccttgattttcagcacagccgcatacacctgcttgcgattggccaacgatccgtcagccagtggatgctcctgcaccacttgcgcgatggcgtccttgatacgcaggccgtcctccaaagcacggtcgatggagagcacggccatgtcatccacgctcaacgtactgggcgcggccgcttcggcctcctcgttggacgcgccgccgatgaccagcaccatctcgccacggggcggatcatcaatcacactttggcgaatctcgccaatcgggccgcgacgaatctgctcataatccttggtgagttcgcggcacagggccatcgggcgattcgggccgaacgcgtccagcagatcgtccatcgaatcggcaatgcgatgaggcgtctcgtagaacacgatggtgcggcgttcgggcaacagcgtgcgcagatactgcacgcgctcggaatgctttcgcggtaggaagccctcgtagcagaagcggtcggtgggcaggccggagagggcgagcgcgtcgagcacagcggaggggccgggcgcgcaggtgacgggcaggccgcgttcgatggcacggcgcacgatggccaagccggggtcgttgatggtgggcatgccggcatcggacacgacgagcacggtggcgccggtttcgacctggtcgagcaggccgtcggccttgtcgcgctcgttgtggtcgtgataggcgatgacgcgaccgttcacatagacgccgaggcgacgggcgagatcgtagaggcggcgcgtgtcttcggcggccacgatatcggcccgctccaagagggccaccagacgggcggaggcgtcgccaacgttgccgatcggggttgcggcgagcaccacggtgccggcggggacggtcacggccgattcgcgggattgggtggcggcggattcgccggcatgaacttcatcattgcgttcaggcacttgcgtcacgctaccgtcagcgtcatactgctcattcaactcatctgcgcttgtcatactcccagtattgcccatgccacagagcaatccacgacaatccatggcggaatcgaggcattctccctttgcaggggctgatttcacatgttccggaagtctacttccgtttcaaggggctcctcatccggtgaagcaccagtacaaacggctttgacgcaacgctattccgccattttggcggcatatctacttgaccatcagcccctcgaaacgcaagtagacctccggtaaaccccaaatcagccccttgaaacgcgagatggcacaataccaacgaagacaaatgaaaagaccctctgcggtggaatgaatgcagagggtctcgtggagctgacggtagtcgaaaccgcgacctcttcgatgcgaacgaagcgctctaccaactgagctacagccccttggatgttactttgctccgcaaagcaactcgcaacaatatagtacggagtgcggtcaaacgcaattcgtcatttgccgtgtcggcgtcgcaccgcattgccgcgaatggtgactgtgccgacgcagtactgtcaccccgcccccccaccagctccgcctattctcctgcggagaggtatccagcgctatttcaatttgcggcccgcgcaccacacctgttcgaccgtccaatcggtcggatcggcaaggttgaaatcggcggcgaagccgggggcgatgaggccgataggcaccccggtgaccgggttcggccggtcgaagccgaacgccttggccggcgtcaatgtgacggcctcgaccgcgtccaccgggctcaagcccagttcgcacaccgcacggcgcacggcgacctccagcagcagagtggagccggcgatggcgccgttggagaccaaacgcgcatgcccgtcgaccacgttcacgtccagtgcacccaacttgtaggcgccgtccgggcagtcggtcgcggccattgcatcggttacgaaggccgtacgatgaggcgcgaaccggaaggagaggctcaccatcggatcctgcacgtgaaatccgtcgttgatgagctcgatggtgacgcgcggatcctccaccgcggccggaatcggaccgggctcgcggtggtgcaggccgttcatcgcgttgaacatgtgggtcatgatgcccgcgcccgcgtcgaagccggctttggcggtctcgtagtcggcgtcgcagtggcccacggccggcaccacgccggcagcggcgaactggcggatggcggagatgccgtggggtagttcgggggcgatggtgatctggcggatgcagccaatcttgccgttcgccgcgcctgaagcctcaagcatgtcgtcgacgatgtcgggtaccggatccttgagacattccgggtcatgtgcgcccttgcgggccagagccaggaacggaccttccagatgacagcctaggatgtcggggcggccggactccatcttggcgcggacggtgcggatgttccggcagatcacgtccacgggattggtgatcagcgagagcacctggcgcgtggtgccgtgcacggcgtggccggcccgcgccacatcgatgccatccgacccgtcgtcgaagctcttctcccatgcgccgtgcgcgtggatgtccacgtagccgggggtcagaatacggccttcggcgtcgatgaccgcgttgcgatcggccgggtcgagccccaccgtgcggcagtagtgctcgaaggcctcctcccccgtgccggccgccacgatgacgccggcggcatcggagacgacccaatatccgcgccgttcgccgcacgcatccaccttgcgcgcgttgcgaatcgccaccggagccggcttgccctccagtgccgcggtcacgcgcgagactatctcgttcctatcagacatgttgttctccttaccgctcatgcgctcccgccaacgggagctggctcgcgaaacgagactgagggtggtccaatcgggaagcaatacacatatgccgccgccgataaccaccctcagtctcattacattcgacagctcccctcacacaaagagggaagccagcacacgataactcagatgccctgccaggccggcttgtgggtgtaggcgtagcgatagtagtccttgtggcgcagacgagaggcggcctcctcatccacgataatcgtggcgtgcgggtgcatctgcagcgcggaagccgggcagaacgcggacaagccgccttccaccgtctcctcgatggcttcggccttgccggcgccgaacgccagcagcacgaggtgacgggccttcatgatcgtgccaataccctgcgtgatgcagtgggtgggcacttggttgatgtcgttgtcgaagaagcgcgcgttgtcgacgcgggtctgttcggccaaggtcttgacgcgagtgccggaggccaacgaggaaccgggctcgttgaagccgacgtggccgtcggtgccgatgccgaggatctgcacgtcgatgccgccagcggcttcgatggcacgatcataggccgggccggccagcgcgactttgtcgccgtcttcgagcggagtgccgttgagtacgtcgccgggcacatggaccttggccgggtccaggccaagcggttcgaccacggtgcgatggatggtcgcatgataggactcgggatgggtcagcggcagcccgatgtattcgtcaagcgcgaaaccacgcacgcccgaaacgtcaatggcctcgtccttgacgatcttggcgagcgcctgataggcggccagcgggctggaaccagaggccaggc
